United States Patent Application Publication US 2004/0034888 A1 - sequence listing, part 15

SEQ ID NO: 33551 - DNA, 2479 bp, Zea mays
  Clone ID: UC-ZMFLMO17132B07_FLI
cttcttttttcatttttgtcttatgaagaaatttatgctctcacctctcaatttctgtagatataagcgccttctttgctcagttgacctttcgaaggatttcttcttcagctactcttacaacatcatgcgcagccttcagaagaacataacccagaagaatactgggcaggctgtttatgaaccaatgtgtgtatggaatgaatttctgacacgagcaattcggaatcatctcaagaatacatgttggactgttgccttagtccatggattttttaaacagtcgaagctctccgtatctgggaaggatttttggttgacccttatagctaggcgctcacgacactttgcgggaaccagattcttgaaacgtggcgttaatgaaaagggcagggtagcgaatgatgttgagactgagcagattgtttttgaagacacatctgatggaatcccaactcagatggcttctgctgtacagcatagaggatcgatacctcttgtctggtttcaggaaacttcaagacttaatattagaccagatattatattgaaacctgatgtggactacaaggcgactcgccttcattttgagaaccttgcacttagatatgggaatccagtaatcatcttgaacttaataaagacccgtgagaagaagccccgtgaatctctgctccgtgcagaatttgcaaaggctatccattacattaacaagagcctgcctgatgacaagcgtctaaaatttttacacatggatctgagtaagctttctcgaaggaaaggcaccaatgtgcttgcactgttgaccaaggtggcatcagatgtgttggatctaactgaattcctccactgtgaaataagtacatcaacaaaacctgatgacacctcaagtggagaaagaactgctgccaaaccacatgatgacagaagtagcagtgatcaaactgaatgtgcagctaagttggcacctcttttattacagaagggtgtcctcaggacaaattgcatagactgcttagatcgcacaaatgttgcacaatttgcatatggtttagctgctttagggcgtcaacttcatgcattggggcttactgaagcacagaaaattgaattgcacgatcctctggctgatgatctgatggacttctatgaatggatgggtgatacattagctattcagtatggtggttctgctgctcacaacaagatcttctgcgagcaaaggggtcaatggaaggcagcaacccaatctcaggagttccttcggaccattcaacgctactataataacgcctacactgatcacgacaagcaggatgctataaacatgttcttaggtcatttccaacctcagcaagggaaacctgcactgtggaagctggactcagatcagcattacaacattgggaggcaagggactttaaaagaagagattggaagatcgttcataaagaggtcactatcagatggtaacatactgttggagaacaacttgcctgtaactagctgtaacaatgaaacaaacaacacagaattgcttccaatgcaacagctggatgatattagagaacctaccgactctgcgccagagatctccatatgtgaacctaacccgtgctccagtgtgaactacggcagagtgcctggaagacactctatttcagaagagcggcagagttatttgaaaagattaggttaccctgaattgcattcttcaaatttcctcgaccttgatttgttgtcgtcttctgggaattcctgtgacgaggaagtttttgagaggtcatcactgatcaattcacctatggatgtggtcagcgttgaatcatctacgtcgtacagtgaacaaggacacactgatgagggaagggatgacatggatctttcccgttcaagcagccaggtctcagacgttcgggactattctgaccggtttgcgcactgggtcgcggatggaggcatgctttggtaaaaggccatggacttttgtcttgcttgacaactcggtagaatctgtgaccgcaggaaatggatgcgagcagatgacatggctagatgcagagatggtgggcgtggaaaaagtctcgcatcggtatggttgtgaccactggaaggcttgaacgctgatattcatcggatggggatggagatttcggtggttgggttgagtacaagattcaatttgctgtggtgaaaaattttaccatagtttgtttagacaataaataggcaaaatatatatgattcttttattttagcttacagtgcgtcccccttctccatagaaaattctgaaaagcaaaaaaaaaaaaggaaaatctagaaaaaggaggaaaaaaaacttagataaagaacacttttgctgtaaatagttagtatgttacggaagtataaatattgtgaaattttgctgacgacacgacttcgctcaaacgtgtaatatactgttggacagtgttaacaaaatatatcccgtatc

SEQ ID NO: 33552 - DNA, 1916 bp, Zea mays
  Clone ID: UC-ZMFLMO17132C12_FLI
cttctctcgtttcgccctccccctcgagcaccccgccggctagggttacggccaccgccttccacgcctcccccacttcccgtaggcggaggctggtcggcgtgcacgcgaccgcggcggcggagatggacccggacttctcgcccgggggcggggggcccagctttgaattcgccttcaacgaggtcaacttctccgaccgggaattgcgtatcgaggtcgtcgccggggatgactacgctccggggtccagcggcgccggtgccggaggaggtggcctcgccgactgggcgcgccaccgcaagcgtcgccgtgaggagctcctcaaggagaaagaatctacaactcacatgtcagaccaaacaaattgcaatgaagttgaagcagaagagtgtgatgcgtatgaagaaaatcaagaggaacctgtagcaatggtagaagaatctccacccgatgttggccaagatggtgatgatgggcaaggtattgattcgtcttggactgtggttggtacaccagttttacgagtcaagacaatttatatcagttcagcgattcttgctgcgaagagtcctttctttttcaagcttttctcaaacggcatgaaagaatcggatcagagacatgcaacccttagaattactgactcagaggaaactgccctcatggagcttttaagctttatgtatagtggaaagttggcaactactgagcccactcttctgctggatatcttgatggctgccgacaaatttgaggttgtttcatgcatgaggtactgcagccagttgctcacaagcttaccgatgaccacagaatctgcacttctctacctagatctcccttgctcaatttcaatggcagcagcagttcaacctctgacagatgcagctaaggatttccttgctgtaaaatacaaggatttgactaagttccaagatgaagtgatgaacatccctcttgctggaattgaagccatcttgtcaagtaatgacctccaggtggcatctgaagataccatctatgacttcttgctcagatgggcccgtgcacaatacccgaaatcagaagagagacgtgagatccttagttctcggctgctccctcttgtgcgattcagtcacatgacatgtaggaagcttcggaaggtcctaacatgcacagatatagaccacgagcaggcaaccaagtgtgtcaccgaggctcttctgtacaaagctgatgcaccacaccggcaacgagctcttgcagcggacacaacaacctgtcggaaattcgctgagcgggcttacaagtacagaccactcaaggtcgttgagtttgatcggccctatccacagtgcatagcatacttggatctcaagcgcgaggagtgctctcgactctttcctgcaggccggatatactcgcaagcgttccacctcgcagggcagggcttcttcctctcagctcactgtaacatggagcagcaaagcaccttctactgctttggcctgttcctggggatgcaagagaagggctcaacgagcgtgaccgtggactatgagtttgctgcaagaacgagaccatccggcgagtttgtgagcaagtataagggtaactacacatttaccggtgggaaggcagttgggtacaggaatctctttggaatcccgtggcaggcgttcatggccgatgacagcctcttcttcatcgacgggatgctgcatctgagagctgagcttacgataaagcaacctacgtagatgtgctgccgtcgggttaagtgtgtccagtcatgggtgatgtggaaaatgctgtgtgctgcagatatcctttttgtttttttccttttgttcacgcaccttaatccttacattaatagacagtttggtgatgacaaaatataaagggaaaaaaagggctggaaagctgcc

SEQ ID NO: 33553 - DNA, 1238 bp, Zea mays
  Clone ID: UC-ZMFLMO17132D12_FLI
agagaatcatcgagtcggatagagtcctgggctccaggcgctgcgtactgaacgaagaggcgtgtctcttcgatcgacctccaggcttccagctagctagctagcgagcgatggcattgagggagatcgagtcgacgctgccaccggggttcaggttctacccgagcgacgaggagctggtgtgccactacctccacaagaaggtggccaacgagcgcatcgcgcaggggacgctcgtcgaggtggacctgcacgcccgcgagccgtgggagctcccagaggtggcgaagctgacgggcaccgagtggtacttcttcagcttccgggaccgcaagtacgccacggggtcgcgcaccaaccgcgccaccaggacgggctactggaaggccacgggcaaggaccgcgaggtgcgcagcgccaccaccgccgccgtcgtcggcatgcgaaagacgctcgtcttctaccggggcagggcccccaacggcgtcaagtccggctgggtcatgcacgagttccgcctcgacaccccgcattcgccgccaagggaggactgggtgctgtgcagggtgttccagaagacgaaagccgccgacggcgacggcgatggcggcgcccaagacggcgactcctcgtccccgccggccgccttcaccggcccgtcacggccacgcgccgtgtcagagccgccggaccattccgcgccgccggcgggaggaggctactactacggcctcgcgttcgggccgcggcaggtggaggtggcgcagcagcagtgttacggcggcggcggcgccacggtcgccgaccaccaccacggcttcacgcgagacagcgggggcgctgcagggtttggcgcgacgtggggacgaggagtcgccggcggtgagtgcggggctggctacctcgacatggacggcgcctttgacgtcatgatggccggctgctttggcggtggagacatggatgagttccctcaagtgtggaggtgatcgattgggcaacgtcacggggttattaccatcctcttgaaagaggagaatacatattgttcttactggagacactgggtcagttaaatttattggttgtttaatacacatggggtttggctggtagattagaatgggtttgaaatgctgtgagctcgacaaggttcattgtgaacgtgaactatcaaatgtaaattaattgggaaatcctttcttttctatattatttagtgtatagagttaattgat

SEQ ID NO: 33554 - DNA, 2109 bp, Zea mays
  Clone ID: UC-ZMFLMO17132E01_FLI
catctgaactgtgaagttgccaaccgaatcctttcagatgtgttcaccagtctcactcaatcaaaagaaattacagtccaactcccaaaaggtcacgcaggatcataaacaataatggcagtaaccagttttcaaacttccaatccgcctaatatatagagcagcccttgcatcctaatctcacaacacagagcaaaacaatcaccactgcaggtagagcaaaacaatcaccacacatggcaaccggatcatcgctggtgccactgctgctgattgcagtagctgttgcacagattgttgggtcacaagctggtagcatttccatatactggggtcagaatggtggcgagggcacactggccgacacctgcgccaccggcaactacaggttcgtcaacttggcattcctggcagcctttggcaatggccagcctcctgtcctcaacctggcaggccactgtgacccgacaaacggcggctgcgcaagcctcagcggcgacatcaagtcgtgccagagcagcggtgtcaaggtcatgctctccattggcggcggtgcgggcagctactacctttcctcagccgcggacgccaaggatgttgcgacgtacttgtggaacaatttcttggggggtcagtcatcttcccgccccttgggtgatgcagtccttgatggcatagacttcgacatcgaaggcggcacaaaccagcactgggatgatcttgcaaaatacttgaaagggtacagcaactctggcaggagggtgtacctgaccgctgcacctcaatgcccgtttcctgatgcctgggttggtggtgcgctcaacaccggcctgtttgactacgtctgggtgcagttctacaacaaccctccttgccagtacagttcaggcagcaccactgatcttgctgatgcatggaagcagtggctgtcaattccggcgaagcagatctttcttggcctcccggcttcccctcaggcagctgggagtggttttataccagctgatgacctcaagtctcaggtgcttccattgatcaagagctcagggaaatatggagggatcatgctgtggtccaagtattatgatgaccaagatggctacagttcttcagtgaagagtgatgtgtaggttgttttccttctaaagaatgaactacttgcggagctgtgatggtgtcgagccagtagcaaggtcaaatccaggaggaataaatacaacatcatcccattttgaggaggagctatccttcatagatttaatgatatcttccaaagaagaaacctgagtgtcaccaaacctaacagcaggattaggtttttgctgatcacgggaggtccggtgcagtgagttatccaagtcctcctttctgaaaaaaactggacgatatctcttgttgtcactcatcaagaccaggctccttgactgaaaaactggcactcctggaaatccctctccggcatacagtccttcatcttgcatcaacttaattgcattagccacctgagatgaatcagggaggaatctaaacgccacaccatccgacttcatttggataaccttgttcagcgcgacaggaacgacaccagagccggcgcgcatatcgccatccatctgctccagcagcgcgtcagcatcttccttccggaagcagagcagcccgagcgcctgcgttggactcacgctctcgcccccttgccctcccacgcgtgtggacgacacaagcacgaactcctgggcggcgttggcgagcgcgtacacgggcaccccggcgagccgctcctcgatctcagaggtaggtagggccccggaggtggaggctggcgaggtgatgcgcgcccagggcggcggcggcgggagcgcccgggggaaggaggagaggaaggaggtgacatgggcttggatagggaggaaggggttggggaagcgggggctagggttagtgtctatgttggaggtgccgccgtttgtagttgggttcttgagccatgggaactggaatcgaaaaggcatggcggcgacggtggcggccggtggccggtggccggtgggagagccggagaggagagaggcagggccgcaacccgcaagcacggcggctgcacgcgca

SEQ ID NO: 33555 - DNA, 1491 bp, Zea mays
  Clone ID: UC-ZMFLMO17132F06_FLI
cgggcttcggcgtctgcgtcaagaagtcctccttcaccaaggccggcctctgccgccgcctcgtcctcgtctgcaacaagtggggcaacggcaaggaggacgcctgctaccaggccaggcccacggccaagaccaactgccaggccaccgtcgtcgccagactcctgggggacgacttgctgcacctcacggatgtgaacctggagcacaaccacgcgctcaacccatccgccgcacgcttcctcaggtgctacaagacgctgcctagcgggttgagcaaagatctcgtggtgagggctgccagaggggaatgctcggtggcgggtgacatcgatgtcccgatatttgatgaatgggggcggcttaagaccgggcaagctgatgtcctggccatcaacgctttcttcacccagatgcaggcaaagcttccaaactccttctatgtcatggacttctatgtggagggccatctgaggagtgttctctgggctgattccagatccagggcagcgtatcagtatttcagcgacgctgtttggattgatacggcatgcttaaggaacaagtatcatgtcccgcttgtttcgtttctgggtgtcaatcatcatggtcagcttgtattgctaggctgtggattgctgtcagatgagagcacagagagcttcttgtggctgttcaagtcatggttaacttgtatgaagggacagcctccaaatgccatagttaccgatgaatgtgtggcgataaaagccgcagttcgagaagtgtttccgaagacacgccatagaataagtgattggcatgtagtgagaagtatttcagaaaaaataggtgacttgccagaatatgaagcgatgagaaccaatttggttactgtaatatatgattctttaaacgacaatgagtttgaggcaaggtggaagaactggattgatagatttagccttcaggataatgaatggatcacctttctgtatgagaatcggcacttgtgggcccctgccttccttagggacactttctcagctgggctctgtactgttagccagcgtgaaagtccaagtacattttttgaggatgcagtcagttcagagaccacattggtgacgttccttgccagctacatgacacttttggataacaaatacaaaatggagcaacaagatgattttgattcattaaatagcagcaggctcctgatatcaaagtaccaaatggaagaacagctatccagattgtacaccttgaatatgtttatgaagttccaggatgagctaaaggcaaccatgcattgtcaagttcagctggatgggtcagcatcttcttttatagttattgatttgactgaagcagggagtgaaatgctgaataaaaagtacgaggttgttcactgcatggcgacaaacaggatggagtgtaactgtggcctatttcagtttcatggtatcgtttgtcggcatgcattatctgtgcttaaatggcagcaagtat

SEQ ID NO: 33556 - DNA, 783 bp, Zea mays
  Clone ID: UC-ZMFLMO17132G02_FLI
gcggcggcggctcctcctcagcgcgcctctcgctcgccgatggtaaatcagaaggggttggctcttctgaagatgacatggacccgaatggtcgcgagaacgatccgccggagattgacccacgagcggaggacaaggagctcaagtaccagctgctgaagaagtacagtggctacctgagcagcctcaggcaggagttttccaagaagaagaagaaagggaagctcccaaaggaggccaggcagaaactcctccactggtgggagctgcactacaagtggccgtacccttcagagacggagaagattgcgctcgcagaatcaacgggcctagaccagaagcagatcaacaactggttcatcaaccagaggaaacggcactggaagccgtcggaggacatgcctttcgtgatgatggaaggcttccacccgcagaacgccgctgctctgtacatggacgggccgttcatggccgacggcatgtatcgcctcggttcatgaactacacttccatggacgactgtgtggggcctatatatccaatcgtcggaccgtgggagtatatttcagtgtaccaggaccaggatgcgttgcagtgcaaggacattgttgtggaatttttgttgctgattgccaaggggtgggtcggtcgatgtagcgtctatgcatggcttgtagttctcctgtaatgttgttgttaatttccgcttggcggcttgtaatcttaggtgtatctggaacttgaatcctgggtgattaatccggcaagcagctgcctgtttgt

SEQ ID NO: 33557 - DNA, 2310 bp, Zea mays
  Clone ID: UC-ZMFLMO17133B06_FLI
caaaaaaataaaaaaaacccaacaacactgtaacgagaatatacggcaaaaccctagatctctctctcctctcggcattgctggctggggtgtgcggcggcccgcagtggtgagggacgcacggcgatggcctccgccgccgccgtcatcgcctcgccggcccccggcgccgccgcggccgagcccgccgcctggctcgtcgacgagcgcgacggcttcatcacctggctgcgcggcgagttcgccgccgccaacgccatcgtcgaccacctcatcttccacctccgctccatcagcgagccgggcgagtacgaccacgtcttctctctcgtccagcagcgccgccaccactggccgcacgtgatccacatgcagcagttcttccccgtcagcgacatcgccttcgcgctccagcaagccagctggcgccgccacgcgccgccggcccaggcgctcggggctggcgcgtcgccggccgcgctcccgccgccgcctcctcgccgcgcctcgttctcgcagtcccatcactcccaccagcaccatcgccacggcgcccactaccgccccgatccagcgcgcggcgccgccactgcggcgactggatccgagaaagatggacgtgaagttcataataacaaggaagggagggggctgaaagaagcggggaatgtcgtcgatactaaaagtttgcggttggattctcctataactgatgaaggtgaggaaaaatcaaagctgcaagctgtttctgaagaaagtagcaaaatggttgcaacccctgtagagtattcaaccaatgagatcattgatggcagcatggttaatactgttgaagggctcaaggtttatgaaggattactaaatgtaaccgaggcaaataagatcctttccttagtcaatgaaacaagagcctcttaccggcgaggggggcttgaagctagacagaaggttattattgctaaaagaccaatgaagggtcatggacgggaaattgttcagctgggtgttcctattattgatggccctcctgatgatgaaaatctaagagagacaagggtggaggcgattcctgggctgctgaatgatctgtttgatcgcttgtctcagcaggaaattatacccttcaagccagattattgtgtcattgacatcttcaatgagggagactattctcatcctcaccaatccccttcttggtatggtagacctctttgtaccctctgcttaacagattgtgatatggtgtttggccgttatatatcaggagaaaaaggcgatcatagaggtcctctgaagctctcgctcgcaactgggtcacttctactcatgcaagggagaagtattgactgtgcaaagcgagctattcctgctacacgcaagcagagagtcatactgaattttggaaagtccgtagcaagaaagcacatcccagctgaaagtgcctggtctactccattaacacctcctatgccctggggtcagtcatcaaggccagttaacggctcccgccatccccaaagtcctaaacactatgggtatgctccaatcagcggtgtacttccagcaccaccagttggagctcatcacgtcccaccgtctgatgggatgcagccactatttgtagcccctgctcctatttctgctgcagccatacctttcacgccaactgttcccttgcaaaatacatcagctgcttggatacaagaagttactccaaggcctgctccgccacgattccctggtcctggtacgggggtcttccttcctccgggatcaggccaccctctgcctcatcagatgatgccggcttctcatggccatggcgaacccaactctccacaaggttcatccgcttacctgcatagtaaggtcaatggcaaggagacatctaatggcaatctttctcctaagaactcgccgagaaagacatcttgcacagccgaggagaaaccagaatgcaatgggagcttaaatggtggtggcggctctgcggatgagaagtcaactgtaggtatggagcagcagaatggtgttcagaagaatgttgggagtagcaaggtccagccacatggacatgcaactgaatagagtgggacttatagtacatagacaacagaaaactgaagagacgaggagttgaattttgggccgtgaatttgcggtagtgcgcagagctcagcagaggtctttgctggcactctcttgtccctgacaagaatcatcgtgtcaagttctcgagacggaaaacatttgtcctaaactttgtagctgcactgttgcaaatctagattatcgacattgcctcgggtt

SEQ ID NO: 33558 - DNA, 1618 bp, Zea mays
  Clone ID: UC-ZMFLMO17133C04_FLI
tgcttctggtattagtggaacttctgtgcgacttactgctggagctggtctccctgttcacatgaaaggtgaactaaacacagctttcataggactgggggatgacggtggatatggtggtggctgggttcctttggcagctcttaaaaaggtgctgagagggatcctaaagtacctcggagttctatggttgtttgcacaattgcctgaacttttgaaagaaatactaggatcaatcttaaaggacaatgaaggtgctctcttgaatttggatcaagagcagcctgcactccggttctatgtcggaggatatgtatttgcagtaagtgtccatcgggttcaactgcttctacaagttttgagtgtgaaaagatttcaccaccagcaacagcagcagcaggctcaaagcaatgctcaggaagagctagcagcagttgaaatcaatgaaatatgtgactactttagcagacgtgttgcctccgaaccatatgatgcttctagagttgcttcttttatcactttgcttacattgccaattttggttctgcgcgagtttttaaagctgattacatggaagaaaggtctttccccggttcatggggacattgctactgcacagagggctcgcatcgagctttgtttggagaatcactcaggatcagcttcgtctgataacaccgagaacagcagtttagccaagagtaatattcatcatgatagagcccacagttcagtagaatttgccctgacatttgtacttgaccatgctcttattcctcacatgaatgtagctggaggagctgcctggcttccatattgtgtatctgtgaaacttcgctattcttttggggacaacaatcatatagctttccttgctatgaatgggagccatggtgggagagcctgctggttgcagtttgaggagtgggaaagatgtaagcagaaggtttcaagagctgtggaaactgtgaatgggtctggtgtagctggagaggtaggccaaggaaggctgcgaatggttgcagagatgatccaaaagcagcttcaactctgtctacaacagctaagagatgacccactttctgcaggctctactgcatcatgaacttgcttggaatgagctctatcaaggccattgatgtctgtcatattcagcatggcctttggctttgttaacgtgtagatgtgaaggaatacacatttggtagcagtgacagtttcgcctgaggcttgctcagatgacaattttgtacagtataaatggtggcggttgactctgatggacctttagttagcccatttgaacgtggcctgtaacatagctagggtgggtaataatgtgccaaggtggaattgctcagggatgcaaaatgatcttcgggaattggttgtctgtatcatctactgtaatcgtgtcccttttctccctttctgatggatagttcatttttggattcgttatcatctttcttctgtctgtactatgttaatctagacattggtggatctggtatatgtgttgttgtacatgatatattggcactggacttgagactgacgcatttgacgtcttagtattagcaggacatctctagttgtgttcagagtgattggaccc

SEQ ID NO: 33559 - DNA, 1267 bp, Zea mays
  Clone ID: UC-ZMFLMO17133C08_FLI
gtcacacccagccttcaggggagcaaaaccttgtcgcatgggctcgtccacttttcagagaccgaaggaagttctgccagcttgctgatccattgttgcatggcggctacccgaaaaggggtttgtaccaggccttagctgttgcagctatgtgtttgcaggagcaagcagcatcccggccgctgataggagacgttgtcactgcactgtcttacctagctgcacatccttatgatccaaatgcgccttccacaaaggattctaagacctgcccgtctaccccaagggcaaagacacaccgacgaaccaccagtgttcctgatgctcaacatgctgctgagtcgcttattttgaacttcccagacatgaggaaggagactgtcagaggaggggaattcgagaaggatcgtactgaaggttctggcagcagcagtagctctggaaggaacgattgcctggatgtcccgcgacttctatccgttcctaacggcaaagtttgcggtgaaggtaataacattcagaagtccactgttaaggttggtgcccgtgagaactagaatacagagccggccaaattctgcaggcatctttgaatggatgcatggattagaccattctttccatgcttgctgtcaattttgcgaggaatcttcgtcgcttggcgtgagtctttctgaaggggactgttgtcgagagttgagtactaccactgcaacaggtttggttttgcagacccggatagcctcatgctccacggttggtttttggttgcctccacggaacagttcaacaattcctccaggctttacatgaagtctcatgctgatgaaaggaagaactactctgtcgctgagattcagagcttagactctttagagtgtgcatttcgatgagaatctgctacattctgaatgtcacccacaccacagctttcacctgtgctgactaacgaaccctgcagtaatgtgtcattgaaggatgtggttgagtttccttgttctgttcttgtaggaaccacgtgccgacagggctgtgtctgtacatgttaatgggttgtttgtaggaacaattggatctataccattaaaagatccaaactttagatatataccatggacctcatatgtcattgactcatgtggacccacatgtaagtgagatagtaatggtatggatctaaagtggtgatcttttaatggtatggatccaaatttcccttgtttgtaagtagagctgttcatatatttattttttcttcttcgtcggt

SEQ ID NO: 33560 - DNA, 769 bp, Zea mays
  Clone ID: UC-ZMFLMO17133D11_FLI
gctcgaggcggtgcgtcaggtggacgttgtcatctgcgcggtgtccacgaagcaggtgctcgagcagaagcctctgattcgggctataaaggaagctggatgcgtgaagagatttattccggcagaatttggagcagatccaacaaaggttcaaatttgtgacatggattatggcttctatgagaagaaaattgaaatccgtcattcaatagagagtgaaggcattcctcatacttacatatgctgcaacttctttatgcgctatttgcttccttcactggtgcaacctgggctagatgctcctcctagagatgaaatcaaaatatttggtgaaggaaatactaaaggtgtttttgttaaagagaatgatgttgctaaatttacaatatgcaccatagaggatcccagaacattgaacaagacgttgtatctgagacctccaggaaatgtcttctcaatgaatgaattggctgacctctgggagtcaaaactcaagaaatccctgaaaagatgctccatttcccttgaagatggatttaatctttatatattcagcgtttgttaagggtgaccacacgtattttgaaattgacttgtcaatggaaggaactcaactgtatccccatgtaaattatacaacagtgaacgagtacttggatactctagtttaggatatttgttcggtttatatctttcttgtaataagtcagaaataatgccttttttgtttctgatattttgatgaatgaattgtactgctatttggacg

SEQ ID NO: 33561 - DNA, 1549 bp, Zea mays
  Clone ID: UC-ZMFLMO17133E02_FLI
gttattcccaaattgaacggcccaaagggaaaccccaccacaaccggtctcgagtctcgacagatcggcgtcgatgaccctaccactcgctggccctcccacgccttccccggcatggccgagcccaccccaccgtccctcccctcgtccgactgcgcagacgtgctcgtgggatcctccgccccctccttcccctacatccgcggctggtcattcccctccgactcgggcgctgccatgggttctgtagaggaacatctccagcccaaggtgtgcgtgcagacgagcacctccgcggggcttgagcagatcctgccctggctcttctatcacaaggtcgtcggcgtcgcgcagttcctgctcttcgtggagggcaaggcggcgaaacccaatgtcgcgggagtcctcgagtcaattcctggggtaaaagtggtgtacagaactaaggatcttgaggagcggcaggcacggagtcgaatctggaatgagacttggctttcaggatttttctacaaaccttgcaactatgaactctttgtgaagcaatccctcaacatggagatggctattgtaatggctcgggatggtggcatggattggatcatacatttagacactgatgagttactttatcctggcggagctgctgagtattctgttagacgtttgttagctgaggtccctcgtgatgtcgacatggttatttttccaaactatgaaagcagtgttgagcatgataatataaaagatccattcagcgaagtatctatgttcaagaggaattatgatcatcttcctaaagatacttactttggcatgtataaggaagcgacacgaggaaatccaaattattttctcacctatggtaatggaaaatctgctgcacgaattcaagaccatctccgtcctaatggcgcgcacaggtggcataattatgcaaagagcccaaatgagatcaagttggaggaggctgcagttctgcattatacatacactaaattttcagatttgacatctagacgtgatcgctgtggatgcaagcctacaaaagaagatgttaagagatgtttcatgttagattttgacagagcagcttttataattgcatcaactgctagtgaagaagaaatgcttcgctggtacaatgaacgagtcgtgtggaccgataagcagctgaacttaaagcttctgaggaaaggagtgctgactcgcatatacaccccaatgacaattgttcagagtctgcgcgaatccggtgtcttcacttccgccattgcagctggccaacctgctgtgaatgccaaactctcacccaaggaaaccaatgcgcagagccaaaatgttaccgcatctgggaacatgacaagagtggtcagatctactgattcaaaggcatcaggcagaaagatactgcaagccgttgatcttgccttcagcgatactaatgtaactgctgttccaccgttgtcgccgcccagtttggacgaacacaggcatcatagtgaataataatgtcatacgtatgatatatatattttttgctcggcgt

SEQ ID NO: 33562 - DNA, 364 bp, Zea mays
  Clone ID: UC-ZMFLMO17133F11_FLI
ataccatccacaccatgccaatatttcatatatgccacaacagcacatctcaatatgtacaaccatctttcatcagaatgccacatctacttcatgataaaagatgactagaaaagtaagagaagcaactccatttacaagcttactctgcatcacctgcagcaaacaaaaccaaaccgtttgccagatgactaaataaggaccactgatgctaaacaagcaaacggcggggaaagaaacaacatgcgcatcatgatactgaagccctagaacgacatgtacataggttgctttcatgccatgaattcggattgtctgcacgacaagctaggaccaagcggggctggatccctgttaggtcttg

SEQ ID NO: 33563 - DNA, 1892 bp, Zea mays
  Clone ID: UC-ZMFLMO17133H12_FLI
attcttctgtcttcccattacgaggttcatctgatctcccacagccacaaacaagcaatagcactgatagaaggaaagcttcaacgattaatagaaccgccaaagggcaatatgcgaaattgagtccaagggtgcctacttctcaaccccttgtttcttgtgacaggagatcatatggaaggaatgatgatagcagcaacaaccaaaaatctagttcactgctggtcactgagagctcaaccagaagacagcagctgccaaggaatagtagcgtaagtatgcaaaagaacaaaaattccactagcccaaaattactacagagaaaacttgatccagagcggagggctagaccacctattccttctgctgagtctaacaaaagcgaaaggcaatctggagataggaacaattcagaaacagtgtcaccccgaagcaaattcagaaggaaacttgtgcgcccacaaggtgatgatggcatgcccattggattgaacaacaggacaaggagcctgtatcagcatgacaatgatatgtccataaggtcagatggcagtataagtgttgcttcagagctggatattataagcaatgacagatctacaggagttaatatttctaactttgagcaaggcattggaactccatctggaaggaacccacagaaagtgaaaacctcatacgatgcaaatatggacgtgccatctgtagacccttcagctgctatttcggaacggcccagtccagtttctgtgttggactcttcatttgatcaggaggatttgttccctaccagcaggactccaaattcacttgctgttgatgatgagcgcgaaacattagaggaaccctggaaaccatctgtcgctatacagtccaagaacaataaactcgcaaatgttgcgagcttgcttgagaagctccagcagcttagcgtgaacaaggatgaggatgcacctccggttgaccatattgctttcttgtgtgagacagagagcccagaccaccgctacgtgtctgagatactgctggcctccggtcttctgatgaaagacctaggttcaggacagacaggtctccagctccactcctctggctacccgatcaaccctgacttgttccacgtgttggagcaaaggaaggctggatgggtcagtacacctgatggcatccatcagagcagaagcggcacaaaatctgatcccaggagagcgcaccggaagctgatgtttgacactgtgaatgagcttctccttcagaagtttgagaaggaaaccgccgtttatgcgctcagttccttcaccagagcgaaggatccacctgcaaagacttttagcgggcaacagctgccgaagttcatatcttcgggaattgaagaactggatatggagcgatcgtccatcagccagaaggacagcagcgtgatacctgatgcagagatcctgcggaggctgcagggatggacgagcttcagcaaggagctcccggggatggtgctggagatcgaaaggtcgatattcaaggagctggtggacgaggtggtgcatggggagtctgctgacggcccggagatgaaggcggctggcagacggagaaggcggctctttgcttgatacggtttgtttgaccatcgccatccaccatttggatgagcctgatttgtgaagctgtaactttgtttgtcttgccatgagagtgagaccctattttctcaagagaagagggagagagaggggatagcgcagatttggtgagagacccgaaaatgggcattcgttcgtgctatatatataccattgtttcttgactccttgtgatttactgtggatgatgctatttcagtaaaaaaaatggtcgaatgacagctgttttttgccatggaaaaggcaaattat

SEQ ID NO: 33564 - DNA, 2212 bp, Zea mays
  Clone ID: UC-ZMFLMO17134B09_FLI
ccctcccctccccacctccccgtcgtcgtagtcccctgttcatccatcgcaagaactcctgggatcgcgctgggttcgccgcttgcatgcatgcacgcacaagcccgcgagcccggccggggtgccagcatattcgttcgctagctcgtgggctcttctccgtctccgatcccttccgtccgcgctgaagaacatgcgcgcgcgccgggctgtttagatccgatccgatccaggccttcttccgttgcaacctgtgccttgaggcctcctggtgatcgatcttctgcattaattgctggctcaatggtcgccacagccacaggcgtagagtgctgcaagatctttggttttgttgctctataaacactgcatgtgttcagtattgtgaggccattttaaggaatgcagaaagatgtgtttgagtgaaaaagatttctgctctgaagaggagcacatttctccaataaatttcgaatcgctaataattcttgatgagcgaggatttcaagcacacattagacgcatagtagaaaatagctgtgatgcaactgatgtcagaagaaatatcgcaatgctatgtcatataatttctgaagacggctgaagttctctctttaccaagttcctacaatcagttggtagcaggtgtctatatatatatgatggaagcagagaagaatggaaacattcttatgcaaaagtatgaggttggaaaattattggggcaaggaacatttgccaaggtataccatgctaggaacatagagacctctcaaagtgttgctatcaaggttattgacaaggacaaaatttttaaggttgggctaatggagcagatcaaacgagagatatcggtgatgaaactggtgaggcacccaaacatcgtgcaactttatgaggtcatggctactaaatcaaagatatactttgtgcttgaatatgtcaagggtggtgaattgtttaacaaaattgctaaaggaaagttaagagaagatgcttccaggaaatacttccagcaattggttagtgcggttgatttttgtcatagtaggggtgtgtatcatcgtgatttgaagccagaaaacctactcgttgatgagaatgggaatctaaaaatttcagattttggattgagtgctcttgctgaatcaagacgccaagatggtcttctacacacaacttgtggtactccagcatatgtggcgccagaggttattagccgaaaaggatatgatggtgcaaaggttgacacatggtcctgtggtgtgatcctatttgttcttatggctggatatcttcctttccaagattcaaatttgatggagatgtacagaaaaattggaaaagcagatttcaaatgcccaccatggtttccatctgatgtacgcaagttagtgtcaagaattcttgatccaaatccaaggactagaatgccaattacaaaaatagtggaatgcttttggttcaaaaagggcattgacaacaagctaatccgaaagaatatcgagatgaaagggaaagtttcagctctcactgatgttaatgtagttttctcatccacgggtattggtagcaacaataacaaattggttgatgtggaacaagatgtagcaaagattaccaacctgaatgcttttgacattatttccctttcagaaggctttaatctttcaggcttatttgaagagtccgagaaaagaaaagaggcacgcttcacatctagtcaatcagcttcaactattatatcaaaactagaagatgctgccacctgttcaaagatgacaataaagaaaaaagaaggtggtgtgctaaaaatggaaggtgcaaatgaaggaaggaaaggtgtactatctattgatgctgagatctttgaagttactcctgctttccatcttgtagagattaagaaaaataatggggatacactagaatatgaaaatttgtttaagcaggacatgaaaccagcgcttaaagacattgtttgggcatggcaaggtgagagtaaggaccaacaggccaaggatcacaatcaatcataaattactcaaccagtttgtttccataataagaaataatgtttgttagtgttcaaaagttgtatctacttcaaattttctcgcatttgacataaacatgtgatctgattcagagtttgttaagaaccatagtattgttatgttacatctatcattaattgtttttctatattgat

SEQ ID NO: 33565 - DNA, 1115 bp, Zea mays
  Clone ID: UC-ZMFLMO17134C03_FLI
aaatctttcagttgcatacttctcaaaaacgaaagatcctgttcagtagataaacctctgttccctttttaccttttaaagctatattgattgttgtttggcatttgctttactaaccatcatgaattgaacatatagctcatgatgtcagtctcctgaacagaagcgagaaatttaggatcgttattgtggactgttcactccaatgcaggttttgcatccacaatcgatgagacctgctagagaaggtgatattccagttagggttaagaattcatacaaccctaaagctccaggcacccttattaccagacaaagagacatggataaggttgtactaactagcatagtgctcaagtcaaatgtcactatgttggacattgtgagcactcggatgcttggtcagtatggttttctggcaagggtatttgctatatttgaagatctatgtatatctgtggattgtgttgctaccagtgaagttagtgtttctgtgtcacttgatccatcaaagatctggagtagggaactgatacagcaggaacttgaccatgtagttgaagagcttgagaaaatagcaattgttcgtctacttcagcagagggcgataatttcacttatcggaaatgtggagcaatcgtctctcatactagaaaagacgggacgtgtgctgaggaaaagtggggttaatgttcagatgatctcgcaaggagcgtcaaaggttaacatgtcgctgatagtccatgatagcgatgcaaaggcactcgtagaagcccttcatcaggcgttctttgaagacgatgtcctatcacaagtcgaagcggagaacctactcgtgggctgatcaacgtaggctttgctgggtccaggcgtgttatctgttatagattcccactcgcctccatgaacggcatgggcattggatcattgatcatgttttgcttgaaacaagtatgtcttccaggttctcagccaatgactgcaaaactgtgtttctgttttagaactgtttgcagacaccacagtctgagctgcgagcaccgattgtcaacaagatggcaagcctgtgatataattccaactgtctctaatcaatatatataataaacattatc

SEQ ID NO: 33566 - DNA, 472 bp, Zea mays
  Clone ID: UC-ZMFLMO17134E01_FLI
tggtctaacgccaatggagctcggcgccttgaatgactgggagtacaagttcgccaccaagtatgcgaaggtaggaaccataagaagagcagcgcccgtcgaagtggtttatggcaacatttcgcctgaaatgagggaagaagttagtgaacctgtggttgaacctgagcttgagcctgagcccgagcctgagccgcatgacgacgatgcaccatgaataggaaaaacacaaagacatcagttcgggtaggaagatgaaatggagggcggcacactgcttataatgttccagaggtagtcagaatttcgaaataatgaaaagcctcataggctcgtacttgttgcgtggatattcagaaagaatagtgtctaaatttaaaccaatagtagatgtgtactctgtagtaggattgaattgttggatatgtacatgtcattcttctattttcgtgaaacgtgtcacttcctgatc

SEQ ID NO: 33567 - DNA, 1622 bp, Zea mays
  Clone ID: UC-ZMFLMO17134E11_FLI
cgatgagcttggctgcttctccaaggttggctgcgcgctcaaaccgtcttcaacagttgcctcttggaccacctctcctaatattgtagttcgtttaggggatacagtcctcttcgctggcgatttcttctctcacactacaaggaggggaactctacgagctcgcgctcgttgcctgccatcccacttcctctctccacctcgtctttggaagtctccaaagcgattgtgcagtctggcaggacaacctggaggattcttcgccgaacgagttttccgagcgcggaggtcagtaccacgttcatcatcgtcaccgccgttcttcactttcctccggtgattcgttctcactcgtcgacggaagggtgcgcatcgatccacagcgtgacctctcctacccgatctggttctttggatctcaaactactcaggtacgaatgtacgattgggttgctttgtacttcgtgttcctttgtcccgggcaaatccgttgaagaactacaacgattttggcttgattcggttggaatctagttgatatgtgtgtagggattacagatcagtgtgttaggttcgcacgattcatcgattaggccacaatagttgacatagtgtatgtttattccatggcaacgatacaaatattagttagggttagggactgtgtgcaccttcagttcgtaaacatatgaagcaaagtatgtcaaactgttgtaaattggtttacaatgttttcgtacatttactgaacctcgaatgtaaatctagatagtcatatgtcacttaaccatgcattgagctaacaaacaactttatttatgcagtttgaaaccttagtagatgtcgtcttcaactaattgtggttctatattcttttgctcttatattctttgttgcgaattcatttcattattcttgtacccatggttcttgtttggtgacacatgtaacaattacatagtttatcgaaaacataatacaaactgggtgaatgcattaaacccttttgcctgtcaatttatctagtatgaaatgattcggaattattgaactacttttaccacatccgcattaccttatcaatgctctacttgctatccaacaagaagtcgaggtgatggagcaggataggtctactagtgacgctgagatggaggggaccgaggaagaactgaaagctatggagcccgtcgacataaaatcttttagcaccccttcctcccatgaattgtaagagcctagtgacgctgactcatacgactcggttaggcctactaggtataacatttggaacctgtaactagtataacatttggaacctgtaaggaagcctgttgttgtctctatgtggaagtcttcgtccaaataaagaggagaagctgctgcttccgtggcgtgatccgagagaacggggcgagatagcgcaatgggagggaattagagctagagttatgtgagagcgagccagagcgatggaggtagagtagggatggggagacttggaccacagattgattacaaagaaatgtatatattaaaaaagtgttggcgaacgatgatggtgtaaaaggctaccaaattgccttataattactatttatgttgagtatagaatattaagc

SEQ ID NO: 33568 - DNA, 2470 bp, Zea mays
  Clone ID: UC-ZMFLMO17134F06_FLI
attgctgacaggtgcgataaaaaaggtgtcagtgttgatgaacgcttaatcagagttgcggaaatgctagaaaagatggtagaatcttattcaccgaaagacctgccaaatgctgcagtcagcccagatgttgcaaaagtttcaagttcaagcatcaatgaagaatctgatggtccctctcctaaactctctgattggtctagaagaggatctgctgatatgcttgactatctccaagagactgataacactatttcattggatgacattaaaaatcttccttcaatgacatgtaagactcgttttggaccaaaatctgatcatggaatggccacatcatccgctggaagtatgactcctaggtctccattaactccaagatcaaatcatatagacatgcttttagctggtaaaaatgcaattaatgagagtggtgatcttccgcagattgtcgaacttgctgatattgcacgatgcatcgcaaatacccctctggatgaagaaagcgcattatcccaaatggttacctgcatagaagatcttcaagaaattgtcaaccgcaggaagcatgaggccctcacagtccagacatttggaacacgcatagaaaaactacacagggagaagtatctgcagctctgtgactcagttgatatggacaaggttgattcagcaagcaccataatggatgaagaagatgatgttgttcgtagcttgcgcgcaagtcctgtccatccagtcaaggatcgcacttcaattgatgactttgaaatcatgaaacctattagccgtggagcatttggacgtgttttcttggccaagaaaagaactacaggagatctttttgctataaaggttcttaggaaggcagacatgattcggaaaaatgctgtcgagagtatattggctgaacgtgatatcttgattacagtcaggaacccttttgtggtacggtttttctattcgtttacctcacgggagaatttgtatctggtcatggagtacctgaatggaggggacctttactcattactgaggaatttagggtgcctggatgaagacgttgctcgtgtatatcttgcagaagttgtactagctttggaatatttgcactctatgcacatagtccatagggatctaaagcctgacaacttgttgatagcccatgatggacatattaagttgacagattttgggttgtccaaggttggtttgatcaacagcacagatctgtctggtcctgctgttagtggggcttcactgtatggagatgatgagcctcagatgaatgagctcgaacaaatggatcaccgagcacggagacaaaatcgttctgctgttggaactcctgattatttagcaccagaaatccttttggggacaggacatggttgcagtgcagattggtggtctgttggtgtcattctgtttgagctcattgttggcatacctccattcaatgcagaacaccccgaggcaatttttgaaaatattatgaatcgcaaaataccttggccacatgtcccagaagagatgagttttgatgcacaagatttaattgacagattattgacagaagatcctcatcaacgactaggagcaaatggtgcctcagagggggaggacagcactggcctcaatgagtttgaatctagtgcaaatgtcaattattctttcagcaacttctcgttcaagaatctatcacaacttgcttccatcaactacgatctgctcaccaaaggattgaaggatgatccaccgccaagaacagaaatgtagcagttaatctaaatttggatggactcatttgagtactcagacagtctacaaggtgctcgtgggatgtaggtcttgtacatatcaaagtgtgaggcatggtctgttcctattgaggctgttcctacatctcgcggatccgagtacagttttggtgttgccttgttttcatgactattgccatgccttcatcagtgaaatcacccttgaccaaatttggcattcgacctaggagcgctgtctttttggttcgtctttcctttttttagtcctattatgagccttgggtttacggagattggtcaaggttactgtattcagaatacagctcctgaagacgtaggcgggtttcagagaattgccattctggcatacagttgactctggttcgttaagctggtagcccgctggacttcctgcggccagaactgtccacaacattttgatggccgtggaatatagcattttgcttaatgtgtccagtgaaacagaatcagggacattttaagaagaatattaaccgattgacattataaggatatcaaatggaagcggcgttttatgcaattcaaaattcgatgggcatcgcccagcagtcatattgtgtaacggtttgtccgatgtcatgtcgcttgcaaaatgctgtagtagcactacctgctgtttattaaactcagaactcgaactcttttat

SEQ ID NO: 33569 - DNA, 1139 bp, Zea mays
  Clone ID: UC-ZMFLMO17134G01_FLI
ctcggaagcagcaaagctagagacgatgacgctgacgatcccggacgaggtgcgcgccaaggcggaggtgtacgtgggcgacgcggcggggcaggagaagacgcggctgctcctccaggagacgggcctcccgagcgggctgctcccgctgcgggacatcatcgagtgcggctacgtggaggagacgggcttcgtgtggctccggcagcgccgcaaggtggaccactacttcgccaaggccggccgccacgtgacctacggcgccgaggtgtcggcggtggccgacaagggccggctcaagaagatcacgggcgtcaaggccaaggagatgctgctgtgggtcaccctccacgagatctgcgtcgacgacccgcccacgggtaagctccactgcaaggccatcggcggcctgtcccgcagcttccccgtcgaggccttcgaggccgaggagccggcgccgcccggagccggcggtgtcgttcccagggacgcggaggaggaggagaaggaggagggggacaagaacccggagcaggaagcggcggccgagaaagacggcgacgcccccgctaccgctccagccgctgaggaagcagagagcaaggccgaggagaaggccgacaaggaggtgagctcggccgatccggcggtggtgcacgccgaggcgctggccgccaagaactgatgatcatcgccgacgatccatatccatgcatcccatccagcagccgtacgtgcacggcgcacctacctaccctgctacccaccgggccatgcccattattactatttactacgtactactgtgtcgtctcgtctgtcgcattatattccttattattattattcacagcaaccacatcgtcgagaccaaccaactgaagggaagcacaaaccacccgaaaaaaaaggaacaaagaggacgatgatctactgcatctatatatgtatcccacaacatatatataatcttgagcatgcgcatgcaatcaccctccaattccattcagaataatcatccacacgcatgctatatatgtaccctcttttatttattttttctctcccttttaaacttgatgctgttatttgttatttgaattaaagttacgtatacgtacgtcaaagagagtacgatc

SEQ ID NO: 33570 - DNA, 515 bp, Zea mays
  Clone ID: UC-ZMFLMO17134G03_FLI
gtggcggcagagctgctgggagagaacgcgttactcctgtgcatgccggaaatcctgccggtgctgctgtggctcagcgttcgccttgacactgctgacgacaggatcaagctggtcctggacagtaatctgctccccgcagcaccacctgtagtcctcgccatgctagcgacgggcgagcccctgctctactggtacagaaaggcgttgctgtcttgtgttgtttcggcgcttcttaccttctacgtttatttcatgctgtgccagtggccgggaggacaacgcgatcgcacgctcacaggttcctctttgcagcacgcggtcatccatctcaagtcttgggcaaaggttttgctcaaagcggtggctgtgctgctaatatttgtatgcattctttccaactagttctactgcaagaaccggtggtctcatcatcagccgaccaaatcttcatcgactatatgtaaaaaagatcctccagttcataatttgactgcgaaatgaatattttcact

SEQ ID NO: 33571 - DNA, 1915 bp, Zea mays
  Clone ID: UC-ZMFLMO17135D11_FLI
cgtctataaaggtactgaaagcctctggtcgtgcccctgaattggaggtgtggaaacaattattttcttcgctggaggagaggatacgcactcaccagcagggtggatatggcacaaatcttgccccaggaaaaatagttgggaagatttttacctcgcttgataaatctatatcccgcatgatgggtacaccatctgcaccacttccaccgttgccacatggatcttttagtgataaagagagccactctatacctgcggcagcaaaatttgttaatagccaatcggtaatggtcatgccatcgttaataccatctgcttcaatgcagtcaatgactgagatagcagaggatagtggtggcactggcaggaaaattgcacacaacagaagtgtttctgagccggactttggtagatcatccaaacagggtgctggtggatcagatggtacacagagcagtgcatcaggatccagcagttctcgatttggttggctagtgcagaagactatgggattagtgtcaaaatcccaccgccaggcaaaattaggggatcagaacaaattttactatgatgaaaaattgaagcggtgggtggaggaaggtgctgctgttcctgccgaagagcctcctcttcctccacctccaacaaaaccatctttccagaatggtatgctagacaataagttgaatggccccatgagcgtaagccatgctcccaatggagtcacagaatggaaatcctcaaattcttcagagcaaggtctgggtatgccgccaattccacctagccaaaaccagttttctgctcgtggacggatgggtgtccggtccagatatgttgacacattcaatagatcaggtgcatctggtgcaatgccatcatataacaaaccagctgctccatctatgacaccaccagctggtgccaagttcttcatgccaactgcagcacctgttgccgcggatcagatgataccacaccaagcagcagagatacacagtgaaaccatccatgatgagcggtcagcctcaccgccagcagaaacatcattttcttcaaccccaccacccacgcaatttccatcaccagtgcaatcaacaatttatcggcaatctagtatggagaacatctccaccccttaccagggttccggggtatcgtcattaagcaacgacagctcattctcaaaatctcgagccgcgtcctggagtgggacatactctgagcagtttaatgcttttgcgggcactatatcgcctgacagacagacgacgcattcaccactgatgcctggcaaaccaccacacagccgttccaacagcaactcatcagggcatctcaatggattggcagaggatcttcatgaggtcgagctgtaactggcgactggtcagcatgaccgtcgcaactcgtgtcttaaaggcagcgatgacaacccctccccaagcaggtgacagaaaagaaggtgcccttaaaatgctgaccacggggatgccgcagctggaatgggcttggtgtgactttgcacgagattctggggcgcgctctaaaccaccgaggtgcgtcaggcctgtactaatagagatgcagggtttttttttgtagccatatatacatatatgttggttttgtgttttagagagaagggaaagggttgggtgggcctttgtttacaggtgggaagggaagagaagcagcatgcagatgcccttgtacagataatctgcccctacccagtttgtttaaaacgcaaacaacgccattttggttttagttccctggagaaggatagaggagaaggtgtgtgtctttgtagtgtgagaagcatggctctgtagtgttgttgttatagtgtactactactgtgctagccagccgcatacacagactgtttattctttggagacgaatc

SEQ ID NO: 33572 - DNA, 1230 bp, Zea mays
  Clone ID: UC-ZMFLMO17136A09_FLI
aggatcaggcattactccaatgttccaagtaataacacgtcgttcaaagttttttctttacgatggtataaaagttgagatatagttttttagtacccagccgtgcatttttgtcttactataggtcacaagggcaattcttgagaacccaaaggacaacacgaaagtacacttaatctatgcaaatgtcacgtatgaggatattcttctgaaggtatatgccttttatgctgacagacttcatagactcttaacctgatatatcagttatatacctgtatgcaaaagggtctggttcaattgatggtgcctatttggtgagacactggtatcgttactctccatctgtccagcttacattacgaataaactagtaggtctggtttctgagatatggaaataatctgattttttgctcataatttatgaatcataccatgaagagcataaacatgtctcagaataccaggcaggttgtgttttttactagaattctatatacggtctcttgcaaaaaaaaatcttatataaaaatatgtgtaagcagcactctttgtctagaaataattacggatttattcctccacagtagaactagtaactcgtgtctcagttcttgtaatctcttcatattagtgtttgtatgctacactaaaccatcacagtagaagcaatctttctgcgtgaaagcatgctttcgtgccactgatgatggggcttatgacgacactacattcgtgatgaaatcgctattgtcatacagtacggttaccgtttttgtgtgccttacatctagcttgatgcaggaagaacttgacggcatggccaaaaactatcctgatcgtttcaagatctactatgtcttgaatcagcctcctgaagtctgggacggtggcgtcgggttcgtgtcgaaggaaatgatccagactcattgcccagcgcctgccgccgacattcaggtattgcgatgtggacctcctcccatgaacaaagccatggccgcgcacctggacggccttggctacacgaaggagatgcagttccagttctaagcgttacattctctctaccagtaccagaataaacggcggtggaacaaagtcacagtcacagagcgtcgtacttactctacctggatgaaagcagcagtacagtacccacctaatttgtatcggtgtcgggacattgtaccgtgccgttcttttgtatcggtttgtcactcactcactc

SEQ ID NO: 33573 - DNA, 2817 bp, Zea mays
  Clone ID: UC-ZMFLMO17136B11_FLI
ctaccatctgcaccagctcggcacctcacgctcgcagcgctaggagcctaggagcagctgcccgtctatttattggtccctctcccgtcccagagaaaccctccctccctccattggactgcttgctccctgttgaccattgggtattctgaaccatcgagccatggctgccaagctgactcgcctccacagtcttcgcgaacgccttggtgccaccttctcctcccatcccaatgaactgatagcactcttttccaggtatgttcaccagggcaagggaatgcttcagcgccatcagctgcttgcggagtttgatgccctgtttgatagtgacaaggagaagtatgcaccctttgaagacattcttcgtgctgctcaggaagcaattgtgctccccccatgggttgcacttgctatcaggccaaggcctggtgtctgggattacattcgggtgaatgtaagtgagctggctgtggaggagctgagtgtttctgagtacttggcattcaaggaacagctggtggatggacaatccaacagcaactttgtgcttgagcttgattttgagcccttcaatgcctcctttcctcgtccttccatgtcgaagtccatcggaaatggagtgcaattccttaaccgacacctgtcgtccaagttgttccaggacaaggagagtttgtaccccttgctgaacttcctcaaggctcataactacaagggcacgacgatgatgctgaatgacagaatccaaagccttcgtggtctccaatcatccctgagaaaggcagaggagtatctactgagtgttcctcaagacactccctactcggagttcaaccataggttccaagagcttggtttggagaagggttggggtgacactgcgaagcgtgtactcgacacactccacttgcttcttgaccttcttgaggcccctgatcctgccaacttggagaagttccttggaactataccaatgatgttcaatgttgttatcctttctcctcatggctacttcgctcagtccaatgtgcttggataccctgacactggcggtcaggttgtgtacattctggatcaagtccgtgctttggagaatgagatgcttctgaggattaagcagcaaggccttgatatcactccgaagatcctcattgttaccaggctgttgcctgatgctgctgggactacgtgcggtcagcggctggagaaggtcattggtactgagcacacagacatcattcgcgttcccttcagaaatgagaatggtatcctccgcaagtggatctctcgttttgatgtctggccatacctggagacatacactgaggatgtttccagtgaaataatgaaagaaatgcaggccaagcctgaccttatcattggcaactacagcgatggcaacctagtcgctactctgctcgcgcacaagttgggagtcactcagtgtaccatcgctcatgccttggagaaaaccaaataccccaactcggacatatacttggacaaattcgacagccagtaccacttctcttgccagttcacagctgaccttattgccatgaaccacactgatttcatcatcaccagcacattccaagaaatcgcgggaagcaaggacaccgtggggcagtacgagtcccacatcgcgttcactcttcctgggctctaccgtgtcgtccatggcatcgatgttttcgatcccaagttcaacattgtctcccctggagcagacatgagtgtttactacccgtatacggaaaccgacaagagactcactgccttccatcctgaaatcgaggagctcatctacagcgacgtcgagaactccgagcacaagttcgtgctgaaggacaagaagaagccgatcatcttctcgatggcgcgtctcgaccgcgtgaagaacatgacaggcctggtcgagatgtacggcaagaacgcgcgcctgagggagctggcgaacctcgtgatcgttgccggtgaccacggcaaggagtccaaggacagggaggagcaggcggagttcaagaagatgtacagcctcatcgacgagtacaagttgaagggccatatccggtggatctcggcgcagatgaaccgcgtccgcaacggggagctgtaccgctacatttgcgatacgaagggcgcattcgtgcagcctgcgttctacgaagcgttcggcctgactgtgatcgagtccatgacgtgcggtctgccaacgatcgcgacctgccatggtggccctgctgagatcatcgtggacggggtatctggcctgcacattgacccttaccacagcgacaaggccgcggatatcctggtcaacttctttgacaaatgcaaggcagatccgagctactgggacaagatctcacagggcggcctgcagagaatctatgagaagtacacctggaagctctactccgagaggctgatgaccctgaccggcgtgtacgggttctggaagtacgtgagcaacctggagaggcgcgagacccgccgctacatcgagatgttctacgccctgaagtaccgtagcctggcaagccaggttccgctgtccttcgattagtacggggaaagaagaagaagaagaagcccaggccggagaaccatcgcctgcatttcgatctgtttcaccgcaattcgcattgttagtcgtgtattggagttatgtgtacttggtttccaagaactttggttccttctcgttttttttccttgtttgagcgtttttgggcagcgctggcctggttcctagtatggtgggaattggctgcaccttttgcttcgaataaaaatgcctgctcgttcacc

SEQ ID NO: 33574 - DNA, 2206 bp, Zea mays
  Clone ID: UC-ZMFLMO17136D06_FLI
atctcaatattcgatggtgtacagaagagtttaccggttgtttcacccatcttgttattcactatcttgatattcaccatcctgatcagaatgtggccaccaatggccaccatcgagtttttgacatcacacctggtaggcaggcactgacctctagacatgctgccttccacagttccactcatctttctaccatccttggttgcagtccttcctccccccagttcctagagcccagaggtttggcgctgcacatcactgttccttcttcagtccactcatgtagtcatgtccatggatgaggttttttcctcttgaattcagtgggacaaccgttatgttgtgtttcttggaaaaatgtctttcgttagtgttggtcttctaaataagcgtcacttcataccactttggatctgactacttatcacaagaatgatcaggtaagaaagtccagattcctctatcctttgtagtcttgcagatgcttattattctaactatattagtttatttaacctttgcaccagaaaatagcaatattcttggtcctcacttagatacatgtctgaaaactttggtattttctgaagagtggtctgaatcagcagtcttacttgtcctatcaggttagtgcactctcaagaatagttgcttattctaaatttcggcacacatgattctgtagatggctagaccatttggctttagcttgggaagcagttatccaccccgtcaacatcagtagagtgctaattcagttcaaaatgctgggctggaaactattggactaagaccggcaaattctccaagtctgtcaactaattcaggggtttatgagcaattcatgcagaagtaccattagccacagactcaaaattcacttaggttgcaggcatcttcagatcctcaacagtacaaggaccagagccaaaaatccgttcaaggaacacaggctgtgctggatccatatagcttacttggattgttgagtttaataggaatgaaagagcctggaccaacaactcttgctttagggattgatttgacctcattggggttgaatttgaactcccaagataatctttacaagacatttggctctccgtggtcaagtgagccagctgtaggagaacctgattatcagatcccagcttgtttctctacaaagccaccaccagcactgcaaaagtttcaccctttgacactattctacatcttttacagcatgcctaaagatgccactcagttatatgctgctaatgaactatacaataaagggtggttttaccacaaagactaccgtgtctggctaacaagagcgcctaattccgcacctcttgtgaaaactccacttcactcaaaacatctagcactaatgtgaaggccattttttgagcctgctggactggaccccgttgtgttcttccgatgatcaatcagtcaatcacaaattcaaaccatacaaatcaactcaatatccagcagctcaatatccagcgtgcttttggaagtctgttcaaggggtggagtgaggagaagatatattttgctcccacatacaagtactcttgcaattcagattcttatgctggagagactgccacatcaaagaaaaagaggagaaccccagcctggtgtgaaagaatactatggcatggagatggtattgcacagttgtcctacttccgggggggatctcaattctctgaccatcgtcgtgtttgtcggacatttactgttgaggttaaaaggctagatggccgatcaatgcggcgcccatcaaacaccaacattagaatcgatgctgaagagttgttaccgacaagagacaagcataactaaggtgatctagatggatgaaattgtcgacaaggccattagcatcatgcaggttacctcaaagcatctcatgtatatccgcaaggagaagctgcacccagggaaggcattgagtgcaatagaggtgaaggaactgcgcgaagcccttgaagcgattgctgaaggtttggaccaagattcactcttgtgccagagtttggcgtagtactcgattacaaactgtgtactatgttaatgtaatgacatagtttgtatgatacagatcgtagtgatgttgtttgaagctgtttgtatgaactgtttcctactatcttgtatgaattatgatgtctgatgtagtttgtatgaactatgtcatattatgttg

SEQ ID NO: 33575 - DNA, 2001 bp, Zea mays
  Clone ID: UC-ZMFLMO17136G06_FLI
gtctctctctgttcttctgccccgatcggccgatcccacccacgcatatctctcggccgcgcccgcggtagtgttcgtgttcctcactcctcccgcttccttccccgacactacctcagctcagatccgcggcggtttcccggtccctggatctaaagcggccggtgagcaggcctccttccgccgacgcggaccacctggagggaatttatcctggagccgtcttcctcctcgcctcctctcgcggcgcggcgcggaggccggaatcacttggaggtctagctgtgtttggattgatttctttcttcgtttgtggtggctagaggcacctggtttgtttcttgccgaagcccgtggtacatgtgaacagcagggcctgtcttctgcttttgcttcttagcaatggcgaatgcaagcaaacacttgcaaccttcaagcaaatcaggcaatgacagaaagtaccagggcacactggttgcttctccagcaaaggacatttcaccgaagtgtgcgaatcacattgttccatcgaaacaactgatcttgggtggggattcaataggccatctggcatcgattctgattaaggtcgttgctctcgaggcagtcagaagagtttctaaagcaagataccctttcatatggaattctgttcaagcattgcaaatccttgtgtatcctccatttagttggatccaaagatgggcaccactcaaatttcttgtgcagggaattcagaaactttccatgccactgttgtttttgtcagtcacaacaacagtaagtgagctgtcttccaagcgtgatgatgaaccagataacaatacagaacattctgaaacaccttctgaaacaaatgaattgacatcaacttctggcacaagcgatgctgctgatggcacaaaggaaatcgtacaagagaactggcttgtgttacttttcagggagcttgagaagcaaggcatcactttacctgagaggtttactgaagatgaattacgcagattttatattgctgcaaatggcgacttttcaagtttactctcttcggttaagaagacaattcgttggagggaaatgtttcacatacttacactgcaagaacttgataaatggtctcacttagtcttttggcatggatttgacacaatgcttcggccttgtttagtaattcgtcttggacttgcatgctccagcataccaccttgtgatagaccccattttgggcaagcagtagtttctcaaattgaccatggtgttgtaaatttgaccaacggagaagattcaagaattaccgttttgctggattgccatgggatttccccattcagatttccaatgcaaatgatgaggtcatttgtcactgtagctcaagaaaactacccaaatcgtcttggactattgtttgttgtccgccttcctccagttgttagagttattgcacagacatttcttcaagttttgaaaccatctacaaagcagaagttacgttttgagggagattcatacaagaagacgttggcggagttcttgcaggccgtgccagcgtttctgggcggtaaatgcagctgcccacgatgcgagaagcctcgtaatagttcagtggtgcaggcaggggaagggagcaagaaccagcctcgcttggtcagcgttgataccggatcacctgtcgtggacttcgacttcgatgaagaagagatcccatcaccttatagctgcgagaacgccatcagggctgcgataatcggcctgctgatggtgtgcatcttcatcgcgtttttggctgggatgaacgaccctgcatccgttccgcccagtgcctgagagctatggaatcgcctaatctcccatagtagagcttagattgtcagttgagtatatacacatatgtgttgctatttaggatgctactagggtgttgtaatccctggcagcttctttctcggttgtcgtcagatcgccatacagtgttctctcctaatgtgagcggagcagatgaat

SEQ ID NO: 33576 - DNA, 2192 bp, Zea mays
  Clone ID: UC-ZMFLMO17136H02_FLI
atgggttcctaggtcccaatcagctcaagatcaactattggaatatacagatgaggaagtgctggagaagttccaaccaaatgagactctggagcattttatgctagttaaatatacaggcaatgtgtttcctacatggatgatgaacaaactgacttcactcccataccttgtcaatctttgtttgttccacctgcataactgcagtgctctccctccaattggccatctacaaaatctgcgttacttgcatattaaagatatgcccaacctcacaaatctagagatgggtctttctgggaggcctgtgtctttggggaaattgactcacctcaaactggaagcactgaatttagaagagctgtctatactcttgtcagccaacaatgagagtccctgtttcatgtttcccaatcttgaggagttatctgttctatcttgctctaagcttgtcttcaaaccatctgtgcctaagtgtgcgaaatatgtaataaaagagagtaacatggttctgtcatgttggcagcctctggggccattctcatctccaccaatagaaaaagtagagataagtgggtgtgtgatgccttctggttggttgcaatggcttagatccatacagactcttgagaaagtagtgatagatggtgaagctttttcatcttttgagctccagaagatatatgcatttcaagaagcatctggtagtaagatttcaaaggaaactgtaagttcatctaggacaaatatgtcacgtgagttgaccactgaggatggtgcccttaaagctattggtatcgacaactcaacaatcaaacatattccaaggtttaacaccacttctgaactctcagtggatactatttcatcctctaaagtaagcacaccatccaaggagatcccatcaactttacgccgtccggacaagtcaaaaatgcctgcactaatacctggagatggatctttaaacttaagccttaagcaggttcagaaggttactcataatttctcacctttatttgagttaggtgaagggggaacctgggcagtttacagggctgtattatcagataaccaggttgttatcatccggagagctaaaaagggccacgttcaagaggcaaaacatcttatggaagtgaagctccttacaaaaattaatcactggagtttggtgagattcttaggttttattgatgaaaaagatgagtgtattcggatcacagagtatgttccaaatggcactcttagggaacacctacatgaccaacgtaagagaatcctgaattttaatcaacgtatagtgattgcccttgatattgctattgcattgacttatctccatttgtgttctggggacgctttaatctgttacaacttgaggacgtcaaacatcctactgacagagagctaccgagccaaagtgtgctgttctgaactgtcaaaaagtggtaatatcgtgctattaaagggaacagggggctacattgatccagagtacttggagacctcagagctcactgccaaatctgatgtctactcttttggaataatactcttagaaatcatatcttctcatgggccacaagactgggatgtattgatgaaccaccggcaaagcagtgttgtacaatgggctcttgagaaattctatgacgacctcatgaatgagatattggattaccgtatggaggatcgcgtggatggagatgtggtcagggacttgctcagcttagcgttgagttgtgtggtttcgcgtggcgctgatcgcccaagcatcgtagttgtcggggagcgactgtggaaaatatggcaagatcatcgaagaaacgtaggggaacagcacgagtaccaaggaagctgggcagaatttatcgaacaagagggaatcctgaggcatcacaagtgtgtgctcaagagaagttgggagccttcaacaacgcagcaggattggtctgtgtatgttaggcagattgaattagttcaagaagcttacgataccccatggggagaggaaattttttcggggtctgtttcattggacgatatcacagtatattctcggtagaaagcttcaatacgattatattactcctgttttctccgcggtattatatgtgtagattggaggacaataacctatttgttctatttctgtttcattggacgataaatcatagtgtctcctcggt

SEQ ID NO: 33577 - DNA, 1917 bp, Zea mays
  Clone ID: UC-ZMFLMO17136H04_FLI
ctgaactgcctatacaaacttatcactaaggtgctcactaatagaatggaaccttttgcccagaaacttataaatgaacatcagactgcttttttaaaaggtcggagcatcatgagtggaattgtgacactccatgaggttatgcatgaaactaagaggaaaaatgaaacagggatctttttaaagctagattttgagaaagcttatgataaagtcaattggaactttatgtttcactgtttagagaaaagaggtttctgtgaaaaatggatgaattggatggagaaagttgtcaatgatggcactgtcagagttaagatcaatgacaaagttggtaattatattaaaagtcataagggagtgagacagggtgaccctctatcacctattctctttaactttgttgctgacagtttggctagaatccttattaaggcacaagagaataatgctattactggtttatgcagtcacattatccctaatggtctcataattttacaatatgctgatgacactatcatttgtattggagatgactttgaaaaagctagaaatctgaaattgctcctatatatgtatgagctgatgtctggtttgaaaataaactttctcaagagtgagatttttgtaataaatggtgatgaggaaacaacaacaaattttgctgatcttttcaaatgccagattggtactttgcctatgaaatacttaggtgtccctgtgagccccaatagacttcgcattgcagactggattgggcttgaagaaaaatttgataagagacttgaaacatggaaaggaaattgcctatccatggctgggagaattacccttattgatgcttgcttgactaattcacctatttatcatatgtccatgtatcttcttccaaaaactactattaaaaagctagatgccaaaagaagaagatttctttggcaaggtggtggagaaaaaaaaagtatcacttggtaaattggaacaaagtttgtcacacaaagaaaaatggaggtttgggcattaaaaatcttgaagctttaaacataagccttctttgtaaatggtggtggaagattgaaaatgaatcgagtctttggcaaaagataattgtcaagaaatactttcatggaaaagacttatacaatataaaagtgagaaactctgactcccctgtatggaaagacttgatgaaaatcagagctttctacctgaaaggcagacaaatcacaactaagtgtggagataagtccagattctggctagacagctgggtaaatgagaggcctttatgtacaattgatcctgaattatatgagatttgtgatgacaagtttattctagttaaagatgcaagaataaaaaattggcaattgtccttcagaagatggctaaataatgaaaatgagattcgatggatatcaatttgcggtgattgtgagaacttcgagtttcaagattctcctgacactgttcagtggaaatggggagggaagaaaacctttaccgttaaatcaatgtataacagtttatcaaacaacatctctgatcttggcaaaaagcacatttggaaaagcaaggtccctccgaaaattaaaatttttatgtggttcctagagaataacaggttgttgactaaggataatttgattaggaggaagtggtctggggacccttcatgctgtttctgccctcatgctgaaaacattgagcatctctttttcacttgccctattgctagagtgatctggggaactgtggcgaaatgtctggatactcatcatattccaaacaacgtggagtcttgctataggtggcttcgaaaacacctcaactgtgacaatgctgttcatgttattctgatttcagcaatttgttgggctatctggaaagccagaaataaaatgtgttttgatc

SEQ ID NO: 33578 - DNA, 2498 bp, Zea mays
  Clone ID: UC-ZMFLMO17137D09_FLI
ccggaagttggaagttcctgcatctgaggccactatcgatgccactgcacaaggcattgcttctttgttgtgtgctcatgggcctgatgttgagtggagaatatgtaccatctgggaagctgcctatggtttgctaccactaagttcatcagcagttgatttacctgaaattgttgtagctgccccgcttcagccacctacactgtcatggaacctgtacttaccattattaaaagtattcgagtatctacctcgtggaagtccatctgaagcatgcttgatgaggatatttgtggcaacagttgaagctatacttaggagagcttttccttctgaaacaccagagcaatccagaaagccaagaagtcaatctaagaatcttgctgttgctgaacttcacacaatgatacattcactctttgttgaatcctgtgcctcaatggaccttgcctcccggttgctatttgtggtgttaactgtttgtgtaagtcatcaagctttgccagggggcagcaaaagaccaactggtagcgataaccattccctcgaggaagccactgagcattcaagattaacaaatggaagaagcagatgtaagaagagacaaggccctgttgctacgtttgattcgtatgttctagctgcagtttgtgccttatcttgtgagcttcagctgttcccttgcatttctaagaatggatcacattcaaatttaaaggattccatgaagattatcatacctggaaaaaacaatgggatcaataatgagctacacagtagcatcagctcagcaattattcatactcgtagaattcttgccatcctcgaagcccttttctccttgaagccatcatcagttggtacctcatggagctatagctcaaatgaaatagttgcagcagctatggttgctgctcacgtttctgagttattccgtcggtccaggccatgccttaattcactctctgcactgatgagatgcaagcgggatgctgagatttctaccagggcatcatccctctaccatttgattgacttgcatggtaaaacagtgtcctccattgtgaacaaagctgagcctcttgaagctcacctgacccttacaccagtaaagaaggttaatcaacatcgctgtgaggaaaacaacaccaactcatcggatagtgccaagttggaaaacaagaatggttcaacacataagaaaaacggtttctcaaaaccacacttgaaatgtgcagaagaggttctgaacggcaatgttgcaagtacatctgggaaatccattgcaagcttacaggtggaagcatctgatttggcaaacttccttaccatggatcggaatggggggtaccgaggttcacaaactctcctaagatctgtattatcagagaaacaagagctgtgcttctctgttgtctcattgctctggcagaagctcatagcttctcccgaaatgcagatgtctgcagaaagcacatcagctcaccaaggatggaggaaggttgtggatgcactttgtgatgtcgtttcagcctcaccaaccaaggcctcagctgctatcgttctccaggccgagaaggacttgcagccttggattgctagagacgacgaacaaggccagaagatgtggagagtcaaccaacgtatagtgaagcttatagcggagctcatgaggaaccatgacagccctgaaaccttggtgatactcgctagtgcctctgaccttctacttcgtgctactgatggaatacttgttgacggtgaagcttgtactttgccacagcttgagcttctcgaagtaaccgctcgagcagtccatcttattattgaatggggagatccaggtttatcagttgctgatggcctttctaatctgctaaagtgccgtctttcaaccaccatccgctgcctttctcacccaagcgcgcacgtgcgcgcgctcagcatgtccgttctccgtgacatcctggaccacggatccgtgagccccaacaagatcagccgaggggaacagcagcggaatggcatccagagcccatcgtaccggtgcgtggccgcaggcatcctcaactggcaagcggacgtggagaggtgcatagagtgggaagcccacagccgccgcgccaccgggctgacgctcgccttcctcagtacggcggcgaaggagctcggctgccctctcccgtgctgacgaggccgctcccggatctgatctgacatcggcggccacttgacggccagtgctggcagcttgctgcgggaccggcgagtaggacgctaatctctcgaccaaggacgactcgccggtttgttcacgtgatatgtgatcaaactgatattagatggtgtttccaaagtatatatctactgaggggcttgctcccatgatgcgattttattccaatctgacgtcagatgctttacgagcatatttaactgcttgagctgtacgtagcttgtattacttgtaactttgtgtaatatggttattattgccg

SEQ ID NO: 33579 - DNA, 1185 bp, Zea mays
  Clone ID: UC-ZMFLMO17137F05_FLI
ccaggatccaaactccataagaaggaaacttgtgaggctgttaccatcattgaaacccctcctcttgtcattgttgggctcgtggcatatgtgaagactcctcgtggcctccgcacactcaactctgtttgggcccaacatcttagcgaagaagtgaggagaaggttctacaagaactggtgcaagagcaagaagaaggctttcacaaagtatgctctcaaatatgaaaatgatgctggcaagaaggaaattcagctgcagcttgagaagatgaagaaatatgcttctgttatccgtgtcattgctcatacccagattaggaagatgaagggtttgaagcagaagaaggctcacctgatggagattcaggtcaatggtggtaccattgctgacaaggtggactatggctacaaattctttgagaaagaggtccctgttgatgctgtcttccagaaggatgagatgattgacatcattggtgtgaccaaggggaaaggttatgagggtgtggtcactcgttggggtgtcacccggcttccccgcaagacccacaggggtctccgcaaagttgcttgtatcggtgcatggcatccggctagggtctcctatacggttgcccgtgctggtcaaaatgggtaccaccaccgcactgagatgaacaagaaggtttacaagatcggcaaggctggacaagagacccacgatgcctccacagagtttgacaggactgagaaggacatcactcccatgggtggcttcccccattatggtatcgtgaagggtgactacctgatgatcaagggctgctgtgtgggtccaaagaagagggtggtgaccctccgccagtccctcctgaagcagacttcccggctggcgctggaggagatcaagctcaagttcatcgacacatcgtccaaatttgggcacggtcgcttccagactaccgatgagaagcagaggttctttggcaagctcaaggcgtaaggtgctgcggtgcagcgacaagtcccatttctcaaaatcatcaaactgtgatacttttgtttgtaaccttgctgtactaagttttgtagccggatggtttgggagcatggtccggtcttctatggattgttccatgcttctgaactgcaatgtctatgttttgtgctactttggttgtttaatgccctaatcattgcatat

SEQ ID NO: 33580 - DNA, 1627 bp, Zea mays
  Clone ID: UC-ZMFLMO17137G10_FLI
ccggtgaggtgagacgatctccgccaccatggcctccagcacctccctctccctttgcttgcacgcctcgtccccctcgtcctcgtctcctgggctccgccgaccctccctcgcctcctcctcgtcctccaggtccaagagaacgcgcaagatcagggccaaggcggtcagggaggactggaggcagaaatccaagcccatccctcctggcgccgcctaccctgccaaggaccactgcagccgttgtgggctctgcgacacatactacgttgcgcatgtcaagactgcctgtgccttcctgggagacggcatgtcccgtgtcgaggatctggagcgacaagtccacgggagaggccggaaggaaggcatggatgaaatgtactttggagtctatgaccaactcttgtatgccaggaagaccgaacctgttgaaggagcccagtggacgggaatagtgacaacaatcgctgtcgagatgctgaaagcaaacatggttgatgctgtgtgatcctgacgacaggctttctccaaggcctgttttggccaggacaccagacgaagtaattgcagccaaaggtgtgaagccaacattatcaccaaatctcaatacacttgccttagtcgaggcagctggtgtaaagcggcttcttttctgcggtgtgggctgtcaagtgcaagctttgagatctgtagaaaagtaccttggtttggaaaagctttatgtgcttggaacaaactgtgttgacaatggtacgcgtgaagggcttgataaattcttgaaagcggcaagcagtgagccagaaactgttatgcattatgaatttatgcaagactacaaggtgcatctaaagcatttagatgggcacattgaagaggttccttatttttgcctgccagcaaacgacctggtagatgttattgcaccgtcatgctatagctgctttgactacacaaatggcttggcggatttagtggtggggtatatgggagtacctaaatatgctggggtctccatgacacagcatcctcagtacattacagtcaggaacgatcgtggacaggagatgctgaacctggtagctggccttctggaaagcacacctacaattagcagtggctccaggcaaccgtttgttatggagacagtgaaagctgacgatgccgcaaaactggggaaaggcccttcgaaaccagctcctagattcgtcggcgacattctggccttcctgctgaacttggttggacccaagggtctggagttcgcacgctactctctggactatcacaccattcggaattatctgcatgttaggcgggcatggggaaagcaaagagctgagcagcacatcccggggtatgccaagaagatcgtggaggcctacgacaaggacggacggatcgaggcaatggttacgcagtcaggtgactgactcacaccattcacactctactagctggtagtatttgtactgcattgtagtaaagattaaggaatgtagaagcattgtttgtaatgtgacgtagtggccatgtatacagtagaatgtataggctgcatggcagcagctcagatctgtatgtacatcctgcgcttgccagtttctagtttgcatttgcttttctgggc

SEQ ID NO: 33581 - DNA, 1310 bp, Zea mays
  Clone ID: UC-ZMFLMO17137G11_FLI
attgaaccaggatcaaggccagaaacttctgactatcctcagtcaagtgagaggccactgactgccacaagcagtttcagttctgcatccccattttcagaatcaagccagttagcttcatctagtaaacaaccagccccatatctacctcgcaaccatatgggcaggcggtctttcatgtctaaaccagtctacccacttgtcttccggaatcctgtctcagaatcagaagcgtgcaggatgcttgaggttggtaatgccgggcgagcgacaccaagtgatgacagccaagcttctcctctgtggcgtcgcagcttggcgagcccagatctcaagttccacaatgcaccgaatgaacttgggaagatggaaacctcacccgaaccgaacacaagctcaagaagggaagggttcagatggagcaacgccagcagttatgactttggatacgatggagatgccattgacatttcagatcatatcagcatcgagtcccagagatctcccacgagctcagcgaggttcctgaagtgtgggctgtgcgagagattcctgcaccagaaatcaccctggacctcgaacaggattgttcgaaacgccgacatgccagtggcagcagttctgccttgccgacatgtcttccacgcggattgcttggaggaaagcactgccaagacagaagtccatgaaccaccttgccccctgtgcgcgcgagccactgacgatgaagggcacgtgtcgttctcagaacctctgcatgttgccctccgatctgctcgcaggaacctttcgttgggcactggtgctggtgggaacagcggcatttctgaccctcctcgcactgatcgtggcttgaagaggaacaactctgcagtcatgcctaggcgcagcggcggcgcattgttccgcaatcgcttcaagaaacagttccccttcaaagcgaggatcgggaaggagctctttggcggtagggttctcaacaaggttggattgtctttgtcttcaggtcagcatgatgatcatcgacagcaagcgccaaagcatgaccggcccatgaagtagctagatcttagtggcacagagtataatatgttgtgtgccctcctgatattttatctatggcatctgttatcgaaacttggcatccatgcgcagcagtcgtccaagatgggggccctgtatggattatggaaggctgcttgcattgcgtgtaacagtagcaccttgccattgcatgtattttgcatgtagcacagtaagaatctatgccctgtgattgatatgttctgaatgttccgcttgatctgttc

SEQ ID NO: 33582 - DNA, 1690 bp, Zea mays
  Clone ID: UC-ZMFLMO17138D08_FLI
cagacacctccgccacctccaccctcgaatcgttccccaccatggcgtcgcagggatcctccgtcttcgccgcactcgagcaggccccggaggaccccatcctcggagtgaccgttgcctacaacaaggatcccagccccatgaaggtcaacctcggggttggcgcctaccggaccgaggaagggaagcccctagtgctgaacgtggtcaggcgcgccgagcaaatgttgatcaataatccgtcacgtgtcaaggagtacctaccaatcaccggtctggctgaattcaataagctgagcgctaagcttatctttggcgctgacaggtattctctgtttgactggtttacccattttcctcatttgtgggtcaactgttcctaatggtgatgttagtcaactgtgaattcttagtgttgaagtttcattacataaaaataagttccctagctactggttctggtttattcaggttttattacttcattagggagctgattttttttttgaatcgaatagccctgctattcaggagaatagggttgctaccgtgcagtgcctatcgggtactggttctttaagagtcggaggtgaatttcttgcaaggcactatcacgagcgcactatctacatcccacaaccaacctggggaaatcacccaaaagtcttcaccctatctggcttgaacgttaggagctaccgctattatgatcctgcaacatgcagccttcacttcgaaggactcatggaagacctcggttctgctccttcaggttcaattgtactgctgcatgcctgtgcccacaaccctactggagtagatcctaccatcgaacagtgggaacagattaggcagctgatgagatcaaaatcactgcttccgttctttgacagtgcctatcaaggctttgcaagtggaagtcttgacaaagatgctcagtcagtgcgtatgtttgttgctgatggtggtgaactgctcatggctcagagctacgctaagaacatgggattgtatggagagcgtgttggcgctttgagcattgtatgtagaagtgccgatgtagctgttagggttgaaagtcaactcaaacttgtcatcaggcctatgtattcaaaccctcctcttcatggtgcctctattgttgctaccatactcagggacagcgagatgttcaacgaatggactctggaactgaaggccatggctgataggatcattaacatgaggcaacaactatttaatgcgctgaaatccagaggaacccctggtgattggagccatatcattaagcaaattgggatgtttactttcactgggctgaatagcgaacaagtggcattcatgaggcaggaataccacatttatatgacatctgatgggaggatcagcatggccggtttgagcatgaggactgtgccccatcttgcagatgccatacacgctgcagttactcaactgaaatgaggatagtatcgcagctttcgtgaataaaacctgaatcacccacaacaatgttctaagtactcagccagtggtatttactggttgacctactgtagtttgcgtcggaatagatttgtttttttactctgttcgtggggcagttttgtattggtggattcataatgactctgattatggtgcgttgggaacttctaataatatgcacatgaaattttgcttcaggtgc

SEQ ID NO: 33583 - DNA, 1554 bp, Zea mays
  Clone ID: UC-ZMFLMO17138E07_FLI
ctctcgtggcgctgggcgaccgcctacgcaggccaggcgccgtcgccctaagctacgccaggttcccgggtcttggtcggtcccttcaccggcgaagagcacccaccagacgcgccggtgcctggatccggaggaagtgctgcgggtttcggcggttcgtctctctcgttgtttccggcggggttatgaaggcggtgggatacaacctctacgatagcagcgggactgatgacgatctccctccagcacaaaatagaggattgagaggacgggttttcagtgggaatggccgagcatctgctggggcatttccttacatgagggcaaataatgatttggagagtgaaatacatcgagttgagcaagatgcatatactggtgttcttagggcatttaaagtgcaatctgatgcaatatcctgggaaaaagagagcttgattactgaactcaggaaagaactgagggtttctgatgaggagcatagggagctattaaataaagtcaatgaagatgggagcatccgtcaaatgagggagttaagacaggcaggtggaatcccaagtggtctgcatcgtggcaacagggttttatatgatgcagaacctgggcccactaccaagaggcaaagggcatctcattcgattccttcgcaatctgcaggcctccagtcccctatgatgccctcccactcagtttcatctgcaaaatggggtcctttgtcagcaagaggcaagaaggcgaagatgatggcacctgaagatataagatgggaatttgatggacatctttcaaatcatgatggctggggcccttctggccctatgctgaagaggcacatgaccaacaacggtgctatggcaggttcaatcaggggaagaggaaggttatcgataaatgagcctataaaagactatgctccacctcaaaatgacatcaataggaattttgattatattgacataccaaatactgaaagtgttgttactgaggtggagagggtgttggccaatccaaatatgcctgaaatcgagaaggcaaggaaactgctgaaagatcaggagcagtcattacttgatgcaattgccagacttgatgaagcatctgatagcgatagtggtaactgaagatatggctatggaagaccgaaggggttctgctggggtcctggggaatggaacggcattgctacttagttgttggaattggaagattaacatgcatctgtgtatcacctacctcgaccacagaacaaacaaaccacattatggcaaaaaaattgacatgccagaaaatggtgcctggaaactgttgatgcctgaaatgggatttgctggctacacaaaattgagcgcacgaggagcagggatatgcaaatgtcagaactgtttgaatggtgtttcctatgtagcgtagtaaaagtagcttaaatgttctagatgattagcacggatcacttagcattcctgattcagtataggtagatgtctaactctagcataatatccaacttggttgttcttgtactctaatgtgaaaaaggacgttgttcactct

SEQ ID NO: 33584 - DNA, 1699 bp, Zea mays
  Clone ID: UC-ZMFLMO17138F03_FLI
gggttcagagctagtccgccgtacaagtacaaggatacagccgcaggcccgcagaggaagaggagagcctactctcctgccatggccgcgccgagtccgctcccccgcttcctgatactcctgctcgccgtaacctcctccgcgtttgccgccgccgcggcaaccggggctccggtggtgggggaggactacgtccgtccgccgccggcgcggtgccaccgcaaggcactccttagcctcttcccttggagcaagaaggaggagtccgccgcctcctccgatccgcagcaggtgcacatttctctagctggagaaaagcacatgagaataacatgggttaccaatgataactctgtcccatctgtggtggactatggaactaaagaaagtacatacacaatgaaatctcaaggagaaagcacatcctacagctacttattgtatagttcaggaaaaattcatcatgttgtcatcggacctcttgaagataacactatttattactaccgatgtggagggcagggtccagaattccaatttaagaccccgccctcccaatttcctttgtcattggctgttgttggtgatcttggtcagactagttggacaacatcaaccctgaatcacatcaagcagtgtgagcatgatatgcttttactccctggtgatctatcttatgctgattatatgcaacacttgtgggattccttcggcacattggtggagccacttgctagcaaccggccttggatggtgacagaaggcaaccatgagaaggagcacattccattttttgagtcaggatttcaatcttataatgcacgatggaaaatgccttatgaagagagcggatctagatcaaatttgtactactcttttgaagttgctggtgcacacatcataatgctaggttcatacacagattatgatgatagctcagatcagtatgcttggctaaaggctgatcttgccaaggttgatagaaagaggacaccctggctcattgtgttgttgcacgtaccatggtacaatagcaattgggctcatcagggtgaaggcgacagtatgatggcttcaatggagcctttgctgtacgctgctcatgtggatatggtaatagcaggtcatgtccatgcttatgaacgtgcggagcgagtctacaattccagacctgatccttgtggcgctgtccacataactatcggcgacggtgggaaccgtgaaggcttggcccgcaggtaccgtaacccgaagccagcgtggtcggtcttcagggaagcgagctttgggcacggcgagctaaagatcgtgaactccacccatgcccactggacctggcacagaaacgacgacgaagagccggtgagaaccgatgacgtgtggataaactctcttgctggttcagggtgcatccaggagggcagccgtgaccgtgagtcgaggaagatcctgatgtctccttgatgcttagcagtatagcttgggcctgcgatgtactgtgtatataatgcgtgctacttgataatctaacacctagtaaaagttaatgcgtcgtgctgcttgcctgcgtgtatactggagactggtttgatctggcgcgtttgctgctcttgttgtgttgtaccactatggatgtttgtagcaaagtgacatacgacggtgttgtaatggactgaagatgaatagatgatgttccagt

SEQ ID NO: 33585 - DNA, 2919 bp, Zea mays
  Clone ID: UC-ZMFLMO17138F07_FLI
gtttaaccctgtcgcaggaaaagctatggcatgattgccaggaaataattccaacactgacagtttgccaccatagcatagcagacagatcggagtagacgatcatcatctccagtgccgtaggccctaaatggctatatatgagtcatcgcagtagttgttaacaattacacctagacctagtactgttttttgtccgtccgggttgctttccggctaacgtgtgtagtgtagcacaacccattggtcgctgtctgctttctgaagaacgttcattccggttgacgccgctacgctgccgtgtcttctttccttcccttataccctgccgcacacaccttttccgtttgcagtggtgcaggtcttttcggtcctcaggcttcatccctgtgcaagtgcagggataattgcttctgatctcccgaggctgcataacctgattcagaggcagagcaagggggcgtgagggagatgagggagatcatcagcatccatatcgggcaggcaggcatccaggtagggaattcttgctgggagctctactgcctcgagcacggtatccagcctgacggcctcatgcccaggtgaggcccctttccattccaactcatcctttccttgagaattatgtcagattttgttctgtacttctctctgagatgattattccagttccagctcagataattatttaagatagggctgccatctgggttcttgtagcagtcgcctcaaaaggttgggtttttgagataatcctgaggaagatctttacttgttgatcacagacagcactctaaaagctagagaaacttcgctggatgctctgacctctaaaaatcttctcttaagagtcgatgacacccctgcgttcaaaaccacttgcttaaaaagttagaaagagacatgataggataaacaaccctgcatattaaagaagaagctcatgttttctgaaacgaggataatcatgtgacaagctaccggtttctgtgtccaactcaccgatttcacagcatccaaattctcagccttggccgttcgcttgcagtgacacctctgtcgggatcgcgagggatgcgttcaacacgttcttcagtgaaacgggcgcagggaagcacgttccaagggccctgtttgtcgacttggagcccactgtgattgacgaggtgaagactggggcttaccgccagcttttccatcctgagcagctcatctcacacaaggaagatgcagcgaacaacttcgcccgtggacattacacaggtgtgacatgttcccctcaccctgagctatttcccggagaacaaaaaatgtttttgcaattttaaatgcaatattggttcaagtacaaaaactattggggtttggaagccctaccttgaatttcggtgcattgccaaaatgcgtaaagaccaaatttgtgttcttgaacagtactagcaagtggtagccagaactagtccacaacaatttggatattatgaaggggctgggtcaggatcttataatttacatattcaaccatcctatgccatgattattatagtatttttcatgacttcatatcatacaagcaacctcactttccttacctggggcaattgttttaaaaacattacaatgctttggaactgttctctgctctttattaatacctatcctgtttggaaactgagtaatgtcagaagttctacaacatgttttttctgctgcagttggaagagaagtaatagatctttgccttgatcggatacgaaaattggcagacaactgcactggtcttcaaggttttctggttttcaatgctgttggtggtggaacaggctccggcctgggttcgctacttttagaacgtctatcagtagattatggtaggaagtcaaagctcggtttcaccatctatccttccccacaggtatcaagatgataatttgggaacattcatgtatgcatcatttggtcatcgtaattacttatgcagtcatcaagcccgctcgggcggctatagctgcactagcaccgcactagtaccgtgctatagtagtatgcagttttgaagcagcagcagcagccgcaagtagctgaagctcatgtttctttctgggcaagtaattacagacttaattaccgtctcgacaaaggaagagaaaaactgttgtgcaatctccatacaaccaaattaccaaaagtcacgattttttttcaaaaaaaaattacagatatacttcattgtttactctaccaacatatcaagttttaagttatgattcatcctactttaagagatataaaaaggagaaaactatatccaatatgaagtattaaaaatgatagaattttatttttctatgtatatttcttaacataggatgacttaagaacttaaaatgtgatacattattagagtaaaatacatctataaaatttttaagaatttttatgacttttgttagtttgattgtgtcatggaccttcggtccatggggatagctgtcttctccggcgaggttatacccctctgccgtaggcttggttctagggtagcagccctaagcgcttgagagggtcattgcaagagagagagattggtttgataatgatcttgcttgatttattccttgctgctatgcggcttataaatagccctatgactaaccaacttctcctacaaactctcaactaactcctactttcttggacttatctgctgctaactaactctccacaattctctcatctcaatcttattctctagccttatcctagctcatctcaatcttattctctagccttatcctagcctggctgttgcctctcactccctattatgcccatgacatctccccctcccttgaggaccagctcgtcctcgagctgccatagacttacctgacatgacttaaggttaagcctttt

SEQ ID NO: 33586 - DNA, 1539 bp, Zea mays
  Clone ID: UC-ZMFLMO17138G05_FLI
tctaactgatgacagcatttgtagtgattttgatatttatgtaaggaagcttcaggataaatatgggctacaatgtcaccatccacggcaaatgacttccaaagctcacagatatcaggtgctcgatgctttagtcgaccttttctgcaggtcaaaggtttctgcagatgttcgtttggttggtggctggcttttccggcaactgctgccccatggagaggaagagttcactgcttttcatctaagacgactaaaggattcacacaaggattgtagctcaaagctttctgaggaatctggaggatgctggtgtgacatgcttcttcctattgttaaagaagcttggaggaactgcaagaaagcaattgaggcatcttcgccaccaaaaggatccaaatctattattgtacccatggatttgtgttcatttgaaggtgattcttctgttgccatcgcagaggcactctatgagatggttaagggttttgtgctgcagcatcaagttatactcttctgtcttggagaaactttcacagagctacctcctatttaccctctggttgatttgcctataaatactagggcaagcgctgcagattttggtggttcagttcctaaacctgggcttgaagtcaacttagtcgacgctgttccttgtcgaatagcatttgagaggggcaaagaacggcacttctgctttttagccatagctcatggaacttctggttggattcttcttctagaagaattacctctaaaacgggaacgaggaattgtccgtgtcatggcacctttggcaggatctgatccaagaatagatacaaagcatgggaagtggttacatctacgcattcgcccttcttcggtcccttttttggacactgagaagcataaagcgaagacaaagaagtatcttgttgatgggagatggacccttgcttttagggacgagcagtcctgtaaggttgcagagagtatggttattgaagagatgaaactccaacgaggtgctgttgcagagcaattgaagccattggttgaatttgacatgcctgaggatggaatgcagcacccccagacttcacatgaaaccccttctgatgatggatcatgactaaattttcatcaagtgcagtgttgagcttctcaattaaggagacatggcaacagatggccgcaaaagtgccgcattgaacatttcaagcatgctggcaggaaaacccaccatggcaagtcatcgacaattctgtacattacattgggagattagagatgtctccttgttaacacacaactgtagagtttcgggccgtcctgagttgaactagctggataggattctttgtacaatagtttgtttctctccttgcccgttgtaaccttatatatcacatcaaaacccattctttgttaagtttcagggcacagttgtgttgtgcacacgaaatgtttaaagaaatttgcagttagtcatacctgttgtcaaagcaagccttgcctatgtggtaataaaatgtcagatcgataattttttttggg

SEQ ID NO: 33587 - DNA, 1171 bp, Zea mays
  Clone ID: UC-ZMFLMO17138G11_FLI
ccatatgaaatataaggcaaagcagataaaaagcttaatttttttcaagaaggtaaaggcaatgacagaaaagtgaggagggtcagaggtgtacagataaggatgagggctgaaaagaggagtaggaagttgaagatacattcctgaggacgatctggtgcagttatgggcttcctgcttgctgccagcggtcttttggtgcttttatattgctattaatttgtttgaaatttattatggtgatgactgggaaggtctttttgaggctattactggctatcgccttggtggctctttttggccgtgttggtggtggtatttataccaaggctgctgatgttggtgccgaccttgtggggaaggtagaaagaaacattcctgaggacgatccaagaaacccagctgtcattgctgacaatgttggtgataatgttggagatattgttggaatgggatcatatctctttggctcatatgctgaatcgtcatgtgctgctcttgttgtggcctcgatctcgtcttttggaatcaaccatcaatttactccaatggtgtatccccttcttgtcagctctgttggtattatagcatgtctcataacaacgctgtttgcaactgatttcttcgagataaaggctgtgagtgaaatagagcctgctctcaagaaacaacttataatatccactgttgtgatgaccattggcattgcgctcatgttggcttggtcttccatacaccttcaccatttataactttggagcccagaagacagtgcaaagctggcaattgttcttatgtgtggcggttggtctctgggctggcttagtcattggttttattactgagtactacacaagcaatgcctacagccctgtataagatgttgctgattcctgcagaactggagctgccactaatgtcatttttgggcttgctctgggttacaaatcagtcattatcccaatttttgctattgcgtttagtatcttccttagcttcagccttgctgccatgtatggtgttgttgtggctgctcttggaatgctgagtaccattgccacaggccttgctattgatgcctatggccctatcagtgataatgctggaagcttaagtctgtatgggtgcatcttatcatatatatgtatatctgaaagcttaagtatttttt

SEQ ID NO: 33588 - DNA, 785 bp, Zea mays
  Clone ID: UC-ZMFLMO17138H07_FLI
accgccttaaaaaaaccattggtaatttgttaataaaaaaaagaccgttttttggggcggccttttgaaccactttggtaatgttaaaaaaaagaccccccaattgcaacccctgttaaaagggttttaaaaaagttccaaatttcaaaaactttggtcattccaggggccctatgggtatttccaaaacacctccctttttcaatagagtggcctcataattgtgtgcgcccccataccccagggaccagccacacatgttcaaccaatggactctggaactaaaggccatggctcataggatccttaacatgaggcatccctatttaatcccctgaaatccagaggaacccctggtgattggagccaaatcattaagcaaattgggatgtttactttcactcggctgaatagcgaacaagtggcattcatcaggcaggaataccccatttatatgtcatctcatgggaggatcagcatggccggtttgagcattaggactggcccccatcttccagatgccagacccggtgcagttacccatctaaaataaggatagtatcccagccttcgtgaataaaacctgaatcccccccaacaatgttcataagtactcagccagtggtatttactggttgacctactgtagtttgcgtcggaatacatttgtttttttactctgctcgtggggcagttttgtattggcggattcataatgcctctgactaaggggcggtgggaccttctaataatatgcacacgaaattttgcttcaggtgcccaac

SEQ ID NO: 33589 - DNA, 1940 bp, Zea mays
  Clone ID: UC-ZMFLMO17139C05_FLI
gcgccgccgcaggcacaccatctaccacggccaccgccgcgcctcgccgcaccggcccacagtccgcggcggcctcttcactgatctccgcttcccctccactatacaccgcccttcctcctccccctccaccgccaccgccttccgcctccgtgactgggatccacactcgccctcttcctcgtcgtctgctcgctctccgtcatctccttccgcctcctcctcctcctcctccacatccgcctccgctcgccgcctctccccgctcgcgcgcttcctcctcgacgcgctccgccgccaccagcgctggggaccgcccgttgtcgccgatctctccaagctccgccgcgtccctccatccctcgtcgctgaggtcctcaccgcgcgccctcccccgccgccgccgctcgcgctcccgttcttcctctgggccggccgccagaagggcttccgtcactgcttcccagccttccatgccctcgcctcgctactgtccgcggcgggcctcccagccgcggctgaccagctccccgacctcatgcgcgcgcacggcaggccggtctcccacccgcagctcaccctcctcgtccgcctccacaccgccgcgcgccgccccctccgcgctctgcacgcgcttcgccgcttccgccacgagttcgacgtccaaccccaggtccacgcgtgcaaccgcgtccttggcgcgctggctgctgcgggccacgttgaggacgcgctcaagctgttcgatgaaatgtcggagggtggtgtgcagcccatcccagtgacgtttgccatcatggttcgtgcactagcacacgcaggaatggttgataggcttctggagatgattgggaggatgcggaacgaggtgtgtcggcctgatgtctttgtgtacactgcactggtgaagacaatggtgcggagggggtatatggatggctgcatcagggtttgggacgaaatggagaaggatggggtggagccagacacaatggcatatgctactatggtcgggggactctgcaaggctgggatggtggaggaagcagcagaattgttcaaggagatgaggagcaaggggttactggtggacaggatggtgtatgcatcgctcattgatgggtacgttgctgttggcagggttggggatgggtgtaggttgttgaacgagttggttgatgctggctaccgtgctgacctggggatatataacacacttattattgggctgtgtggcataggtagggaggataaggctcataagttatttcagattgttcttcaggaggaccttatgccaagttctgatactgtttcaccgttgctagcttgttatgccgaaaagggtgaaatggttatgttttttgggttggttaacaaactggcagagatgggcttgtctgttgttgaaatgttagtagattttatgaagctctttgcaggaaaggatggtagggtattgaaggctgtggaagtgtttgatgcattgagacaaaaacagtattgtagtgttggcatttataatattcttattgaaaatctgctgaagatcaaggataggaagaaatcacttttgttgtttgaagaaatgcaaagctcaggtcatgtcggcctgacagtgtatgaaatcgacgacacactggatagcactaggggagggataaaatggatcttcttgggtgcatttgttgcttcaaggaagctttatctgctcaacatagcctattcagacacccggacagtgagtcaagaattgttctggacaaagcattccattcttttgattatgtatagtttatattttctatggcagaaaatatagtcgcgagtatttgtttgtttgtaaaaagagtgctaatcaaaaggttgcattgtcgtcttgtccagtactattgcacctttatcagtgatgtcaggctataagtaatttcagtttagat

SEQ ID NO: 33590 - DNA, 1073 bp, Zea mays
  Clone ID: UC-ZMFLMO17139D05_FLI
agccgccagcccgctagcggagcagctcagcagcgccgaagcggagacgagcaggaactgccgaagcggagcagcacggagacgagcaagaagccagaaagccaataagtggagcagcactgcgtccagtggccgatctgattttcgctgcgtccaggtctccaggaagcaagcaccagccaccagtatatgggggagcttggattgaacttcgaagtataccgcaatgatgaactgaccatagaagatgtgagaaggaagaacccaaggggaatacttatttctccaggacctggtgaaccacaagattcgggaatatcattgcagactgttcttgaattaggcccaaccatcccaatttttggagtttgcatgggtctgcaatgcattggagaggcatttggaggaaagattatccgtgctccttctggagtgatgcatgggaaaagctctccagtttattacgatgaggaattaggaaaggcattgttcaatggcttgccaaacccttttactgccgcgaggtaccacagcttggtcattgagcaagaaaccttcccacatgatgctttggaggctactgcatggactgaagatggacttatcatggctgctcgccacaagaagtacaaacacatccagggtgtccaattccacccggagagcatcatcacccctgaaggcaagaaaatcatcctcaactttgtcagattcattgaggaactggagaagcagcgttcgtaggggaggtagacgcgacaggtggtttcatttcatagatcagacggaagcagagacaaggcgcttaaagctgcgccaggttccggggctggcagttgaagcatagctaggaaacagctttccctctcttaattcgttgtgttcgtggtgacataatctgtgtgcggaccgaatttagaataaagtacaggcgtccgtctgatcaaataagcaccggtgttggtgctctatagatgaatatatccggtgattttcggcatgggaggcattggcacatttttgtctgagttctggcggtagcaagaccggagtaataaccatcaggcgtttct

SEQ ID NO: 33591 - DNA, 579 bp, Zea mays
  Clone ID: UC-ZMFLMO17139F07_FLI
acatacaacttatatatattactttcaaaattatagaatattacacactttgttcagcaaatattacatcagtactccgaatgtttttacaacaatagctagtcttctttcagaactacttccgcagcttcgtttagcagttgaggtacaactttgtccataatagcttcggccatcttaataatttcatcttcactttttgctttggggtttgtttgtgactcaaagggctccgggggaggagacaattcggcccttggattcctgtaattgatgacgtatgatgtacatctcttggagaactatcagcagatgcatccgtattagtgaatttgtaatcactggttactttggtacttctcccagcggttcctttcagttttcttttatacttcggcttttcagttatctgtaaccgtttcttgtgtaattccttaaacttgtcgagccggtcctgggatagtttggagggcttgaacgccgggtcgaggagcctgcttgatgcaagcgccgcctccttcttcttcgcctcgtcgccggcgtctccacatctccccggctcctgattgcttgcgggct

SEQ ID NO: 33592 - DNA, 2144 bp, Zea mays
  Clone ID: UC-ZMFLMO17139G08_FLI
cttcaaccgcatcaagctcggcttcttcctgcactcgccgttcccctcgtccgagatctacaagacgctccccgtgcgcgaggagcttctgcgcgccctgctcaactccgacctcatcggcttccacaccttcgactacgcgcgccacttcctctcctgctgcggccggatgctcgggctctcgtacgagtccaagcgggggcacatttgcctcgagtactacggccgtacggtgagcatcaagatcctgcctgtgggggtgcacatggagcagctcaagacggtgctcgggttgccggagaccgaggccaaggtgtccgagctgatggagatgtactctggaaaggggagagtggtcatgctgggcgtcgacgacatggacatcttcaaggggatcagcctcaagctgcttgccatggaggagctgctgcggcagcaccccgagtggcgggggaagctggtgctggtgcaggtcgccaacccggcgcgagggagggggaaggacgtcgccgaggtgcagaccgagacgtacgccatggtgcggcgcatcaacgaggcgtacggtgagccggggtacgagccggtggtcctgatcgatgagcctctgcagttctacgagcgcgtggcctactacgtcatagccgaggtgtgcctggtgaccgcggtcagggacggcatgaacctgattccctatgagtacatcgtctcccggcaggggaacgagaagctggacaggatgctgcggcaggggaagccagaggagaagaagagcatgctggtggtgtccgagttcatcggatgctcgccgtctctaagcggcgccatcagggtgaacccgtggaacatcgaggccgtggctgacgccatggagaccgcccttgtgctgcctgagaacgagaagaggctgcgccacgataagcacttccgctacgtgagcacccacgacgtcgggtactgggctaacagcttcctcctggaccttgagaggacctgcaagtatcattctcagaagaggtgctggggcattggcttcggcctgcggttcagagtggtctcgcttgacctgaccttcaggaagctttccttggagaacatccttatggcataccggagagccaagacacgggcaattctgctggactacgatggcacgctgatgccacaggcgattaacaagagcccgtccactgaatctgtgcggatcctcaacagcctgtgccgggacaaggacaatgtggtgtacctatgcagcgggtatgaccggcgcacccttcatgagtggttcccttgtgagaaccttggcatagccgcggagcatggctacttcctgaggtgtaagagggacgcggaatggaagacctgtgtcgctgccacagactgcagctggaagcagatcgcggagccggtgatgtgcctgtacagggagacgacggacggctcaaccatcgaggacagggagacggtgctcgtgtggaactacgaggacgcggaccccgacttcgggtcgtgccaggccaaggagctcgtcgaccaccttgagagcgtgctcgcgaacgagcctgtgtcggtgaagaccacgcctcactcagttgaagtgaaaccgcagggcgtgagcaagggcttggtggctcggcgcatgcttgtgtcgatgaaggagcggggccagtgcccggacttcgtcctgtgcatcggcgacgacaagtccgacgaggacatgttccagctgatcgccaccgctgcctgcggggactcgctggcgtccaaggcggaggtgttcgcgtgcaccgtcggccgcaagcccagcaaggccaagtactacctcgacgacgcggcggaggtggtgaggctgatgcaggggctctcctacgtctccgaggagctggcgctggcgaaccagcgggatgaagacgaggactcctctttggacgacgtgtgggaataggaaggagcgttcccttcccgtgctgctcctgcggtaatgtctgtttgtgttgttggctcggctggagctttcgccgagtagtttaggtgtgtaaatgaggtatgcttttcagcgtaatgtattgccagtggtctagtctcgagagctggcttgaatctagtgatgctctagtactttggtttgtggtgctatttacctgatc

SEQ ID NO: 33593 - DNA, 1349 bp, Zea mays
  Clone ID: UC-ZMFLMO17140A05_FLI
atcatcagtatatttgctatggttcgcaaaggttacaagaataacaacattgccaagctttgcgaggatcttgggcttgcagacagggccacaggtttaattgactatatgattggaaatgggcagcatcccgaagtttttcatttggtacaaaattttaatttggaggacaagtatcctccattttctcttctgaagggatacattcagaaggccaagcagacttttgtggagatgtttaaaaagagtcaaacacacgagtccttggtatgaactaccccttctgactctaaaatcaagtatttcattgacaggaattatatggctgcatggcgccctgggtagcacgaacactggacatccaggccacattatgctgtagacagaaatttgaggccgctattcttctgttgacagattttttttagggtgggaatgcatacctcttccaggatgctgaggtcattctttcccataactgggctataccaaaggaactatggattgcacattatctagctgagcagaaactcactgattctaagcaacgcagtgctatcatggcagaaattaaatatttgatgagtggatatgaaaagaaacaaaggtcagaaaatctctcaacatgggcttcacagcatccgccaacggaatctaaaaggaggaacaggaagcgcaaggaggaggagcaggagcaccatgaagcacaatacaaccagcagcagcaggaacagaatgaaaacaagttaattcaaggaaagcggcatcagctgcatcaagaaaatatggcgcaagtgacacagcagcagcagcagcatatgcaaccgacaacaaggccagctactcttaagcttccgacgcctgctattcctctggttctgaatgcagctcagatccaaaactttgcgcgtccagcttacgccgctgtgcctggagttcacaattaccctgcccagccaggttggtctgcagctcaaggaagtccattcgtaccacagttcatgtcaccgcagtatatgggcctgccatttaatccctttggccttcatcctacttgctatcccagacgcagatagcgtagagagttctggcgttccgcgtccatttgctgagtgaaactgtggtgaagcgtacaagttatatgaaacagaccggtatcggttaactggttttgtgttcgtttgttatgctgtctgatggttccttttcgcgacatggtgattgatcactttgcattgatttgttgttcagccaagtggtggaatgcttggtgcttgcaatctgaaatgtacgcacggtaacaagaattgtagtacttttcaatcaattacataatggcatttcgaaat

SEQ ID NO: 33594 - DNA, 456 bp, Zea mays
  Clone ID: UC-ZMFLMO17140G11_FLI
accacgacgagcgtcgtcgtcggtgccaagcaacggcagttgtccctgtccagagcacaggtaagatggttaacgcgatcaaggggctgttcatctcctgcgacgtacctatggcgcagttcatcgtcaacctgaacgcgtcgatgccgccgtcggagaggttcatcgtgcacatgctcgaccctaccaacatgttcgtgcagcctcacgtggcgcacatgatcaggagcaagatcggggagttcagggaccagaacagctacgagaagccgcagtagtggaggatcaaccgcgtcctacactcctacctcgggacttgctttcgttgcctgtattatttctgctgtgagctgagcacctcagtggaaacgagtacgccaaatagatcccacctgtggccttgaaatcatactgctatgtgctataaacatgcagagggcactgctactgtgctgc

SEQ ID NO: 33595 - DNA, 1681 bp, Zea mays
  Clone ID: UC-ZMFLMO17140H09_FLI
gggcaatagaagtgtcaccacaggttgatacttcacaggtatctaaatcacctgatggaggtaaacctgagcaaactgatgttttgattggttcaaatcaaccagatacagtacataaaaaatcctcagatccaccagagacatctgtagcaaaggacatagatcttcctgccctggtcacatcatctggaacacaaactgaggctgacaccccaaatgatgaagtaccaactgcaattgaggcaaatgattcttcctccaatgacgatgaaagagattcaggagcagatacaccagaacaactgtctagtggaggtgaaaatgagaaatcttcactatctgagagtgaaaagaatgatacaccaagagaaggcgctaaagagacaacaagtaaactttctgctgctgcggctccattcaatccatccagcgtaccagcttttggttcaatggctgtcccaggtttcagagaacatggagggctattgccatcaccagccaatgtgccccctatgctgtccatccctctccgcaagcaccctcaccaatctgcaactgcaagggtaccttatggtccacgtctggctggaggctacaatagatcagggcaccgaggacttcgtaagaagcctgtgttgacaagtggtgaggcccctacagaaacaaacacgtctggccccaggattatgaaccctaacgccccagagtttgttccaggtcaatctcggagtcctaatggccatccagcatctccaaatggtcctttagcatctccaggtggtattccatcttcaccacaggaccttctatcctctccagatagtaccttggagtcaccagtaactgcatccccacaagtttctgaatgtagccagattagtcctgaaggagatgttgagggtgggggtgtaaagcagaacatggatgacacgaatcacccagaaagtaaagatggtgaagtggagcctgagcaaaccaaagctcctgaaggtacagaagaagaaggcgcagcggtaaaagatgctgctgaagagttgattgcagccgagctgccgagcagcccaaatcctgggctgactacagcgatggagaggttgaagtcgttgaggttgcaagctaatgaaaatacgaccttctcagatagccaacacagagtggaatttttatttctcgaacagatgagcatttctccttctcaatagatgctgcattttttacagtgtggccttctcccgctgtattttctgctaaagaaaagatgctgcctttttggggatagactgaattgccttccagtggcattcaatgagctttgggatttgaaattttgaagactttccagaatgtgtcagcctttgggatttggcatctcttcatctattttttttttgctgcgaagaattttggggaataagagcacctcaaagtatcagcaggggagatacggcgttaacatttcatcatttccccatcttgctcctgatttcccccttggtgaatgtactgtcgacttaacgtctttcatagttatttctttgttacaataaatagactttttgaaccatgtataaaatataaagcaagtgattttatctttccacacttgcggttaatccgagcatgtatagcatcgagaattcgagatcgaactaaagaaagcttcctattgaatttcgctttt

SEQ ID NO: 33596 - DNA, 1561 bp, Zea mays
  Clone ID: UC-ZMFLMO17141D11_FLI
tctccgcggcgacctccgacctggcattcaccctccacgcctccccgttccgcttcaccgtgtcccgccgctccagcggcgacgccctcttcgacacctccgcggcgctggtcttcaaggacaggtacctggagctgaccacggcgctgccgccggagggccgggcgtcgctgtacgggctaggcgagcacaccaagcgcacgttccggctgcagcgcaacgacacgttcacgatgtggaacgccgacatcccggccgccaacgcggacgtcaacctgtacggctcccacccgttctacctcgacgtgcgccacgccggcgccgcgcacggcgtgctcctgctcaacagcaacggcatggacgtcgagtacggcggctcctacctcacctacaaggtcatcggcggcgtgctcgacctgtacttcttcgccggccccgccccgctcgacgtcgtcgaccagtacacccagctcatcggccgtccggcccccatgccgtactggtctttcgggttccaccagtgcaggtacgggtacaagaacctggctgacctggagggcgtggtggccgggtacgccaaggccaggattccgctagaggtgatgtggacggacatcgactacatggacgcgttcaaggacttcacgctggatccggtgaacttcccggccggcccgatgcggcagttcgtcgaccgcctccaccggaacggccagaaatacgtcgtcattatagacccagggatcagcgtgaacgagacatacgggacgtacgtgcgagggatgcagcaggacgtgttcctgaagcggaacggcaccaactacctcggcaaggtgtggcccgggtacgtctacttcccggacttcctcaacccgcgcgccgccgagttctgggcgcgcgagatcgccctgttccggcggacgctccccgtcgacggcctctggatcgacatgaacgaggtctccaacttcgtcgacccggcgcccctcaacgcgctggacgacccgccgtaccgcatcaacaactccggcgtgcgccgccccatcaacaacaagaccacgccggcgtccgcggtgcactacggcggcgtgcgcgactacgacgcgcacaacctctacggcttcctggaggcgcgcgccacgcacggcgcgctgctcgccgacaccggccgccggcccttcgtgctcagccggtccacgttcgtggggtccggccggtacaccgcgcactggaccggcgacaacgccgccacgtgggacgacctccgctactccatcaacaccatgctcagcttcggcctcttcggcattcccatggtcggcgctgacatctgcggcttcggcggcaacacaaccgaggagctctgcagccgctggatccagcttggcgcgttctacccgttcgcaagggaccattcggcgatcggcacggtccggcgcgagctgtacctgtgggagctggtggcgcggtcggcgaggaaggcgctcgggctgcgctaccggctgcttccgtacatgtacacgctgatgtacgaggcgcacaccacgggagcgcccatcgc

SEQ ID NO: 33597 - DNA, 501 bp, Zea mays
  Clone ID: UC-ZMFLMO17141E07_FLI
cgtcgacgaggaggtcaccggcctcgacaaggccgtcatccaacctggcaagggcttccgcggcgccctcggcctcagcgagggagggccgctgttcgggttcaccaagtcgaacgagctgttcgtggggcggatggcgcagctgggcgtggccttctccatcatcggcgagatcatcacggggaagggcgcgctggcgcagctcaacatcgagacgggggtgcccatcaacgagatagagccgctcgtcatcttcaacgtcctcttcttcttcatcgccgccatcaaccccggcaatggcaggttcatcatcggcgaggaagaggaataggctgctggcctcggacatgagtcgtgtgcgtttacttttacctgtgactgtgagtgatcgatcgattgctgtgtatcaattactcgtgatgagacctcgaaggtagggtgtcgcgttgggttgtctgcttgtagaaacaagagcttatatataaattactactagctaat

SEQ ID NO: 33598 - DNA, 731 bp, Zea mays
  Clone ID: UC-ZMFLMO17141F10_FLI
ataatttccatgtacggagtaggcattcctactgaaagggcatatgtctacaagttggctccacaggcagagtgctatataccattccggattgacgcctcggctgatggcggggaggaaaacaaatgcttgaaagggggtgtttacttagctgacggcgacgaaactgttccagttcttagcgcgggctacatgtgtgcaaaagggtggcgtggcaaaactcgtttcaaccctgccggcagcaagacttacgtgagagagtacagccattcaccaccctcaactctcctggaaggcaggggcactcagagcggtgcacatgttgatataatggggaacttcgctttgatcgaggacatcatcaggatagctgccggggcaaccggtgaggaaattggtggcgaccaggtttattcagatatattcaaatggtcagagaaaatcaaattgaaattgtaacccatgggaagttaaaagaagtgccccaacccgttcattgcgttcctaaatgcttgcctgagcgcaactctggattttgcttaaatatcgtatttttttcacgcctcattcgtccctctagtaaatttacattgacaggaccccggtgcgacgcggatgttgtaccgtatttttggcattgtatattaaaatgtacaggcgtaagttacatttgctagctgaaattattgcagtagcttgccttttcttttgagcacggaagtgtgctctcc

SEQ ID NO: 33599 - DNA, 544 bp, Zea mays
  Clone ID: UC-ZMFLMO17150A03_FLI
gttgttattttagttttctttgttgttaatccaagcatgctgttgcaatcattgcttagtgatggaaacacctaatagctatctaattcattaaccttgtacggttgtgctcagggttccaccacatggctaacttgtagctaaggggtaccattaaaagttagccatattgcattccattagtggcgatgaaattctccaggctggcatgcagcacaaagccgaccgtggcagatgttatcggtatcgatgtaggcacaccgaattcatgcatctctgtactggaatgaaaggtgtgtttttaactcgttcatcctaaaatctgtcatattttgttgtttgtaaatgggttgttgtatccatctgtagtagatttcatgcttcaatcgctgaaattagtttgggccagctgctgtatcaatatgtacttaatgtcatggtttgaaatagctacgatttgagtaaattctgtattcttttttttaaatgggttgttgtatgttatgcttgaatgctgaaatggtttgggttagatgttgtctcc

SEQ ID NO: 33600 - DNA, 327 bp, Zea mays
  Clone ID: UC-ZMFLMO17150A05_FLI
caaaaagatcccagatgtcgctaacaagaagttccaagcgcacgggcatctgtttgagcaaaacaagaacagcgcactccaatccgttcctgacctaccagagtttgcgctgtcgctgagaccggatggatacgagttgccaatcactgattcgatctgggagaatgttgatggccaacctcagattcaaagcctcaaggagcatatgatagatgacgaagatgaagtaggcacaaaatgatagttctcacttccaaatgcttcttttcattgtaccaccaaaagtagcagatttcaaaaacgcttaatccaaaatgttttggattc

SEQ ID NO: 33601 - DNA, 952 bp, Zea mays
  Clone ID: UC-ZMFLMO17150A06_FLI
ctgtgataccagctgatttatttattctcttatttggaacgttatgacaacaagaagccactagaaagaataaaggaacagaatgcagtgacaccaccgctccatcatgtaggtgttattacaaatgttagtactaaccttttatgtttatatttgatcaaacctaaaatggctgactcattaaagaatgagaaatgacaaacttttgtgttagagggagtagataatggtgatctgtgcaagctaatctgcagtagtagtcaccagccgatgatcatgtgtttctctgaattctgaaacctaatcctgcttcaaaatggcatatataattcctggtcctctcgaaaaggcaatagaacctgagcttgtgatcttgttttaggagtagataatggtatataattcaagatgttaagtatatataaacatgaatcgtatatgaacccagtttctctgcattctgaaacctaatcctgagatgatgtgattgtgatccattgactggaggatccatgcaaatctcagtgtcaccttctccaacaggaaacaactgactgtttgttggtgtgcagtgttcttcaaactattcagcaactaaactgttcaaacatgttactgaagattggcagctgaaacacatgatcaccggctgaacatggtaggcgtgaaaaatatgatcaccgactgaacattttatgatcaccagctgaaacacaagatctgggaggcgtggaacatggtagctgaactcttcaaacatgttaggcaatagcaggcaacaacagtgaaacacaatcaccgattgaaaagctgtccggcacctgaactgcgcaaatttggttgcctggtggagggaggtctaacggctgacactgctattcaattatttttttactttagtttgtatcctccttacagatgttggatgaaagcaaaccttcattttttgttt

SEQ ID NO: 33602 - DNA, 535 bp, Zea mays
  Clone ID: UC-ZMFLMO17150B09_FLI
gagaataatgaaacaacagcaagaggaggaggaacggaagcgtcagcgcaaagaaaagaagaaagagaagaaaagagaacaggcaacccaacatgaacctgaggacgttgatcctgacatcgctgccatgatgggttttggtgggtttggttcctcgaagaagtgacagctctgtgttggccgcatccctttggtgaccttctgccctgaagatattgctcaaccccataaacacctgtgccatgaaaaatcgtttttgccagaatcctgataagatttgaacgaagtgcactggatgcaaggatactacgttttggcactgggatactgaactgcgtgtatgggagttgattatcaaaaggaatatctaagggtgttttggataaacctgtttatttgctacttcgggtgttcctgccatagaaacagctgatggtcgtgattatttgttgtggcaatgcagatgtgcgaagtggaacaaaccaaaagaattgccgtgtcattttctagaggaataaacttgtgtattgcagtt

SEQ ID NO: 33603 - DNA, 435 bp, Zea mays
  Clone ID: UC-ZMFLMO17150C09_FLI
cccgtcgccggcgccgcccgagcccgccacctcctcggactcctcctcgtcttgggccagcggctcgcacaagaggcggaagcgaggcgaggccgcggctgccaacatggccatggcgctggtgcccccgccctcccagcttaaccggccggcccagccgtggttccctgccgcgccggtcgagcaggcggcgatggctccgcgcgtggagcagctcgtcgtctagccatgcgtgcaacgatggatgcgccggcgaaagcgggggagggacagggcaaggtcgtgcgctgcacttgcgtgacagctccaccggatggaatgcgaatatgcgataaagctcgtgatgccgctgttgctctccgtgcaactggcgcaagtggaagaagctgtctctgtgtgtaatcaagtgtcttgtctgcggacgaattttcgggt

SEQ ID NO: 33604 - DNA, 2230 bp, Zea mays
  Clone ID: UC-ZMFLMO17150E02_FLI
catgagattaccatcatcggcaacgagtcacctgcaccattcatgacatttcagtccacatgcttcccatcagatattctaagggaggtaagtctacgcaatgcgtagcaatatcaatgtgcttttttggatacctttctgatggaaccaggtggccatcgtgcatccattgtatgtatgcatgattaaaccgagttttctttgcagcaggctcttcaagtcaacaatccaagtcgtggttcgacctgtttgttgtcttgtacagcctcctgcggtttgaaacagctccctattttgttcagttcccagctgcatgatgtttggcttggctttcgtgtaactaaaaatttgacatcatgagaagccttttctcgttgctatagactatagtatgaattttgttctaaacacagatataatattcagataatactcatctctgaaggatatctaccttttccaggttctgcaagcaggattctctgcaccaactcctatccaagctcagtcatggccaattgctatgaagggtagggatatagtagctgtggcaaagacaggttcaggaaaaacactgggctatctcctcccagggtttattcttctgaagcgcctgcatcataattcaagggaaggtccaacagtattagttttgtccccaaccagggaattggcaacacaaattcaagatgaagcaatcaagtttggcagatcttcaagaatatcttctacttgcttatatggaggtgctccaaaaggtcctcagctaagggagttggagcgtggtgccgatgttgttgttgcaactcctgggagattgaacgacattttggaaatgaataaagtgagcctgcgccaagtatcatatcttgtccttgatgaagctgaccgtatgcttgatatgggatttgagccacaaataagaaaaattgtgaaacaaataccacctagacggcaaactcttatgtacactgccacatggccaaaagaggttagaaaaatagcgtcggatttactgaataacccagttcaagttaacattggaaacactgatcagctggttgcaaataaatcaattactcagcatgtggaagttatcccacatatggagaaatcaagacgacttgatcagatcttgcgttcacaagatcctggatcaaaaatcataatattttgctccaccaagaggatgtgtgatcagttggctagaaacctatcacggcagtatggtgcttctgctattcatggtgataaatcacaggctgagagggattctgtgttgaatgacttccgaagcggcaggtgtccagtactcgtagccactgatgtggccgctcgaggcttggacataaaggacatcaggatcgtggttaattatgatttcccaactggtgtggaggactatgtccatcgaattgggagaacaggtagggctggcgcaacaggatctgcctacacattctttggtgaccaggattcaaagtacgcttcagaacttgtgaagattttggagggtgcaaaccagtctgtgccaccacaattaaaagaaatggcccttcgtggaggatatggtggaagatcacgtcgatgggcatcttctgatgactcttatggtagtcagggatatggtgctaaaagatcaactgatagtttcaagaacagcagcttcggcaaccaggccgggggtggttcaagctttcactcgagcttccataacagctctagtggcaatcagttcggtgatactacaagctttcatgccagctatggtaacagcagccagaacaatcagacgggtgacaatccgagcttcccacccagctccagcaacaatcagtccggggatggtctcagttttcatgaaaggttctatggatcacgcggaagggacgagagcagatcaaacaatgatggattccgtgctaggagcagaagtcctggcaagcctgtggaagtttccaactggtgattgcatccactaggtgcaatccaatttttgcgatggtgacgaaaccaagtaaaagatggtacctcgacaagttatattttcctcttatcctgcttaaatctaaggatgtcctggaacatcactaacttaggatatgggtgatggtctgatcccaatggacaatggtctcctactttcttgatttgacgcctgagagacgcctgattccataccatatgcctgtggttgtagtttgtaaaatgttaaaaacttgactttgct

SEQ ID NO: 33605 - DNA, 1493 bp, Zea mays
  Clone ID: UC-ZMFLMO17150E03_FLI
tcaaggatacagttgaaatggctgtcaaagaatggggagataaatcattaactgaactggaagcagaagagcggctgtcctattcatgtgagaagggaccaacacgtgatgaagtaatagcgaatttgagaaatgcatttgtgaagatagcagacgaatataaagtttacactgaggaggaaaagcagaaggtcattacagtaggtgggcttcacgtagtaggaacagagcgccatgaatcacgcagaattgacaatcagctccgtggtcgaagtggaagacagggggatcctggaagctctcgcttctttcttagtctcgaggataatattttccggatctttggaggtgacaggatacagggtctgatgcaagcattccgagttgaagatcttcctatcgaatcgaaaatgctaacgagggctctagatgaagcgcagcgggaagttgagaattacttttttgacatcaggaagcagttgtttgagtatgatgaggtattgaatagccagagagatcgtgtatatgcggaaagaagacgtgctcttgcatctgacagtcttcaatcacttattgtggaatatgctgaattgacaatggacgacatattaggggctaacataggacctgatactccaaaggaaaattgggacctgaacaaacttatagctaagctgcaacagtattgccatctgttggatgacttgacaccagaattgttggagggcaaaagctcaagctacgacgatttgcgggagtacctgcgtaagcgagggcgtgaagcttacttccagaaaactgaaattgtggagaagcaagctcctggattgatgaaggaagctgagcggtttctaattctcagcaatattgataggctgtggaaagagcatctgcaggcactaaagtttgtccaacaagctgttggtttaaggggttatgcccaacgagatccccttattgagtataaacttgagggatataatcttttcttagacatgatggctcaaatcaggaggaatgttatttattctgtatatcagttcaaaccagtagtgaagaaccaagaaggggaagcatcccaaaaggtgtcaaaaaagaaactggacaaaggagctaacaaacttggtgctgcccaagctgcgtcatgatcttcctgtgagaaacgttgctggtgcttttagttgcagtggctgcagtctccacgtgtacaaagatggtctatactctgtatgagaaatgtacttcatgcatggtatgagtaagctgattttggtagcttcatacaggggcacagccttccagtatatatatatatttgctttcttgagctattgatgttatcagcagatcctgtgcctcagcagattgttgttcatagtgcatagcatcgattttactagttgtacagaaatagaacacggtcaatgaaagagtctttgctcctcaacccacactttttcgtataataatgtaattcattcttatcggcactg

SEQ ID NO: 33606 - DNA, 832 bp, Zea mays
  Clone ID: UC-ZMFLMO17150E06_FLI
ctcagaacacctttgcaatgctatctacatttaatgaagttgacatgaccaatttgatgaagcttcgttctgattataaagatgaatttgtcacaaagcatggtgtcaaattgggtcttatgtcttgctttgtcaaggctgctgtttctgcacttcaaaaccagccaattgttaatgctgtcattgatggcgatgacatcatatacagagactacgtagacgtcagtgttgctgttggcacttccaagggccttgtggtgcctgttatccgagatgctgataccatgaactttgctgacattgagaaagggataaacaaccttgcaaagaaggcaaatgagggggcgctctcgattgatgacatggcaggaggaacattcactatctccaatggtggtgtctatggaagcctcctcagcacacctatcatcaaccccccacagtcgtcaattctggggatgcattccattgtgcaacgccctgtggttgtgaatggtgacattctcgcaaggccaatgatgttccttgcgctgacatatgaccacaggctgatcgatggcagagaggctgtattcttcctccgtcgcatcaaggatgtcgttgaggaccccaggaggttgctgcttgacatataaagttacttaccagtgctttcccgccgactgttttgtgctttctggaaataataccatgcaaatttttgactgatgaaaaagaattgcttcctcggaaagacgaattctgagctgaggatacagtgaggtttttctctataatcgtagaagagagcagcaaactcaactcaatgtgaggtcatgtttcattttcgggt

SEQ ID NO: 33607 - DNA, 1506 bp, Zea mays
  Clone ID: UC-ZMFLMO17150E08_FLI
ctcccccaactctgctgcttcccgtggccgtggttcaaaattcgaatccagaaagacttccccaagcattttccgtttctttaaaccgtcatcgtcctccctcgtgctagcctcgctcgttgcgcgttcaaatttcgaaccacctccgccttcgacgccccaaaccctagcccgacccctcctcctccacctgcgccaccgcccaccatgagctccgccgccgcgccagctgccgtcggcagcggcaaggagcttgccaacccgcccgccgacggaatcaccaacctccgcttctccaaccacagcaacaacctcctcgtctcctcatgggacaagacggtgcggctctacgacgccgacgccaacgtgctcaagggggagttcatgcaccccggggccgtcctcgactgctgcttccacgacgactcctcgggctttagcgccggtgccgaccacaccgtgcggaggttggtatttagctcgtccaaggaagatgttttggggcggcatgatggtccggttcgttgcgtggaatactcttatgctgcaggtcaagtcatcaccggcagctgggataaaactgtaaaatgctgggatccaagaggagttagtggaccagagcgcacccttgttgggacatatgctcaacctgaacgtgtatattctctttcgttagtaggaaataggttggttgttgcaacagctggaagacatgtaaatatttatgatctgcgcaatatgtctcaacctgagcaaaaaagagactcttctttgaaatatcaaacacgatgtgttcgatgttttcccaacggaacaggatatgctcttagttctgttgaagggcgagtttctatggaattctttgatctatctgagtctgctcaatctaaaaagtatgctttcaagtgtcatcggaagtctgaggccggcagggacaccgtttatcctgtcaatgcaattgctttccatcccatatatggaacatttgccaccggagggtgtgatggatttgtgaatgtgtgggatggcattaacaagaaaagactatatcagtactcgaagtacgcatcaagcatcgctgctctatcattcagtaaggatgggcatctgcttgctgtggcatccagctacacttatgaagagggagaaaaaacgcatgaacctgacgctatatttatccggacagtgaatgaagtcgaggtgaagccgaagcccaaggcattggcagccccccagtagtgctgtgacctgttctggaggctagatgacccgtacttctctgcgttgatgtcaattacattagttgacggagtgcttgtttgtgttgaaagagctgaaacgcctgtgtttcttaatctggaaccctcttctcccgttttacttgtccgtggaaacatttcatgttccagctggttgtatattccgaaacagaccatgttttagttcactcggttcttcgttgacttaagttatttatcaaatatttaagtatcgtacgtaagtttg

SEQ ID NO: 33608 - DNA, 1470 bp, Zea mays
  Clone ID: UC-ZMFLMO17150F02_FLI
cccgaagaaagtttcagcatctcataatgtatatgtgtctcctttgcggcaaaccaagttggatctactgctgtcaccaagttccaggagtttttatgcatgcattggtgaaggcacccatgcttatcagagcccatctaaggatttggctgctataaatagccgcctaaattataatggcaggaaagtaaacagtcgattaaatttcgacatggtgagtgactcagtggtagccggcagtctgggccagataaatggtggttctacctcggatcctgcagctgcatttagccccctttcaaagaagagagagacagatacttgatcaattataaatggtggcctctctcgtatatagctcacagatccgtgctccgtagcagtctattcttctgaataagtgggttaactggagcgatttaactgtacatcttctccatcagactgatgatcccatattcagtgtgctgcaagtgatttgacatatgtggcttatccttcagtgagatgaagaaaacctgaaatgctatcaccatttaaaacattggcttctggaagttcaggtgattagcaggagacgttctgacattgccattggcatgtacggtagtgatggcaggagacgttcttaaacagcagctgctccttcagcttgtaatgtctgattgtattgaccgagagcatccaccttgccttatggtactaactgaatgagctggtgacgctgactcatctgcataatggcagatgcttaaccatctttaggagctcatgtcatgattccagctgcaccgtgtgcaaatgtgaaggccctgcaagcgctttccaggccgcaccaatcctgcttgcttcttgaagatacatatggtgccacctaaataaaagccgtttctggttatgtctgtccttgacatgtcaacagattagtgttgggttgcaatcatgtggtgtttaagtcttggagaaggcgagaagtcattgctgccagcattgtgatcgtcaggcacagaagtactcaaaagtgacagcctacttgttgcgagcaaatggagggcgatataggggagctgcctgatcatttatgtcagcaggcaagttgaattcttgggggcctatgatgtgatcgatgaggatttcctcatccaaaacctctattggcagcacatgaatctgttgttgcatttcatcagacagctacagaagaagtacctcctatggaatcattgcagaagggacattcccctgaacttcataagcgcatcacatgcttacggccggccgataataatcatccgcgtggcgaattgaattggatccacggcatgcgaagggaggagccgagtgcgtagtagtagcacggctacaccatcctactggcgttgaatcttcgtcccatctgagacgactagctagctggtgcaatgttcttcttccaacatgtggcttacaaaagttgaatgaattctctgc

SEQ ID NO: 33609 - DNA, 1837 bp, Zea mays
  Clone ID: UC-ZMFLMO17150F09_FLI
ctttccctgccgggccccggcggcctctcctctcctcgcttgtccccaccaggcgccatggacgctggcgacgacgaaccccccgttctcctcgaccgcgccgcccgcgcctcccgaggcaagaggataaccaagctgctcgaggacgaggtcgagcaggacgaggctttctggaaccaagaagccctcaaggattttcgcgagttcctcctaccatgaggagaacgatgacaactacgtggaagagccggatgctggtgacgaattcgacagtgattttggtgaagatgaatctgaaactgatgatgagccggagaaggaagtacgcgagagattacctatcaagaaacggctaatgtttcctggcaagacgctgaggaagaccaacgtcaagaagaagaaggcgaccccaaaaccagaagatggcacaaaagccgacaagtctgctgataagccgagttcatccacacaagcagatcttcctgatgaactggaggctgagaaggccatccggaaatcaaccagaacgtcggtcatcgtgaggcaagctgaaagagaagcgatacgtgctgaaaaagaagcaacggccaagccgattaagagaaaaaaggagggagaagaaaagcggatgacacaagaggagatgcttttggaagcagctgaaacagagatcatgaacatgagaaatctagaacgtgtcctggcaagagaggaggaagtgaagaaaaaagctgttgttcataaggacacttatgagggtcctacaattcgttttttctcaagagatggggaatcacgtctggaattcataaatggagcatcatttgggtctgaactttgtacaacatcatctccttatccggagaaacctgtttgtgtggtgacaggacttccagccaagtatggttttctgacccctgtttatgatatcccttcctgttccttgcattcacacacgagtttcaacccctcccccctgttttgttgttcatatatgtttcattttaatacaagtaatagattagatagacacgaatccttcaatgtttagtagctgcattatctttgactgtggtttttatatgttctggatcactcagatcgtaccactaccagtgtgtgtatggtctggaaaccccgagacatcttgtggctttaattcttagatattttaccacgaaccatggaaacaagttcaagtgtgcctacctgacggttgctctttgtttagaaatctgaaatgctatggcagaaataaacctgaggcaggactacatatgcctacataaccaatttaattagtataataaataagcagtttacactagactcttgagggacgtttatgcttatgtgaggcttgcttcctgtagataccgtgatccgaagacagggctgccttatgcaactatggaagcatttaaaataatccgggagagtttcctgaaagaggaggctgatagaaagcgtccgaacatgtcgaatatgggagagcttttcgaatcaataactggtggacacttgatgcctaagaagagaagggttgagataaggtctccgaacatgttaggaggctctaggcatggcgggcgtacctggcgaatacctgcttttgatatggtggacgaggactaacgagacagatcccgtggctcccaatatgtcgaatatgagagatctttctaaatcaatagccggtgaagaggaagatggataggatgttgtatttagtgttagatcttgtgcttgtagttatcttaatgtatttttgtcagttgataaattcatggttattaaagtggtaaaacgttaaaatgttatgaaacaactttttaat

SEQ ID NO: 33610 - DNA, 1515 bp, Zea mays
  Clone ID: UC-ZMFLMO17150G09_FLI
ggcaaccttatttttgctgtcggcagattgataatggtgacatcaaaccttttgatgtcacacagctgcaaggctactggagccaggaagtacttaggaccatgttcaatgcaacttcctctctgaaggtgcgtttcaaggtccctaaatccagacccagttcagatggagggctgaagaggaagcgtgatgcattcaacgatgatgctaatccacagaagttcatttcttctggtgcttctacttctaggttttatggtgagaacatccaacaattgtgtcctggttgccatgtggaagtactctctcaagatagtggtataaggggatgttggtttagatgtttgattctgaagaggcataaagataaaatcaaggtgcgctacctagaacttcaggatgctgatgagactggaaacttggaggagtgggttatgctaacacgagttgccaaacctgatcaactgggtgtacgtttccttggaaggccaatggttcgtccacagcgcgtggaacaaagcaaggcctcatgctttgatgttggagccattgttgatgcgtggtggcatggtggctggtgggagggaatcgtgctgtaccaggtgggcagtgggcgtctacaagtttattttccaggagaaaagcgaacagctgaatttggtgaagatgagctgaggtgttcccttgagtgggttggtaacaaatggaatcctttgaagggaagaaaagatgtcacaagcaagctgacctccactgcagattgtggaagtgaatatttgattgcgaaacaagatccactgaattttcatgtgcctaaaaattcagaacctcaactagagggacatcaatatgacaagaggggtattgagaaatcttcagtcagcacaatttcacgagatcagaaacgtgtccttgccgacctgactaatgatttgaagttagataacttgaggtggaggccaagaaagaggagcagaagatctggctcaagaaagcagtcggacacaagcagtggaagcagcagcggggacatggacctgttcagccccagccccagtggaagctttggtcaacataatttagtgcctgacgaggagacatgcaagagcagtggagagcagacttttatgggtgtgcctgtgcaggttcccaatcttgtgatgtccaggtgaaagccatcttagcaccggttgaagattaacatgttagcttctggagttacaccgaccttggcgagatgtggttttgtgcatccccaggttatttttgccagcacaacccagatccagttttctgcagtttttttggaggctcatcagctgtgatcagttagatgtgaaaatgtctcaccaagaaccagtatacagtttgtatgtagggagagaagaaaatgctcggtttggttttggttttagagctttcagttttttttcttttcttttcaatcctagtctttgttgtttgaaggacaggtcctagatttgacatagcctctttacatcggttattctttcc

SEQ ID NO: 33611 - DNA, 1251 bp, Zea mays
  Clone ID: UC-ZMFLMO17150H04_FLI
aagaaaatggctacttctccagagatgctttgttgtttctgtccagctccattcaaacagtttcttgagattgtcacaaatatgaaatttgatgaagagccaaattatgccaagcttatctctatttttgatggtttgattgaagcacctgcgtcgagaccagtcagaattgatggggccctcaaggttggacagaaacgtggaagattgcatgcaaatctagaagatgaacaacctaaaaagaaggttagattagggagcccagcggctcaatggatttcagtttataatgctaggcgacccatgaagcagaggtaccattacaatgtggctgactcaaggctaagtcaacatatagaaaagggtaatgatgacgggctttacgttagttgtgtggcttcctcggcaaacctttgggcactcatcatggacgctggaactggtttctgttctcaagtttacgagctctcaccagtttttctccacaaggactggataatggagcagtgggagaaaagttactacataacagcaattgctggatcaaccaatgggagttcattggttgtcatgtccaaaggaactccttacacacagcaatcatacaaggttagcgaatcattcccttacaaatggatcaataaaaagtggaaagaagggttccatgtaacatctatggccactgctggaaatcgctggggcgtagttatgtcaaggaactcagggttttctactcaggttgtagagttggacttcctgtaccctagcgaaggcatccatcggcgatgggagagtggttacaggataacttccacagcggccaccaatgaccaagctgctttcatcttgagcatgccaaagcggaagccgatggacgagacgcaagaaaccctccggacctctgcctttcccagttcacatgtcaaggagaaatgggcgaagaatctctacatagcttccatctgctacggacgaaccgtgtgctgatagtcgaagagaggccgcgctgactcagtacggtggcttgcgtcaagagattagagatgtgagatgaacattaaatcaaaaccagttctaatgatgataggatcagtagatctgaagatacggtatggtatcctaccgtagctgtaaagaaatattgtaccacccagtgccggccgcgagaccgttactgccatgaagtgaagctaatgcattttggagtctcttcccgggaaaatggaacacaataatgctcatgtgcaagtt

SEQ ID NO: 33612 - DNA, 653 bp, Zea mays
  Clone ID: UC-ZMFLMO17150H09_FLI
ctttcatatattcaaggagttcttgctgagatattggagttttgtgatgggtacacgtttgatccaagctgatggggagatttggcgtgttcggaggcgtgttattgctcccgcactacatcagaagtatgtgaatgcgatgatcggtctccttggagaagcttcacaacggctctgcctacaggataagagaatctatatcaaatggcaaacgacgagagccccttatttgtgacaatggaactaacatgttcaagattccgtagcaaagcacggggcactatttattattgggcagctgaactggaatgctgaaccaaccattttttccttgttatgatgaagatattggatgcaaatcagaaatggggagtctgaaccagaacaaagatgtgattctcaccatggtttcaactatgcagtattcaagacgcccaacacctacaaattgttggagctggagttattacatcgaatggatgactggccaacatattgccgcttcttcgctacggaccctttgagttgtaagaccatcaatgagtatccgtttgagttgtaagactttgtgatattttctgaagatttgtataagtttgtaatttattgtgatagtcttagcatttaaatgatgcaattgatataacattatt

SEQ ID NO: 33613 - DNA, 1659 bp, Zea mays
  Clone ID: UC-ZMFLMO17150H11_FLI
tctgactttctgagtgtgtcttcatacgtcacactggaatagcttatctagagcaaagtgtaaagtttttgtgacaatgaatatatcagaattttaaagaaatattagtaattttacaattgatgaaactgccaaagtttgatgatttagttctcttctgcctatcttaagcaggagaaactcttttcaagcaggaacaggacagaagtctctcttggcaagaagctgaagttcacttatcttccagagattgaaaagattcacaagaagaaggagaagttgctaaaaaagcaacaaagagaagccatcctccttgacagctgcttgacagtgaatggattgacatctggccgctctcgacgtgaaagaaaacatgtgacttatacttttgatgattatgagcgttcaataaatgaagccataaaaacaataaggtaagtgtattttctgttctcagtagttccattgatttatgaatttataaacagaaatttacaggaaaaatgagaatgctgttgaggttggcccctccccattatgcaaaggattttatggagaaactccagagaagttgtattacaaagcaaaaacagatgaaggaaaggctgaaactctccatcgcagctacaggcagagaaaaagatcccaaaggtacacaaaggactatgttgaggccatatcagatattgacctagattttgacagcgatgatgatatcatgggtgaagcagtctatgatgaggaatatcttagaagaaggaaacgatacaaggcaagcctttctgaaaatgatgatgagtttcagttggatcaagtcgccaatgatggtgatgatgaagtgggtacttctttgaatgttaatgaagacacaaaagatctccaatggtacaaaagatttccacttctcacccctcaagggaccaagttgaaatctattgatgaaatccaaactggcatccgacgcagtaagcgctccacccgttcccgtattaactatcgacagcttgatacttttggcgcaaatacaaaatatggaaagtcagagaaatgcaatgcatcagatccggatgctagttctgatgcactaaatgatacggagctctcaacaagtcaagatcgagaggaagaagacggagtaaacaaagcacaacagcagtacacagagaaaccaatcgttcctgtcaaggagagtagaagtgtccggagaaaattcctcgtcctaaatgagcttgtgcctatagctggttttgatgatgcttcagtcttagtgaaagataagcacgtgaataacaacggaggaaaatgttctgcagcacattagggcgttggggaagctctttttttttggtcacatgggtagcaaatactgggtagaactgctcgcttaagcatggaccaacgagaatccaatgagatggtgatgcaacattggtcttgtttgggcagactgctgcttactacttccagtgtcatgccagcgaggagatgagatggtccatgggtgctgtgtggctgaattcccagcccataaagccaagtccctctctgatacttggaggtcttgctgagatgtgcactaggcacaccgcgtcgattggcgctgtacaattgtcacagctgtacgtgtatctcctccatgtatatacagtgattgggagc

SEQ ID NO: 33614 - DNA, 1977 bp, Zea mays
  Clone ID: UC-ZMFLMO17151A11_FLI
ggggtggcttggcttggctggctacaagtcactcaaattgaaataagactgaaacggacaaaggcaaacacagcaagcaaagcaggaatcggaggtagacgacgaccaccacggggataacaaccaaacctcccaaataccatccacgaacgaaagggaagggaaggtcgtttaggcggcgcgccgaggccgtggctatggaccccaacggcggcggcgacaccatcctcggcgatcccctccttcccctctcgcagtccagcaagcagcagcaggatcctctcgccggcgtctccgactaccttgggcggtccgtgcaccgcggaagctccgggggatggagatccgcgctcttcgtcgtgggcgtcgagatcgccggtagcttcgcctacttcggcatctctgccaacctaatcacgtacctgactggtccgctacgacagtccaacgcctccgccgccgcctccgtcaacgcctggtccggcacggcctgcatcatgcccctgctcggcgccttcctcgccgacgcctacctgggccgctaccgatccgtcatcatcgcctgcaccctctacgtcctgggttatggtatgctgacgctgtcggcgacggtgccggcgctgcagccgtcgcacatgccctgcagggaggatggcgtctcgtcgtcgtcatgccaacccgggtggccgcaggtggccttcttctacgtgtccctgtacctgatcgccatcgcgcagggcgccgacaagccgtgcgggctggctttcgcggcggaccagttcgacgcggagcaccagggggagcgcgcctcccgcgggtccctattcaactggtggttcttctgcatggccatcggcatctccgtgtcagtctccgtggtgggctacatccaggagtacgtcgggtgggggctcggcttcggcgtcccctgcgccatcgtgctctgcgccttcctcgtcttcctgttgggcaccccgacgtaccgcctgtacgcacccacgccggaagccaagtccccgttccgccgcctggcacgcggcctggccgccaacgccaacaaaacaggaggcctctccgcctcgcattcggaggaggaggaagcggcagcagacgcgcggtgcgtgctgcgcctgctgcccatctgggcggcgagcctggcgtacggcgtggtgtacgcgcagattatgacgctgttcaacaagcaggggcgcaccctggaccgccacatcggggacggccttgagctgcctccggcggcgctgcagacgctgggccccgcgagcatcctgctgttcgtgcctgtttacgaccgcgcggtggtgccggcgctgcggtgggcgacgggcaacccgtcggggctgagcatgctgcagcgcgtgggcgcgggcatggcggtgtcgctggcgggcgtggcggtggccgcgctggtggaggcgcggcggctggcgatggcgcgggagcacgggttggtggacgacccgtcggcgacggtgcccatgagctgggcgtggatcgtgccgcagtacgccatgatgggggtggcggacgtgctggccgtggtgggcctgcaggagctcttctacgaccagatgcccgacgggctccgcagcctggggctggcgctctacctcagcgtcatgggcatcgggggattcatcagcagtctgctcatctccctcatcgacggcgtcaccggcagcggtggcggggacagctggttcgccgacaacctcaaccgcgcgcacgtcgactacttctactggctgctggcggggctcagcgccgtcgaactcgcgctcttcctctactttgcgcgctcctacgtctacaagcacaagcccaattaatcctgctagtgcagtctgtacagatgaatggaaagcagatgcaggcatgcagcccgtcgtcttcatgttttacttgtccttgtaaaacaaggcaaactcagctcaaagtcaaattcagattctagccccc

SEQ ID NO: 33615 - DNA, 571 bp, Zea mays
  Clone ID: UC-ZMFLMO17151C06_FLI
atcggcctaggcactacactatattgtttaatcgtaccatatcggcactatacgacactaacacattatagtgctcgtgtgcaccattttactttaagaactcaaaaatataaacgtttataccattataaagtgaatttattatgtttaaaatcataccaaattatatgcacacatcacaatctcatctatatataccattggttggtctaaacagtgcctaatcgtgccatacccatcatatatcggggtggtagcccaagcacgaaactagacccgtgtcgtaccggcgctggaactatatgattcgtgcatgtgccgtgccgaagcactacatgtcgtgtcatgcttagtgacgtcctatttagcatgtctcacttggccatctatagttgaaaaggatccttacccttttcttattggtcgatcgtcctccttcagctagaaaggtagtattatataggagctctacgctccttgtggcttcctgtcgtgttgggcttgggtatgaatgtaaatggtatgtatattattctcgtttgtattcaaattggatccgcctaaaagggct

SEQ ID NO: 33616 - DNA, 3941 bp, Zea mays
  Clone ID: UC-ZMFLMO17151D04_FLI
tcatgatatctcacatccttctgagttccattgttgctgcaaccgggcatatcttcctgattactacagtttcagacccccattccctcaagagcttccaccccctcatttatactatcacgtgccatctccacatcatccaaatgcatgtccttcttactttgtcccatcacatccttacccttttgatcagacaccatatggttatgaaaagttcaagagccactgctgtggatgtccaactcatgtgtgccctggggctgagaagaacaatgtgaaaatcgaggaacaaaggcctgatgtcaagcttgagagcggtgagcacaagaatgctgatagtgacagtataattcaacacccaaacaagaagtatccattcatatggctgccatcaggcaatatgaaaggcaaggagaatggagagcattatgaattgtcacctcaggttttaaatgaatgggctcctgtgagtgggaagtggttaggggatgtgaagcaacaagggcaggataatgagaaggggaaacaattccagtggccaatagtttggatgccagcaggatatgatgcaccaaaccaaaaggctaaagatatgaatgacacagaagagaccccaaaatccccaaagatttctgaagtgtctcctcaatcacccaagatcattcctctgtcttggtttgggaatggtcatcatcatgatcagaaatcggctgccagaaatggttctggagaccacaacaacggatcagcagtgaagaaccaacctgtggttactgaccatcaagacagcatgatactggaaggaaaccctaaaatcactccagctgtgcccaagagcatacacgttgggaagaaacctccaagggaaaactgcaagaccattccagttgtgccagagaaagagattaatgaaaagaaggccagtacttacagaaccattccggtcataaaagaaagtgatgagaagaagattggcatgagggaaaagagggagtcaaaggaggccaacagtgctgaaatggttgaagagaacaggaaaacaaaacacaatgactcatcagtagttaagcattcaaaattgcccccagtatgcttacgtgtggatcccttgccaagaaagaaacctggaaatggttcttctaggtctcctagtccaccaaggaaggatactgacaacacgaagaaggacgtggatgaggcccagagccagatcctggagcctaaacagtctagtacaagtaaggatatcactgtgtctgaagtgaaagaaaaatcgccttatgaaatgaagaaggaagttgggtttagaaatgaaacagtggaagctgcttctgttgaacatctgcaggaggaagaagctcccacaagtaaagatggccaaaaggtccaagctgctagcactacagttggtgatcaagaaaatgcagccctgaatagcatagaggaagatcatgtgcaagaaaatgctggtgcaggaagcttgaatggatgtgacaaaagaaaaaatgaagatgggacagtgattgaaagtgaaactgcgaaagatgatgccagaacatatggagttaatttgtcagaatcagatgctgcagttcgtattcagtctgcctacagagggtatgatgttcgaaaatggcaacctttggataaactctggaagatcaagcatgtgcatgaacagatgcaagttgtgaggaagcagattcaatgccttttagattcttgcagtaagccaacacaaaaagagcaagtggccataggtgaaactattatgaatttactcctgaagcttgacgcaatccagggcttgcatccaagtgtaagggaagctaggaagtctgttgctcgagaactgatttgcttgcaggagaagcttgatactttatgcaaagcagcatctggagacttgaatcacacagatagtaatgatgatgaatctgaggggaccaagaacattatccaaactgaagctcctactgtaataactgaagcttctgatagacagaagagaactattgaactgggtaaggtacaagaaccatgttcagtggactccatggagccatgcaacacagttccatctggagtttcctgggaggtgaggccagatgtagacgctagcgaggagaagaatgaaaaacaagagtcatgtagcaccacagtggacgaagcgcacgaacaagtagcatcatcgatggatatgataagtgatgaagcttttacagctgacaaccaggagcatggaattggagaatcaaatgttacttcagtggaacaagtgactgaagaagagaaaccagcatctgaggatgaagtaaaagagccaccattggtgaactccacggcactattgtatgatactacttcatcaggggattccagtggactgaaacaatacacagcttcgaccgatcagaatctctatgctgaatcaaatacagggtcgtctcctgcatccactgaggacattgacataagtactctggctgtggaaagtgaagtggcggctgagaatgatggcccaattaacagtcaggtgcatgaaactgtagctctagaaaatgtggaaatgaaagatgatgtttcttctgctgaaaatgagcataacagatcgagcagccctgttattcatttagaggacccactagtgtctttgaaggatgttgagcagcatggtccaactcctactaaggactttgttgtacctaacacagaagaccaacaagaagccagagatatcagcttgcaggtacaagctgtggattccatgaaagattgtggcgaagtaccagatggaacaatagaggcttcgacgaatgatgatgaattagaactgggtacttctgcagatgtagaaaagaatgatcaacctaccttgctggaaccaagatcggagtctgtctctgtcccagaactgtccgtcttggatgaatctgacgataaaatgcaatgtggtgtttctggcaaggatgaggaagcacatgtggaggagaaaactgtaactattgctgttgacaaggtaacaggaggttctgcaaatttcgaggatcctctttgtgaggcatcgaggaaggaacctgacattgagaagagtcacccaagcctcggagaagaggaagacgatacaataggtggaacagtcttccctggttcaggtagctgtgaattatcatgtccacaggatggtggcatcgcagtctacgaggggcctgagatggtgtcaccagagagccaaactgatgctcggaaagaaaacatccattcagatgtcgctgagacagatgaatgcaccaagactcagaaggccgctctagcaggcacagagggagaaaattctgctgaagattctggtgtgccggtgtctgagatggacaaatgcaacgagatgccgaaggatgctccgacacttacagcagcaggtgcaaatcctgctgaagacgaagcttccctgaaagacctctctgtgcagacagagaacaaggcttcttctgcctccccagctcctgatgatccgaaggccagcgacgagaagacgctggcagaagagaaccagaagctgaaagagcttctgcaaaagcttctggcgtccggcaacgatcagatgggggtcatcacggacctaagtgagaaggtcaaggtgctggagcggaggctggcacgcaagaagagaccaaaggtgagggtgcacaagccatccaggcatgcttcctgtgtccactgaaaggataagtctgtaaggttttgaggttttatgttgtatggatccccatgttgcttcctgtgtccagctattgtgcactgtgtaggtatagccatgctgtggcactgtgcttcgtcttggacaacacaaggtgtggcatgttctgtattttatgtctgtataatgcatccaactacatctagtgttctgtgagcaattgattgggacaaatcgatatgac

SEQ ID NO: 33617 - DNA, 943 bp, Zea mays
  Clone ID: UC-ZMFLMO17151E05_FLI
cagccgcttctgctgccgccgtcacctcccaccagcagcagcagcacgtgtaccgccccgtgccgcgcgcgggcggcgtggtcatgctaccggtggcgcctcttgcaccgccgccgccgccgccgccgccacagcctccggcgacctccttatcactgtccctctccctgcccgggctggacggccagaagcccgaaccatccccagcggttctggcgccggcaccggcaccgcctcaacctcctctgcagatacagcagcagcagccagctccacctcagatgccgccgtcacaagcccaaccgagcttgccgttccagctgcaggcggctgcgacgaacctcacgtcgcagcagccggcagcagcgccgttcagctcggagttcctgttgttgatgcaggagatgatccggatcgaggtacggaactacatgtccgggtcggggctcgatccgcgcaccgacggcgccgccgtgcacgccgtgagcaagcgcatgatgggtatggccaagatcgagtagtttcagcgcgcatgcacacagcggcagcagcaggagtggaagatacaaaagaaaacgaagcgccgatcgatccgcggcggccagcgcgtgtatgaagtagtaatgaaccagcaagaacggcgtggccttgaaacatacggaggccgtgtggtgcggcaagtgaacagctccatcattcggctttttagctcatgacaatatcataccctttgttaatctagccgtttctctatcttttattcttcttcttccccctttttttttttttgaatttttgggtctccaagcaagcagagacgaagacgaagagaactttgtctgttgtctgcctgcctgccactttggaggtaagatgctacctgaataaactgcagagcaaaggatccttctttcattgatgctggtggtaaccagtaatcagt

SEQ ID NO: 33618 - DNA, 705 bp, Zea mays
  Clone ID: UC-ZMFLMO17151G04_FLI
aaaagttggtttgcctgtggacagctcaaacaatctgtctggattcatacagagtcccaatcctcatggacatgctacaatgatgccaggcaactctggctccatccctatccagaactcactgccacctgttccatctatgcaacaattacatgccaatgtgccagtgtcaccaataggctcgctacctgcaaatccattcaatgtgccgaccagtgctcctgtactttgtaacagcacttcgcctatgctgcccagtcatgctttggtcaacccagctcattcttccatgccaatgagaccgttcattcctccacttcctgaaggtcctccaccctttcagcagcaaacatcaagtgctgtcacagtgcagcctttagatccttctagccagcaatctagccaacaactactggctcaggaccttgatggagatcctcaaaaacgccttcaagcaacactgcaactggcagcaaccctgcttaagcagatacaaaatcaatcaaatcctggtggccagaaataaatataaggtattggtaaatgtctagctgcaaggatcatcatatggtgccatcctgaggagctttaaacttactgttgtggttttataccatcacctcctgtgatttgaatgtttatgatgagtggtttccttgcaaactacaatctccattccgaattctaagacgttttggctttctt

SEQ ID NO: 33619 - DNA, 2913 bp, Zea mays
  Clone ID: UC-ZMFLMO17151G07_FLI
ccacgcgtctggttcttaccagtcctacagttgcacaagtttcaggctatggcccacttggattgggtcctagatggattgcatattctgggaatccagttccggttccagatactggacgtgttagcccacagcttcttagtctatctccctctgttccacctcctggttcaaatggtagtgtggtggcatattatgcaaaagaatcaagcaagcaactggcagctggcattgcaacacttggtgaggttggatataataagctgtccaagtactatgcagatttcattccaaatggtaatggtaccataaagcaaagaagttctggttacaaagcaaatggtgtaacaaatggccacctcattgacagtgaatatgctggaacggtacagacctcttgtacatattttcatcgttaattctgttatcctggagttggcaataaacttgattaacattgttgctagcattaccatgtcatctctgtatactagtattagtaagaactaaccaaccctaaggctgtcagggaccacggaattcacctggccagtttgctaacaatttgatgatcttgctattcttcctcaggaattggccacggctgatcttctgtctcctgcatttgtatacacgctttacagaaatatatccgtggcagattgtgtacttcattttacatgcctgccattttgttcagttgtttgctttcagccaataaagtgtgaacaatattatccatcgaaactagacgagatagtatagcaggtaaggtgggtaattagttcttcatctggatggaatggaattcaaaagtagagtagcctaatggatgcggatggatggaaattttcttatctccgtgattaagtgttcagtgtatacaaatggttttttgccattacaagttcaattaatatgatcatgctgtatttttattttttttctttacttatctcacatgattttgatattgcaatggcaggtcatagttcgagatattgtctctaaattattgatagttcagttcagggcacacactagtcccatttctgcactttgctttgatccaagtggaactttgctggtgacagcatctgttcatggtcaaaacatgaatgttttccgcattatacctccacatgggacatcagaagctggtcaaattggaacctatgttcatctgtacaaactgcaaagaggcataaccaatgcgatcataaaagacatcagctttagtgatgatagtgactggataatgattagctcttcaagaggaactagccatttgttttcaatctctccatatagtggatcaacaagattccgttacagtgataacaaccctgtagaaaatgattacacagtggattcatcagttaatcatactgctcattggtcccaaaattcagcaacctctttgagtctgagtcagaagactctcttcgtatctggaccccctgtcacattgtctgttgttagtaggataagaaatgggagtaacgtgtttaagggtgctgtacatggtgctgctgcatttgcaactggtgcttccactccaatttctggtgcgattgcttcaacttttcacaaccgcatggctggtgacatcgattcagatggcagtttgcgcatgaagtattatttactagtattttctccatcaggaagcatcatacagtatgctctccatctctcagctgaacaggattctggattggatttccggacaagccccatttcttatgggccagagagagaaactgatacaaaatttgttattgaagctcttcagaagtgggatgtttgttataaaagaaatagaagagacagtgctgagagttttgcatatagtgattttgagaatggagaaaataataaacttttgctgaaagctatgtggaaagggactagtatctacccatttgactgttctgttgaaaggcaaaagctcagtgctgatgaaaaccgtaatctctattctcagagtgagttgcagactcatgttgtgcaaactccactctggtctaaatccagggtattttcttgcaccattttctgtttcaatgctgcatttatattttatgtttgattgacatgctgggactcataaagtgcaatgcctgcttattgactgatgccagatacactttcaagttatggagggtgaaactttagaagcagacaatgctgatgtaatttcaggggaagttgaagtagaaaaagtccagacccacaacatagagtcaaggtcaaagaatctcataccagtcttcgactccctccatacatcaaggtttcaacagacaaggttgaacgctcctgataacagcaggtgcgggctgctgcagcgacagaaatctgggatttcagaagatggtagactctctcgcagaagcagctgtagttctttggactgcatgtctgaagggcccaaaagctctgatgacggtgctttcagtaaatatgtagtagatgataacagttctgctgtaattaacaacccaagtgttaaatttcatgccgagcttgtaaataatactgggagccttaagtcagaggcccagctcggatttgtaaatagcgaggaggatggtggaggtggagagcaactcccagacttgtgatgttgactatgtcaagatggtcgatggtgatggaggagcctctttaatcgctgaagtcttcattgtgcgtgtgtagctgaattctttcatttctccatcctgagttctttacctctcttctatctatagttctattcataggcattcatgaaaattttaccgagagaaaagataggaagggaggtttaattctggccctatgggtgtggaagctttggtgatgttagttcgatatcttacaagttgtaaataacatgcaataatagcacgtaatttgtgaatattt

SEQ ID NO: 33620 - DNA, 575 bp, Zea mays
  Clone ID: UC-ZMFLMO17151G08_FLI
aataaatagtttgagccacgattacatatataataatctcagaacaaacaactatcgaaagggcatgaaccgacaggttgatttcatccccaggagataattggtatctatctatggctaaaacgaacaacaatatcaggcgcgtgcatccagctaatttctcccgaaccggacatgggtgttgctggcggcggcggcgaatcttgatgacgagaacccatgcttcctggcgctgggtgaataattccagttcggtgacatggtaccatggctgtgccctcgtgaagactcgggagtgaagtagtcacagccagacaagaattggtgattcggtgaagacatggtaccatggtagttgtgccttcgtgaaggctggggagtgaggtagtcacaaccagacaagaactggtggtttgcgtaagacttcttgggagtagatggagagccccacccattggatttgtacttcttcaatggtagatcatctccaccagtccagccacccctcgatttgggtttatgacgaggtgtgcccactctttcctcgagatgggggcttttccttttgcttgttt

SEQ ID NO: 33621 - DNA, 1198 bp, Zea mays
  Clone ID: UC-ZMFLMO17151G10_FLI
aatagatgcatgtaaacaagagttagttaatcgctccatgagttctgtttcagttaagcaaagtataagtgccatccgccctaactcaaaagtagatggcaacagaattgcaccatctaaaattatgtcagttgtgaatgaaagttacaggagcacagtaggttgtggtcaggctgaggaagacgttggtattcagcaagagaaaaagcacagctgtgcaagtgagcatggaatggttaatcttcctattaactgtacatcctctcaactaggtgcaccaggaattccaaaatttgggaaagattcagtgaacctttggactacagatgcattagaactatcaactgaagggatgaccccaaagattggagctgacagtactgacaggagattacgaagtggcaaaattcttggaatgccaagtggtggactaatgaatagaggccacaagctgaaaaagatccagcaggaagcatccagtaaacagatggttaatcaaggggctacatccactgtggatctgacttctcatgaaaatgatttttcagcagctgagattgtcgttgaagaaaagctggaatcacatagttcatgccttaaaggacgaggaggaccagcgaagaggaagagggagagatagtaggattcagcgtgtctcttttcgagctggatgtgaaccgtgtttcagtttgtttctcggcttgagtagctaacttatgtagatggatcgtgtgtgccagtttcacgagcagatggtgccactaagggtgtgtttggtttgaggtcaaagtggatgagtcggggacgacattgttctctcgactttttaggatcacgtcgccactaaaaactacttcgaggtttacctcgctcatacgggtttacctcgctcatacgtgaccctcgtccaaacactattgtaattgtggtcactctattccatccctccatgtacatccaactaaacacaccctaatttgcacgccttacctctcagttactacccttaggacttgtttgggagcgaagatactggagaggattgtagggactgaaattaaaaaagggatttgagctcctcgactccctccggtattcttgcttccaaataagcatttagtgagtcccggactcccaactatttctagtataattaaccttgtgcattgctgtgggaattcaagaatttatttctccc

SEQ ID NO: 33622 - DNA, 1356 bp, Zea mays
  Clone ID: UC-ZMFLMO17151G11_FLI
cctgaagattcattttggtgagagcagcatgcagaagtgtgagattatgcttaatgacttgattgactcgaagagaaccaattcgaacattaaaacatctttgctgaagtcatctcaaactgttcctgggcaagaggaggcagaagtgtctcatgatgttttggatgccactataatatcatctaatttttggccaccaattcagatagaagaccttgttgttcctgcttcagttgatcagttgctatcggattacgcaaaacgatttcaccagataaaaactccacgaaagctattatggaagaaaaatcttggaacagttaagttagaactgcaatttgacggaagaagcgtgcaatttactgtagctcctgtgcatgctgcaatcataatgcggtttcaagagaaatctaggtattcaaagaactgtattattgcatgtatcatttgtactcttttgactaaatctatcgaactttctagttggacttcaaaggcacttgctacagaaattggcatacctatggattctcttaacagaagaataagtttctggacaagcaaggtctggcacacatgtatcagcggataattgttgctttattttttttatgtgaaatatgcttgtcatcatgcagaacatgctaacatgactgttggagcataatcattattattgtatattggctgttgctgatagcttctgtgatgtgatgatatagggggtcctgactgaatcagcaggaccagatgccgatgatcgcaccttcactgttgtcgatagcatgtctgatgtcaacaaggacagtattgtgaatgaacgcatggcagagtatcagatgactgaggaggaaggtgaaagctctgtggcttcagtggaggaacagcttaagaaagaaatgacagtctacgagaaatacatcgtcggaatgctaacaaattttgggagtatgtcgctggacaggatacataacactctaaagatgttttgtattgccgagccatcgtatgacaagtcgctgcagcagctgcaaagttttctttctggtctagtagcagatgaaaagctagaaacgagggatgggctgtacttgctaaagaggtagcagccgtttctatactaggatagtgggttgttagactagggttgtacacttgtactatttgctaatgagttgtttagactagagatgtcaggtaatcagatataacacacttcattatcaaagctatgttatcgggttcagaggcagcttacatatcctatctcacatcctcctttattttaaacttcattatgtaaacaatgactatgaaggtgttactatggaggtatttgagatggctctaggttct

SEQ ID NO: 33623 - DNA, 1621 bp, Zea mays
  Clone ID: UC-ZMFLMO17151H06_FLI
atgatttaatcttatatatatattatattgatcaaagttaaaatagtttgatttaggacaattttaaaacaactaaattatgtgaacggagagagtattcactaattaatgaccgaggccgacacgctgcgtataaataggatattattaccttttgacacgtacgatctgctgactactactagtaatcttacggtactgaggacggtgtgatcgcagtgttttctctacttttctcaacaatacaccgggcatgttttttgtgtgtgcatgcatcatttcacgcgcaaatacattctactctaaactcaaagtaggcagtgttcacaagaatacaccatgtaggatagaacgtatgttgcaatttattaagggccatgtttgttcatcagaatcgacttctagcagtcaaaggtacgtttcgtttttcagcttacttctgtaaaagtcgtttctacgaaaatcgttcaaatcaacatgaatataaagtctatcgagccatcacagcgggtggaatcaatccaccactcttaaaccctaaaccgtggagacttattcatctttctccgcatgtaagtcttatggaatctagattctagtgacatatagattatctagaaattctggttcttagaaaaagctctctgaaaaaaattgttccaagcatgcggaagcctcgggctataacaaccttagcgaatcaaaaaatacattttcaaaactttcagaacctagatggtaccttcaaacaactttaagcattactaatatataaattttacttttatatttttagcttcttggaagttatttctggaattttttaaaaaccaattaatagctggactgtttattttagcttctcggcacatcaaaaatggaatatctgttagaagtcaactttctagtctttcaaaatccaactcaacagtccaaccgtttatttcagcttctagtttatcagcgcgcgcttaaaatcaacaaaatgtaaaacaagcaggccctaaaagcagcgcacgccaatagtaatttgtttcacatttcgttcggactctacaaacaattacaagtaacgtgataataatgaaatgatgggtacaattttcattggtgagaaaatggtctcaattcggaacaaactaatttatcgcctacactcttacacgagctagaattttttataagacaagtattcaaaatttgtgaataaatttagtacttacatctaatcaaaatcactcatctttattgttgggagctttctccttccaaaagtcttcaaaaacataattaatcaatgtttttagcataagtcattacaggaagcttcgtttttagaatgcaagcctctttctcatgatgaagacacacgaaatgaagatcagatctaaaaaggataagaataaacgccgacctattaacagatggacaacttcggctcataacggagatgaagtataatgatgatgctgacccgaaagaggaaaaaactacttagtccttaatgatttgtattttgatcatatataaatattgaggacataaatatactttcacccgggttgcgtcccgtgcctttaaatagatgaacagtagcaccgtactgttcacgctgaatgat

SEQ ID NO: 33624 - DNA, 1528 bp, Zea mays
  Clone ID: UC-ZMFLMO17152B01_FLI
ctctccttccttccatccattcctccctgtctccgccctcttctgactcccgtaggccgtggtgccgccgccgactgctgggactgccctacaccaagtgcccaggtcatcttcgggccattcgccggcgacgagcaccaccaggtgtgccaggttgaccgagctatggacagcctgtggcatcttggggacgagctccgcgggcagcccaaggtggtggaggaccgccagtggtctctcatgacgtccaagctggcggagatcaccaggtccaagggcgagaggatgaacaccgtccctgacgccaagcagtgggacaagacgtcctaccagcttcacgacgacagcaggatgggccacatcggcctcatgaacctggatctcaagatgaacgaggctgccgccatgaagctccccttccgtggcatgccgtataacatgaaccagatgtacctcaaggggagcaatgccaattccaatgtcaatgcgttcaagatgaatgttggagtcaacaagtactccaatagtccaaacgggaaagacgccaatgggaaaaacaatggcggcagtggcggcaacaacaacaatgggagcgccaacggcacttctgtggctgacaagcgcttcaagacattgccgacgagtgagatgctaccgaggaatgaagtccttggtggatacatctttgtctgcaacaacgataccatgcaggaggatctcaagaggcagctttttggtttgccagcaagatatcgtgattcagtccgagcaatcactcctggcttgcctcttttcctctataactacacaacccaccagcttcatggggtatttgaggctgccagtttcggtgggtccaatatcgatcctactgcatgggaggataagaagtgtaaaggtgaatctagattcccagcgcaggtgaggatctgcattaggaagctgtgcaagccgttggaagaggattccttcaggccagttttgcaccattatgatgggccaaagttccgccttgagctctccatcgcggagacattgtcactgctagacctatgcgggaaggaaggcatctgagctgtcgaggaggtggtggtggttgccttgtgagcttctagtaaataccaatcatctttgtatgttttgtggatggtggttggcaacgttgtttatttatgcgcaagctgctggtggtttcgggatggaaggaaggacctggtccctgaaacaagctgcggagagtgagcctgtcagtgtattgtgtctggcgtggtcaagaaccaaatcaatgttggaccgaccgactgagagtttggagtgtgtatgttttgctattactcttatctctagtagagtgtgggtatacctgggcagaatgtgtccccaaaagttgggggcctgtctgtgtactgtgtgcgatggacgccctaagtaaaaaaagggcaggtgatggtcgtgctccaggtttgtgttttgtactctgttgtaccttgaacctcctttgcgttttgcctaatcagagaatgaatgc

SEQ ID NO: 33625 - DNA, 919 bp, Zea mays
  Clone ID: UC-ZMFLMO17152B11_FLI
acggatcctatcggtctctcctctgtcctcttcagtctccacgccgttccagaagtcgccaaccttccctcgccgccgcgccgcaacagccgcctcccctccaaggtagtccaatcgaaaccactcgcccgaccaccatggcctttgccagctcgctgcttcccgtgccgccctcccgcgtctgcgcgacccccgcgtcggaggtcgccgccttctctccggccaagaagagcgtctcgctcgccgctgcgcgccagcgccgaggatcccgtcacggagtgagggcagaagtaaatgaatctggaagtgttttggctgttgatgcactctcgcaagttaaacatgttctgcttccagtccttgatcgcaacccttacctttctgaaggcacaagacaggctgcagcaacaacagcttccctcgcaaagaagtatggagcagatattactgtagttgttattgacgataaaccaaaggagtctgtcccagagcatgatactcaaatgtcaagcattagatggcatctctcagaaggcggattttcggagtttagattgatggagcgtcttggggaagggcagaaaccaacagctatcatcggggaagttgctgatgagtgggacttagacctggttgtgctaagcatggaggcaatccactccaagcatgtcgatgggaatttgctcgctgaattcatcccttgccctgttctactgctcccgctctgacatagagctgatttgcatctgtcatgtttttttgagacaaatgatctgtttgtccttgaagatgtaactcccgcatgttccctggatacgaggggtttgcgtcagctgatgattctattatgttgatgcagtttttttcgaatttgtgtgcctgtgaatattgctaagaaaattatgttactcttttcttt

SEQ ID NO: 33626 - DNA, 1845 bp, Zea mays
  Clone ID: UC-ZMFLMO17152C04_FLI
aggacatccgccttgttcgggataagtttactcatgtgtctagaggttttgccttcgttcatttccattcggtggaagatgctacgaaagctctggaagctacaaacgggattacacttgagaaaaacggtcaggttttgcgtgtagcatatgctaaaagtacacatggacctgcatcagggggttctcagtcaaacagccttgctgcagctgccattgaggctgcatcatttgctcagcagtatgatgccataggttgggctccaaaagagtacaatcctgatgacaaacagaacaacaactctgaatctcaaaaagatggcagcacagcacagtcgggatttgtttgggatgaaaaatctggttactactatgattctgcatctggattctattatgatggaactactggcctttactatgacagcaactctggagtttggtattcatatgatcaacagactcaacaatatgtcccttgtaatgaccagagcaacactaaggcagccggggaggcggccagcgaaaacacgaaaacctcagatagtaatagtggcaaaaaggttgtgatctctgcgcctgctgccacaattaaacaaagtgagaaaacttcacttcctgacgctgttcaagctgctgcaaatgctgcactggctgcagaaaagagagaaaaggagaaggcaaaagagattaaattggcctcaaaaaatagtctcatagctaataagaagaagatgagcaatgtcctagctatgtggaagcaaaggaatcaagaagggcaggccgcacgaattgtccttgatgacaaagaaccagcaaattctgatgataaatttagtcattcacgtagtggaactggattctctttgaaaagcaagccaaattctgaccttgaaaatgctatgggcaattctcttggccaaggaatgacatcgactcaaacattggattctgttgtaaagcctagacctgtcagtaacagcttagggactacagttatgggtgtcataagaggttctgctagaggagtgatcaagtcagatactacgtttcacgcattatctgatgctggtagcactgattcccgcaccactataaccacaagagcaagtgggttaatgacaagttctgaggcacttataactcctgcacccttcaaaactgatgtgtctgccttagtctctaatactccatcgggagtttctgggagtggtaaacgtcggttttctgaggcaccgggacaatcccagtacagggatcgagctgcagaaagacgaaatctgtatggatcatctcatggcactgatactgttggattggattcaactggtgactatccgtcccgaaagggttcaagtgagatagggtcgatgccgtttcctcctggtgtgggtgaacgttccagtggtgaaattggcaacagcgaaaactatgaagttattaccgctgatagagcaatcgatgaaagcaatgtgggcaaccgcattctacgcaacatggggtggcaggagggactgggtctcggaaaggatgccagcggtatcaaggaaccagtccaggcaaaatccgtcgacgccagggctggactgggaagtcagcagcggaagcctgatccatcccttgaagcccaagccggggacagctacaaaaccatcatccagaagaaggccatggcaagattcaaggagatgtcttagctacactgttttatctattttattgctgcattttgtagtccgtttttaacagcatgcatttttttgtttgctcgtgtgttttttaaataaactgagccgctgaattgtgatttattatcctgaaaggggcactacatagttcgagacc

SEQ ID NO: 33627 - DNA, 2077 bp, Zea mays
  Clone ID: UC-ZMFLMO17152D09_FLI
tgcctctccaaatgattggtcaacctgagggttctgaagcaccaggtggtgcaatcttgagtggggttcagcgaagcgacaggctcgctcttgctgatgataaggatgtaaaatcagaagacagggaccctctcacatttgaagcgcatttagatggtgggatatctggtttagatcacgctactgagtttatggacttcccatatttcactaatagtgaagaccttgatatcctgaatagtgaaaatcttttgaattctccaagtgagggaatccaggaggatttagacgatactgcattagttgttcatggggttagatcaaccatgcaaaatctggttcatgctgatgaagccaatatgtcctgtgatcaaatagatcttggtgatgtgaaaaataatgtagatgcttctggtataatcttatttcctacttcattagtagtgccctgtcctggcctgtatgttgagtgcaaattgaacacagaagatactgaaattccttgcaacgatgatgtttctacaccaacagagtatcctcttgaatgctgtacttctacctttgggcagaaatctgagaatactatctattccgtctcccctgcaatcagccctccatcaattgctgaacagcccaacccatccacttcagaacaaaaagaagattcagtggctcatgacgaaggtggtgtcctaggagctaaaccatcagaaggtgctttaacaattggaggccttttgcctggtaacattgacacaaatgatgcaaacacatgcatgctagctttgccttctttcagcactgctggatttggtgaaggatcaccttgtagtttaggaccacacgagagctttgataactctcatggtttgactttgcaaaattcagttcaagctcctgatcagatgcaacacaactcacttgatggtaaaccagaattaggtgacaaggctgctctacagaactgtatgccatcaaatgcactgcccgatttggatattcagaacactattgcaaatgcgccaacaccagctcaagcagaagaatgccctgactatgaaaaagatgttccaaattactatgatctagaagctttgattcttgaccaggatcttatcccgtgggaccaagactccgattttatgcatcctgaagttaccggatttcctcacccggaaagcaggaaggcattgattagattggagcaaggtgctcggtcttatatgaacagagctatcatgtcgcatggtgcctttgcagttatctatggattgcacttgagatgctacataaaggatcctgaggttactcttggaagagagacagaagacattaaagttgacattgatttaggaaaagaagggagggcaaataagatatctcgccgacaggcggttatcaagatggatgaatctgggtattttcatattaagaacactggaaaatgtccaatctttgttaatagcaaggaaataccaagctgcaaacgcatcaacctaagctcagactcattaatcgagataaaggacatgaggtttattttccacgtaaaccaagaggctgtgaggcagtacattgatcgtgacctgaagccagaacgctaatttcccctggctttccagtcagcagcagcctgtgagtgactgcctcattaacagcaatagaagtagcatagcagtaaatttgagtaagcattgctcgtttaggatgttccttcatatgatgttaacaagttaggttcacttggctccggtctgtaaatggttgtagtttgttgcgttttctgtctgtttggcgggcataaatcatgcatataaccagcgcatttgcttccagtttgtacctacactcccaggaatgatttcatttgtaatactggcaccctagattgtggtgactgccgccaagagcaagaggcaaccaatgcaataaagtgcggaaaagaatcaatagaagggtagattctagggtagaacaggaggagggtgcacttgtgcaagaaaccattcggttcttgcgacgctataagcataaactttattggtttttatttatataccctgatgatcttgaagcc

SEQ ID NO: 33628 - DNA, 2282 bp, Zea mays
  Clone ID: UC-ZMFLMO17152E11_FLI
ggctttgacgcgaccggcacggcggcgacgcacagcccgacgacgaccctccccgctgccttctccccgggcatttgctggagctggaaggcggaagcgttcccgttggattacttcttgggctggaaagagtgaaagacccggatgcactaaatcctgtcttggaacagttacggccctggaattgatcccatgctgccgaacgggccctaagttggaacctgttcaggcggggggtcagctcgcagctgactggggatccggcaccgcatcgccagacgccaggaggggactatcagccatggcagcgaggcagccgccgccttcgtccgcgtccgcgcccgcgcccgcggcgggtctctccatgaaggactacctcaagaggtacgtgtcgggcccagggaccgacggcgaccagaagagggcgaagaagaagacgaagaagaagcccaagcccgccggcggggtgctcatcgtcgacgaggacccagtgtggcagaagcccgtgcaggtggactaggagcccgcgtcgtcaggtgacgacaagcctctggtcgacgaggacatcgaggtcaagcggatgcgtcgcctggaggcaatacgcgccgcaaggccgtacaatgctatcgccgaggatggcagcgggtgggttaccgtggccgccccagaggagcagggcggtgggtccacccaccagcgcaggaacgacacgccgttgccagagcggggacgtgctcctacgagggaggacctttctcctgtgcggcggaggcagcggcgcgacacgccctcacctgtgcatggcgatgctgctgcaaaggatttttcaccacctaggcggccctcacctgtgcatggtgatgctgctgcaaaggatttttcaccacctaggcggaggcagcggcgcaacacgccctcacctgtgcatggcgatgctgctgcaaaggatttttcaccacctaggcggaggcagcggcgcgacacgccctcacctgtgccggacggtgctgctgcaaaggatttttcaccacctaggcggaggcagaggcgtcaggacacgccatcaccaaaggacagtggtgcagcggaccaggacgatatgtcaccaccgcggaagtctaggcagagagaggacctttcgccgccaaggaagggtgctcgtcatatcactgaggagccccgggatatctcgccacgaaagaagagagacatttctccctcaaggaagagtacaaaggaaggagcctcaaaacaggtgaagaaatctggactgatgacagcagaagaagttaaagaggacataagaaagattaaggaggctgagatgattaagtttgcatcacaggatccttctctggttgggaaaggggcaaaggcagtattcagagataaggaaggaagacgaataagtgaagaagaaatgtgcaaggcaaaggaacctgagaagccaaaggaaatacatatagaatggggtaaagggttggttcagaaacgagaagctgagtctaggttgaaagagattgaagctgagaagagtaaaccttttgctcgaacaagggatgatcctgagcttgataatatgctaaaagaaagaatccgatggggtgatcctatggctcatctggtcaagcggaaagatccagaatttattttggaagacttgggagatgatgaaaagatgaaagaatctggcttcatagtaccccaaagtatacctactcacagctggctgaaacgtggagtggatgctcctccaaaccgctatggcataaaacccggtcgtcattgggatggcgtggatcgcagtaatggatttgagaaggacatgttcaagctgaagaacgagaagcaagcaatggagcaagaagcctatctttggtctgtctctgatatgtgatcccaactgctgctccttacgagaggaatacagttgtgtaaaggaagaaccaatggaagacctttcaaacgatttttttttcactcttcttattacacaaagtgacatcactggtgatgctgcgccggagtagcctgaatattttccaggaaagcattttcaggaatgcagttcaatgaagctgcattacgtatttgttggaaatctgttactgctgtaccatttgtcatccttcacgttttgtaatatagatgaacgcactgcaaggttttggaacagttcaaaagatgagattttatattcactttctggtttccatgtgtataacttgtcttagcagctgtcgcggtttaatttaaattaaatgatggtggatttgagagcc

SEQ ID NO: 33629 - DNA, 1741 bp, Zea mays
  Clone ID: UC-ZMFLMO17152H05_FLI
gacgctcaacgcctacaacgtgctggccgcccggtgcgcggcggagtacctggagatgtcggagacggtggagaaggggaacctggtgtacaagatcgacgtgttcctgtcggccagcatcttccgggcctggaaggactccatcatcgtgctgcagtcgacgaggccgctgcagcggtggacggacagcctcaaggtggtcaaccactgcgtcgacgccatcgcctcccgggcatccacggacccgtcggaggtcgactggtcgtacacgtacagccggaggaagctcccgtcggagaccgacggcgacgcgcgcggctggaacggcgtcaggaagcggcaggcggtgccgagggactggtgggtggaggatctctgcgacctcgaggtgtgcctgtacaggaaggtgatcctggcgatcaaggccaaggggaggacgggcggcgccgtcgtcggcgaggcgctgcgggcctacgcgtgccgccggctgttcgggtccctggaccacgccgtcagcgacgggctcgactgcaccaagcaccgcgcggctcttgaagccgtcgccgacctgctgccggccgagaaggggtcggtctcctgtggcctccttctcaagctgctcagggcctcgtgcctactggagtccggtcaggcctaccgcggcgagctgatcaggaggatcggcgcgcagctggaacgggcttcggtcccggaccttctgatacctgcggactccggcgacggcgacggcgacgcgatgtacaatgttggcatggtggctgcgatgctggaggagttcttgctgcatcacaaggtaaatggggccgaggcggagaagcgggaagatggcgaggacgacgtggatgttgccgctgacgacccggtcacttcttcgaagctggccgctgtcgcaaagctggtcgatggatacctctccgagatcgccaaggacccgtgccttcctctggagacgttcgtcgccctcgccgaatcgatgccgcccctgtctcgcccggtgcacgacgcgctctaccgcgccatcgacgtttacctcaaggagcatccgggcatgtcgaagggcgagaagaagcggctgtgcgcgctgatggactgcaggaagctaacggcggacgcgagcgagcacgccgtgcagaacgagcggctgcccctgcgcgtggtggtacaggtcctcttcttcgagcaggtccggcagtcggcggcggcggcggcagcctctgccgcccccgcgcgctcgctcatcctgcccagggacgacggcgcgtcgtacggcagctcgaggtcggcgaccacgacggcgacggaggacgagcagtggggcggcggcgccgtggtgggcgcgcctgtgacgacgtcgacgtcgggcggcgccggcgacgccggctcgctccggtccgtgagccagctgtcggccaacgagaacgggagaagcggcggcggcggcgacaggaagaaggccaagggcggtgcggtggcgccggcgccggtgaagagagtgctggggaagctgtggtccggcaaggcgagcagcgggtccgacgacacgtcggcgagccccgttgggtccctcaacctggagcctggaggagaccaagtcaatgtcacatatcacgaggcattctgtgtcatagttactatattactgtatatgttctctctttttttttgagtgatggttttgttggattggatttgacttacataattatggagggtgtttggt

SEQ ID NO: 33630 - DNA, 2218 bp, Zea mays
  Clone ID: UC-ZMFLMO17152H06_FLI
aaacgaacaaccaaagtagagattcaaaggttgagacagaagaaggaaaagaagaatactacaaattcaacaagattgcatttaggcaatgaaagaaaaaagagaggtggctgtgctctactcgttcgtggatcgaacaaggagtctggcagcaccactgatggttttgttccatatgaatggaaacgtacgatcttctcctggctgattgatctgaatgttctatcagtcaatactaagctgaactgtttggatgaaagccactcaaaggttttactagagggttttgtcactagggatgggattaactgcagctgctgtagcgaggtcatttcagtgccagaatttgtgactcatgctggttctgaagtaaataagccatacagaaacatacttgtggatgggctagacattgaccttttgcactgtctcattaatgcatggaatatgcagtctgatgctgaaagacaagatttctttcccgttagcattgagggagatgaccccaatgatgacacctgtggtatttgtggagatggaggcaatttgatctgttgtgatggatgcccctcgacatttcacatgagttgtctaggactggaggcacttcccactgattattggtgttgttccaactgctcatgtaaattttgccatgaacattctagtgatgatgctgaagacactgctgatgttgattcttcattgcatacttgttcccagtgcgaagagcagtatcatggagcctgctctcctgatattgattccatagctactaatctttctagtcagacaggcaatttattctgccaacaaagctgcagactgctgtttgaggaattgcagaatcttctcgcagtcaagaaggatcttgaaccagaatactcatgcagagttgttcaacgcatccatgaagaggtaccagaagaagtccttgctttggacaaaagagttgagtgtaactccaagattgctgttgcactctcattaatggacgagtgcttccttccgattgttgaccagagaactggcatcaacttgatacgcaatgttgtgtataactgtggatcaaattttgcccgattggatttccgtggattctatataattattttagaacgtggagatgaaataatagctgcagcatctgtccgaatacatggaaccaagttagctgagatgccgttcattggtacccggaatatgtataggcgacaagggatgtgccgccgacttgttgatggaattgaaatgatcctcagctctctcaatgttgagaagctgatcattcctgctatcacagaacttgtggacacctggacatctaaatttggatttagtccactcgacgattctgagaagcaagaagtgaaatccgttagcatgttagtttttcctggtacaggtcttctccaaaagccattgctgaaggcctcaccatcggaagatcaatgctcccaaggagacaaaactgaaaaaccatctgatgtagtcaatgaagattcgctttgctctggtgcaagtgccgaccccctaggttcggtggtcgaagagcatggggacaccagcaaagatgccgatggtacttgcaacggtgatgtttcacagcgatctcctcattcctgatggtaagatttggttgcagctttctgggcccccccaagctttatatggacgaaacctccgtttgtttttgtacctctcgagttttgactcagcagccagcatgacaaccatccgttggcagaaagaggcttccggttttttgcagattagttgccggggcacccctgtagttgtactcagaatttgaccattgactcgtcggcctgggaaaagaatcaacccgtgcagtactgaaaagcgtttactccaaccaggaaccagctaaattaatgtgcagctgaaaagtcagtatgcagaatgtggaggatagtatcacttcttttgctttttgatcgttaacttagaactccgagggcgagtcgtcgtaaatgttacaccagttgttattttgttaatagttttttttaaatgttttcgctagcgcatccctagaaccttctcgtttctgtaagatagttctcgcctctgtaagataagctaatgtatgcgcaagctagaaatagtccgcctgatccgtcacgcggaattggttacctaaaccctgttaatgtttcgttttgcatcgtgttggaatgtgtgtgttcttcctgtg

SEQ ID NO: 33631 - DNA, 1539 bp, Zea mays
  Clone ID: UC-ZMFLMO17152H10_FLI
ggctgtttccccagccaatcaggaccttgctacttctgatgcaatcaagatatcacgggaagttgatcccaaaggtgaaaggacctttggtgttctcacaaaaattgatctgatggacaagggtaccgatgctgttgatatactggaaggaagatcttaccgtctccaaacaccatgggttggtgttgttaatcgatcccaacaagatatcaacaagaatgtggacatgattgctgctaggcgtagagagcgagagtattttgcaactacaccagaatataagcacatggcttctaggatgggatctgaatatttaggaaagatgctttcaaagcatttggaacaagttatcaaatcaaggatcccggggatccaatctcttataacaaagacaattgcagagctggaaactgaacttaatcgacttggaaaacccattgctaatgatgctggggggaagctgtacacgatcatggaaatttgtcgtatgtttgacagtatctacaaagagcatctggacggagtgcgccctggcggagaaaaagtttaccacgtcttcgacaatcaatttcctgtagctattaaacggttgcagtttgataagcaactctctatggaaaatgtaaagaagcttataacagaagctgatggataccagcctcacttaatagctccagaacaaggatatcgacgccttatagaatcttgtcttattagtatcagaggtcctgccgaggcagctgttgatgcggtacatgcaattctgaaggacctcgtccgcaaggctatcaatgaaacacatgagctgaagcagtttcccacccttcgtgtggaagtaggcaatgcagcttttgagtcattggatagaatgagggatgaaagcaagaaaaatacattaaagctagttgacatggaatgcagctacttgacagtagatttcttcaggaagcttccccaggatgttgagaggggtggaaatccaagccactctatttttgatagatataatgactcttatcttagacgaattggacaaactgttctgtcatatgttaatatggtgtgttcgaccttgaggaactccatcccaaaatctattgtttattgccaagtgcgagaggccaagcgctcgctgctcgatcacttcttcactgaactgggagcaagagagatgaagcaactttccaagcttctcgacgaagatccagcagtcatggaacgcagaactaaccttgcaaagaggctggagctgtaccggagtgcccaatcggaaatcgatgcagtcgcatggtccaaatagccctgatggctaagatatctgttcttacatgttctttatccctcgtctggcgattgtctcccctattctggggcatatatagctgatttttgtctgttgtaggtcaggtcattctatagattaccgcagctgtacggtgtcgtttagttgtgcttttgttccttgtacttgagggtctaggggacaccaggctgctgtacgcttgcatcacggacaagttcataaattgtgtttttgtt

SEQ ID NO: 33632 - DNA, 1692 bp, Zea mays
  Clone ID: UC-ZMFLMO17153A03_FLI
ggacgggtatgctgacaatggtaacgccacggaggctatggctttgttctggaggatggtccaggagggcatggatgtgacggatgcgtctgtgttggcagcactacaagcgtgcggggagcttggatatctcgatgaggtgaggcgtgtccatgagctacttgtgagagttggcttgagctccaatgtgtcggtgacgaacgcgcttatcaccacatacgccaagtgcaagagggcagacctcgctgcccaggtgttcaacgagctgggcaataaaaagacacggatctcatggaatgccatgatccttggcttcacgcagaacgaatgccctgaggatgcagagaggctcttcgctaggatgcagttggaaaatgtgagaccagattcgttcaccctggtcagcgtgattcctgcagtcgcggacatttctgatccgctgcaagcaagatggatccatggatattctatcaggcaccagctagaccaggatgtctatgtcctgacagcccttattgacatgtactccaaatgtgggcgtgtcagcatagctagaaggctcttcgattccgcaagggacagacatgttatcacctggaatgcgatgatccatggttatggttcacatggttttggccaggctgcagttgagctatttgaagagatgaagggcactggcagtttgcccaacgagacaacattcctctcggttcttgcagcttgcagtcatgctggtttggttgatgaagggcggaaatattttgctagcatgaagaaggactatgggcttgaacctggaatggagcactacggtaccatggtggatctacttggacgagctgggaagctagacgaagcttggtctttcatcaaaaacatgcctatagaacctggcattagtgtttatggtgcaatgttaggtgcttgcaagttgcacaagaatgttgaattggctgaacaatcagcacagataatctttgagctgggcccagaggagggggtgtatcatgtccttttggcaaacatttatgcaaacgcttcaatgtggaaagacgtcgcgagggtgaggactgctatggagaagaaaggactccagaagactcctggatggagtattatccagctcaaaaatgaggtccataccttctactctggaagcacaaatcaccagcacgcgaaggacatatacgcaagactggctaagctcatcgaagagatcaaagatatgggctatgtgccagacactgattcaatacatgatgtggaggatgatgtcaaggcacagctgcttaacacccacagtgagaagcttgctattgcatatgggctcattcgaacagcccctggcacgacaattcagataaagaagaaccttcgagtttgtaacgactgtcataatgcaaccaagttaatatctctactgacaggacgggaaataatcatgagagacattcaacgctttcaccattttaaggatggtaaatgttcatgtggagactactggtagtgaaatgttgaaggcagtctgaatatccatttccgagatgatatacagctgctatacaagtatacaattagactaacaggtaaagctaactattctatctttttcaccgaccatgttttgaatttgatcgggggcattcgatatgttgatttaatgaggaatgtataccatgttcttttatagtc

SEQ ID NO: 33633 - DNA, 1388 bp, Zea mays
  Clone ID: UC-ZMFLMO17153B09_FLI
atgaagggaaggggcttcttgagaagaagcttgtctagcactgagtcgaatgtttccagaagcaaggctgctaattttgaaaacaacgatatgacttcaactaggcagtccactaccgatgaatttcacaatgctgatgtagttcctgcggagctgataactagtgtgccacacatgcttatagaaaaacaaaagcatcatgttggtaaaggtactgcagagactattgggagtaattcaaagaatggatgtgagacaggacagcatgatggttattgctcaacttcaggtgaaattagagatcctcttggagcagctagcgggtatttatcgaggagtagcagtatcactttgtcatgtggtactgaatatgatcatgatacccatcatctggaagaaccatgtgatccctgtgatgacagagtggttaatgaacctgatccactctctgtgcacaatactagaactgatgaagcagcaacaacagatcgaacatctggaatagtggatacttatccagttcgacagcgtagactgtgttctgttgatgggaagctgaaaataaaaacccgaaatgccactagtgctaaaggtgacgaaaaagaaacattggcaatatgttcaatttcaaatgtggctgataaagagttgagcagaacattaagatctcttggtgaatctatggttgagaacatacaggatatcgaattgctgttaaaaccaaattcactctcgacttcagtggagaaacttgaggaagcaattcctggaagcacagagcaagctaaggcagtagcagctctaaaagaactcaggaagatcagtgaccttttacgccaaatctaacccgtacaactacggattcttctatacatatggtgttgtagtttttatacgtatctccattggacaatggatgtgatgtaacatgctaacagtatataaccatctgattgatcggtaaatagtaatttgtatgctccctgcctacaaaaaaataaccatatcaccaaatatttaatttatacaacactaaaaacgcggccgcctcgcctgcattcaaatatcaagtcattaaaaatcaataactttataatgaattatctatctacggggggggggggtttatagaataaaataagatattatttggatgcaagtgaggtgtattgggttttttatatgtgggtgtattatttattttactcggccgccgattaacaacctaataagtataaaaatactgtggttatctcacatttctatactttacacaaccacaccatttatacacataagagtgatacgaaatgactatcgttttcttctcttataaaataatctttaaatatgaattataatgaatccatccttttgctattaattag

SEQ ID NO: 33634 - DNA, 892 bp, Zea mays
  Clone ID: UC-ZMFLMO17153B11_FLI
ccaggttgcatctgaaattctccctgataaagttccagagggtaacgatgtgtcttccactggaattactaaggacactactggccatagtggagatgttaaagctcccacttcagaaccacatttaggggaaacacgtatcaactcagcatcagaatccataccaaatgatgcgggtcccccaacccagaacaaaaagaatgggccgacaatcaagaaaacattagtaaacggtctcgtggaccaaccaaatgccaactccgggctagaatcttcaggaaacgataaccctagctacaccaactcgagcagtgctgtgccagtgccacccgcaagcacccaaccagtcgagtctgctgccgctgctgtagacgttgattcggtcgagaaaggcccaggtacgacaccagagcaaccggcgaagcgaagggcacccaacgttcgacgaggacagagaagggtgctgcgaagcgcaacgagagaaggaagagcgacgtaggggatattgtgttatagcgaattaaagggggcaacacatgatccctagctaggttaactagagctatagcaatgactggccgtttccacgtacgagatgcgtagtgtgcatcaaactgtatccatgttgtattatcgtagtagtcgtaggccttacagtgaccacgcttactggttagagttggtcgttcaggaccagtagtagctgcttgatttgggtttcggtgtcaggatttggttaggtcctgtgtgtagtttgcgcagtcggaaagagactgttggttgtatttgcaggttgcaagcagacagtgttgtagccaccaggtaggaaatccagcgagagctgctcctctctgtatcatggacgctggtgtttcaagcgatgtactcatgt

SEQ ID NO: 33635 - DNA, 1386 bp, Zea mays
  Clone ID: UC-ZMFLMO17153C06_FLI
gctttggacctgtttacaagggcacactagcaaatggtactatagttgcagttaaaaagctatcttcaaagtcgagccaaggaaatcgcgagtttttaaatgagataggaataatatctgctctaaggcatccgaatcttgtgaggctatttggttgctgtattgatggggatcagcttcttcttatatatgaattcttggaaaataatagtcttggccgtgcgctttttggccgcacagaacatcagttaaaattggattggccaacaaggtacaatatctgccttggaactgcaaaaggcctggtctatctgcatgaagagtctgcactaaaaatcgtccacagagatattaagccatcaaatattcttcttgatggaaagatgcgacctaaaatatcagattttggcttggctaaactgaatgatgactgtggacgtgtgagcactcggatcgctggaactgttggttatatggcccctgaatatgccacaagaggttgcttaacacgtaaagcggacatctatagttatggagtggtggctcttgaggttgttagtggaatgagcaatacgaatagcatgtcaaatgaagaatatctgcatcttcttgattgggctgaaagattgaagcagcaagggaagctgctggaaatggtggaccggcgtctcggttctgactactcccaagaacaggcactgaggctgctggatgtagctctcctctgtacaagcatacaaccaacccagcggccaagaatgtcttcagtggtgaagatgctttgtggtgagatccccgtcgagattgtacctgctgacgatgatctaagtgaagatctacgactcaacatcgctcaatcccggcaatcaatagataacagccaaacaaattggtcccagtactcagtaaataacagccaaacaaattggtctgaaacgctttcaagcgatcgttcggtcttgccccacagcagcaaggacagtggctacctcccatcttcgagctccctttctgtcaagctgtgaacttcagcatcgagaatagctagccaggtgtcggcttttttttggggcccgttgctgcagttgtacataggcaaatgttgggtttcatgcttgcaatgcaagtatttgatgtctcatctcgattgtcaagtgtcattcaagaatatcgtccacgacacatggcaattgatcacagtactgtctcaacgtcagccatatttcggctagctccttagtttgttgctttggatgtagaaagttataatgacttataatttggaacagatggagatgtagtatatcattaggacagtgcacttgagaaatgtaggccagaaatattgtttcatatatgcagatcttggagacagtgcaatacttt

SEQ ID NO: 33636 - DNA, 549 bp, Zea mays
  Clone ID: UC-ZMFLMO17153C11_FLI
gttaattgtttattttcatttttttatcaacagacaaaatgagcagttgtacaagtatggggacacaaagtcatcccagaatatcatgcttttgtagctcaaaaaactcattaaagcgaacctgttgttctgggacaagctaaatttcccaccatttagagcttccatcaaaggtaccacaaccatctcatgttcaaacagctcctcctggaaatgcgcgccttcacctcatgccgaaacccattgaatgtcccttagaatctttttgtttgatttcgtggtggtggtggaggtggggaggaggaattgagttagttatcgcatgcccaagttcccggtttgtttcgagaggagaacagatgatcgattgcctccctgcttggttaaatgtgccatctaagatttcagaattgtaatgcaggggctggatttgatcaaaattgtcatcgtataagattggccttgtacttttttaaaaacatgcaaaacttacgcatcttcgcttattatgtactctctatattttaccttttctggcgctgaattgac

SEQ ID NO: 33637 - DNA, 2862 bp, Zea mays
  Clone ID: UC-ZMFLMO17153E02_FLI
gccgcgtgtagtcctagtctctcgccagcaccatcatcatcaatcacggcggcgaccccgccccgcctcgatcgcccacgctgcccgactggaaccggacgctgctgctgctgctgctaggctgacagcgacgacgagggggccatggctcagatcttgctccacggcacgctccacgccaccatcttcgaggccgagtcgctctccaacccgcaccgcgccaccggcggcgcccccaagttcatccgcaagcttgtggaagggattgaggataccgtgggtatcggcaagggcaccaccaagatatacgccaccgttgatctggagaaggcccgcgtggggcgcacccggatggtctccaacgagcccgtgaaccctcgctggtacgagtccttccacatctactgcgcgcacatggccgccgacgtagtattcaccgtcaagatcgacaaccccatcggggcctcgctcatcgggagggcttacctgcctgtcgaggacatcctgggcggagacgagatcgacaagtggcttgagatatgcgatgagaagcgcgagcctattggggacagcaagatccacgtgaagcttcagtacttcgacgtcggcaaggaccgcaactgggccaggggtgtccggagcaccaagtaccctggtgttccttacaccttcttctcgcagaggcaggggtgcaaggttactctgtaccaggacgctcatgtcccggacaacttcgttcccaggatcccgctcgccgatggcaagaactacgagccacacaggtgctgggaggatatctttgatgccataagcaaggcccagcatctgatttacatcactggctggtccgtgtacaccgagatcaccttggttcgggacaccagcaggccgaaacctggaggcgatgttactcttggggagttgctcaagaggaaggccagcgaaggtgtccgtgtccttatgctagtgtgggatgataggacttcggtcggcttgcttaagaaggatggcttgatggctacccatgatgaggagactgcaaattacttccatggcacggacgtcaactgtgtcctgtgccctcgcaaccctgatgattctggcagctttgtccaggacctgcagatatcaactatgttcacgcaccatcagaagatagtagtggtagaccatgagttgccaaacgagggctcccagcagaggaggatcgtcagcttcgttggcggaattgacctttgtgatggaaggtatgatacccagtatcactccttgtttaggacacttgacactgtccatcatgatgacttccaccagccaaactttgagggtgggtcaatcaagaaaggtggtccgagagagccatggcatgatatccactcacggctggaagggccaattgcttgggatgttctttacaactttgagcagaggtggaggaagcagggtggtaaggacctccttgtacgtctcagggatctttctgacattattattcccccttctcctgtgatgttcccggaggacagagatacctggaatgttcagctctttagatccattgacggcggtgctgcttttggcttccccgagactcctgatgaagctgcaagagctgggcttgtgagtggaaaggatcaaatcatcgaccggagtatccaggatgcatacataaatgccatacggagggcgaagaacttcatctacattgagaatcagtacttccttggaagctcatatgactggaagccggaaggcatcaagccagaagatatcgattgtcttcacttgattccgaaggagctctcattgaagattgtcagcaagattgaggctggggagcggttcactgtttatgttgtggtgccaatgtggcctgagggtgttccagaaagtgcttccgttcaggcaatccttgactggcaaaggagaacaatggatatgatgtacactgacatcacacaagctctcgaagccaatggaatccaagcaaaccccaaggactatctcactttcttctgcttaggtaaccgtgaggtgaagcaggagggagaatatcaacctgaggaacacccagaacctggcactgattacatccgggctcaagaggctaggaggtttatgatctatgttcatgccaaaatgatgatagtggacgatgaatacatcatcattgggtccgccaacatcaaccagaggtccatggacggtgccagggactccgagatagccatgggcgcgtaccagccgtaccacctggcgactaggcagcctgcccgtggccagatccatggcttccggatgtctctttggtacgaacacctggggatgctggacgacgtcttccagcgccccgagagcgtagagtgcgtgcagaaggtgaacaagatcgccgagaagtactgggacctgtactcgagtgatgacctggagcaggacctcccgggccacctcctcagctacccgatcggtgtcactgccgacggcaccgttactgagctgcccgggatggagaacttccctgacacccgtgcccgcgtcctcggcaacaagtcggattacctcccgcccatcctcaccacataggctgcaggctgcaggcagcgccatggcttctctgtttgtgtttgagatactgaaagttcagatagcagtgtttttatagttattgagtgataataagtgcattgtgcatggtgggacgataggagttagagttgttcataaatcataactactatgtactgcaccagatgacgagattgtgttgccccttgtctggtgtagcttgtgtagctttctgcgttgcagtgctgtttgtaaaggcgacttcagagttcagaattaaaacatggttgttttttc

SEQ ID NO: 33638 - DNA, 1313 bp, Zea mays
  Clone ID: UC-ZMFLMO17153E09_FLI
gggttcgagaacccgcaagcaacctatatagcccgccgcgaattccgcctggcttcctcgtcgcccgcctcgtcgtcgcgccgcagtgagaggagggggaggcgatggatctcaacgaatgcgagaggagggggccggcggggccggatccgctgtcgaggcaggggtcgatctactcgctcacgttcgacgagttccagaacacgctcggcgggatggggggagggcttggcaaggacttcggctccatgaacatggacgagctgctgcggagcatctggaccgccgaggagagccaggccatggcgtcggcttcggcctcggcctcggcctcggtgtccgcgctgggggcagccgtcgacggcggggcggcgctgcagagacaggggtctctcgcgctgccgcgcactctcagcgtcaagacggtggacgaggtctggcgggacttcgtgcgggaggcgccgcccgggacggctggcggcgaggagccgcagcccaaccgacagccgactctcggggagatgacgctggaggagttcctggtcagggccggggtcgtccgtgacaaccctgccgcggcagctgctgctgtccctgcgcagccggttgctccacggccgattcaggcggtcagtaatggcgcctccatctttttcggcaactttgggggcgccaatgacgccggggctggagcgatggtgtttgcgccggtggggatcggggatcaggccatgggcaacgggttgatgcctggggtggctgggatggcaggtggtgcggtcaccgtgagtccggtggatacgtcggtggcccagctggattctatgggcaagagcgatgaggatctgtcatcgccaatggctccggtgccatacccctttgagggagtgataaggggaaggaggagcggtgcgggtgtggagaaggttgtggagcggcggcagaggaggatgatcaagaacagggagtctgcagctagatcccgtgcccgtaagcaggcttatacaatggagttggaagccgaagttcagaaactgaaggaacaaaatgcagaattgcagaagaagcaggaacaaataatggagatgcagcaaaaccaggtcccggaattggtcagcaatccatatgcacaaaagaagcgatgcctgcggagaacattgacaggtccctggtaactgagttgttgttgatcggactcgacaggatatttaacattatggtacttgtacattcttcaggatttggagaacccaaatttctgttgtatattagcgatcaacagagtcgaatgtaccagtgcataactttcttct

SEQ ID NO: 33639 - DNA, 849 bp, Zea mays
  Clone ID: UC-ZMFLMO17153F09_FLI
gccggctgctcggccgtcgacgcccccgtctccggcggcgaccgaggggcccgcaacgccaccctatccatcttcgctggcggcgacgccgccgttgttgctcgcctggcgccgctcttcaagctcatgggaaacgcgctgtacatgggcgggcccggcgcggggcagcgcgcgaagctgggcaaccaaatcgccatcgcatccaccatggtagggctcgtggagggcatggtgtacgcgcacaaggccgggctggacgtggccaagtggctggaggccatctccaccggcgcagcggggtccaagtcgctggagctgtacgggaagcggatcctggagagggatatggcggctggcttctatgtccggcacttcgtgaaggacctcggcatctgcctgtcggaatgccaggccatggggctgtcgctgccggggctcgccctcgcgcaacagctgtacgtgtccctgatcgcgcacggcgagggcgggctcggtacacaggcgcttatactggccgtcgagcggctgaacaacaccagcctcgagaagaaggacgaatgaaaggccccaggctctagctttgatgaacttgtgggaagctttgcttggtgccttggtgcaagtatgcaagatcgaggtgactgttaagttgtctttcagagttctacagctgttcacttttgtagtagtatatatgttatgcacttgtgcaacggttggatgattgcttagctctacctgtttacatccgccatgggttccaataagattttacaaacaatgtggcattccttgcatagttgtattggtttagctatggtggttgacataacagatttagacatatat

SEQ ID NO: 33640 - DNA, 1883 bp, Zea mays
  Clone ID: UC-ZMFLMO17153G05_FLI
ctctctctctctcaatcctcacctctccggctctctttctcctccccagtccccaacggtgaggcccccgccgcgcagcccatcgacgcattgccgctgcaagcgcggacaccgagggctagaagcggcggcggtgccagggttcggcgctcggtcggcaatggcgaggcggcttatgctggcgctccctgtgctcctcttcttattgctcgtcgggcaatgccacggcggcaagattggcgtctgctacggccgcaacgccgacgaccttccggcgccagacaaggtggcgcagctaatccagcagcagtccatcaagtacgtgcgcatctacgacaccaacatcgacgtcatcaaggcattcgccaacaccggcgtcgagctcatggtcggcgtccccaactccgacctcctcgccttcgcgcagtaccagtccaacgtcgacacatggctcaagaacagcatcctcccatactacccggacaccatgatcacctacatcaccgtcggcgccgaggtcaccgagagccccgccaacgtctccgccctcgtcgtgccagccatgcgcaatgtgcacaccgcgctcaagaaggccggcctgcacaagaagatcaccatctccagcacccactcgctcgggatactgtcccggtcgttcccgccgtctgctggggcgttcaacagcagctacgcctacttcttgaagcctatgctccagttccttgtggagaatcaggcaccgttcatggtggatttgtacccctactatgcgtaccagaactcgcggagcaatgtgtccctcaactacgcgctgttctcgccagagtcccaggatgtgattgacccaaacactggactggtttacactaacatgttcgacgcccaggtcgattccatcttctttgcgctcatggctctgaacttcaagactttgaagatcatgatcactgagtcagggtggccaaacaaaggggcggtcaaggagactggagccacaccagacaatgctcagacctacaataccaatttgatacgccatgttgttaatgacagcggcacaccggcgaaaccaggggaagagattgatgtctacatattttcattgttcaatgagaacaggaaacctggcatcgagtcggagaggaactggggactgttttttcctgataagagctctatctacagccttgattggacgggccgaggcaatgtggatgttatgactggagcaaacattacaagtgctaatggtacctggtgtattgcttcaactaatgcatcagaaactgatctgcagaatgccctcaactgggcatgtggtccaggcaacgtagattgttctgccatacagccaagccaaccctgctaccagccggacactttaacttcccatgcttcatatgcattcaatagctactaccagcaaaatggagccaacgttgtggcctgtgactttggaggtgcggggatacgaacgacaaaagatccaagttatgacacttgcgtctatttggctgccggcaataagatgagcacgatgaactcaacatctcttccagctcgcagcgactctggtccagtcccacgcgtcaaatgcttcgccactttgctgcccatgctggccctcgtgatggctgcagttatgctgtgatctatggggaaaaaatgctccagctagcctccttaagacgtgagatgaaaggtgaattgcgtaatgctgctggtaaccatcgaagttctgttttttgccatgagcagtagactagtagtagtctagtagagaggcaccttatgctgtaggaattctctggtcggttaagatgtacatcgtcgcgcggacaatatatatcagctggcattaagaacttgatatcgtattatgc

SEQ ID NO: 33641 - DNA, 773 bp, Zea mays
  Clone ID: UC-ZMFLMO17153H01_FLI
cttcctctgcgcttcgcccacacgctccagccgcttcaccgcgccgccaccgccaccgcgaggatgccgttcaagaggttcgtggagatcgggcgcgtggccctggtgaactacgggaaggactatggccgtctcgtcgtcatcgtagatgtggtcgaccagaacagggcacttgtggatgcccctgatatggtcaggtgccaggtgaacttcaagcggctctcacttactgacatcaagattgacatcaagcgtgtccccaagaagacaaccctgatcaaggcgatggaggaagctggtaacgatagagcttatgctgtggacctctttagcaccgccacactttattcatcttctgtattctagatgattgcccataagagaatggtgacacttatttgatctcttgctattcttttttcagatgtgaagaccaagtgggagaacagctcatggggcaagaagctgattgtccagaagaggagagcatcgctcaatgactttgataggttcaaagtcatgctggcgaagattaagaggggcggtgctatcatgcaagagctcgccaagctgaagaaggcgtccacggcttaaggagtctctttccgtgaatgtcatgttagagtttttggttatgagttggatcagcaattcgattgagcgttgtcaaagccagaattaccaatatgttccctgtaaacccatttcaaactttatcaagcacgggcgtgctcaggatacttttgccatgaatgatatggaatatctatggt

SEQ ID NO: 33642 - DNA, 1152 bp, Zea mays
  Clone ID: UC-ZMFLMO17154A05_FLI
cacatcaacaacaaaaagatggcagcgccacctctcggcctcgcttgcagggtcgccggcgccttcaccaccccggccgtggcgcattccggcttcctcccccgacaccttgcccgtggtctcctcccttcaaggagatggagcggggtggtgaggatgggggcggtggtcggaggaggaaaggagggagaagaggacgaggagctgagacagaccaaggagcaggctgccgccaggaggcggtgggaggccctgattagggagcagaaaattaaaacccttacaccgagggaagctggctatacgttcaaactgacggacaaggttcttttggatgttaggccctcaaacgagcgtcaaaaggcttgggtgaaaggctctacctggattcctatatttgatgtggatacatcggttgatctgggcggacttagcaaaaaagtcagcaattttgtaatgggtggctggtggagtggcagctcaacattgtccttgaataagaactttgtacagcaggttgaggagaagttttcaaaagatacagatataatgctagtgtgccagaaaggacttagatcacttgccgcctgtgaacagctgtacaatgctggttttgaaaatttgttctgggtacaaggaggccttgaagctgccgaagaggaggattttgaaagggaaggttcccagcctttcaagcttgctgcaattggagggatttctgaattctttgggtggacggaccagcaacgcgcgcaggctgcaaaggaagggctgggataccggctcgtcttcactggtcgcttggtcggagcattggtgctacttgacgctttgtttctaggcgcccaaaggatcggccctatgctccaagaaatgcaaccgcgttgatctcctccgcagaacgtttctgtagccaagggtagctctgcaaacgcgtccgcttgggttttctgcgtcgtaggctcgtagccctaatcatgctgtccgctgtgcaagtgtacatgtatgttcgcatctgggtcttctcggctgcggacaggcggtgcgtagtagattggctttgttgtaggcttaacgccattttttgtgtgtgcacatggcaaaaacaaacaaaaaatgtttatgcagaggaacagatgctatttctactcc

SEQ ID NO: 33643 - DNA, 2474 bp, Zea mays
  Clone ID: UC-ZMFLMO17154B04_FLI
gatttaaacccacccaatcccactcaatccacatggattgagagctaaccgaacaaggcctaaaaagaaatctgttaggtttagcttttggtttttgccccctaaaagccaaaagctaaaccaaaaagctggatctagaaagcagctttttttaaaagccgattttctcgcagtgtaaaactgaaagcacctctagacctgcttttagcggcttttggatggaactgtaaaaatatatgtggaatattttttagctttttagtggttttcactaaacggttttagctttttagcacttcactgtccacatcagcttttttcacagatcacaacccacaacagcttttttcactgccacagcccaaccaaagagaccctaagtcttgcatgttgcttattctttacgttacagtttaatagcaattatgctgacacttaatctcttttgatagcggttccaaaaatgtcaatatgccaggacaagacttgtaagaactggagggcgtggatggggccttgtggctgatgagaatattatggctggtcaatttgttatcgaatattgtggagaagtaatatcatggaaggaagccaaacggagagctcaagcttatgaaacccagtgtctgcagatattctctcgcttctcatatttgaattgtggcaaactggcacttttttagctagctataacatctagcttctgtaactgcaggtttaaaggatgcctatatcatttacctcaatgctgatgagtcaattgatgcaacaagaaaagggaaccttgcgagattcatcaaccattcatggtaagtttgtattaaaggcacagcatacttgaatttcatcttgcttcttatgtgtgtgatttgatcattgattttttctgtcattgacttgtaagtaattaagtctaatagttcactattgaagcatacagccaaccgaattgtgagacaaggaaatggaatgtccttggggaagtaagagttggaatttttgctaagcaaaacattccttttggcacggaattatcctatgactacaattttgagtggtatggtggtgtgatggtgcggtgcctctgtggagccgccagctgttctgggtttcttggggctaaatcacgtggtttccaggtgggcgaacaaatttatgttgtgcatgtgacttcctatttcatgcttgacacttgacagtagtgttcgacagaaggaatcaccgctaccttttagttgttatatgtcaatcctctttgtcagacattggaatgactgattgcactctggttttctgcatttgcttatttgctgacataacgttttgagccttcatgctatctacttattgcttggaagattgacattctgcatcattatctggtcatttttgcatttccttgtaagttgatatttgatatgttcattatgttcctaatgtagctttattgattggtatgttgcaggaggccacgtacctgtgggaagatgatgatgacaggttttctgttgagaatatccctctttacgattctgctgatgacgaacctacaagcattaacaaggaaatcctcgtatcaagtgatggcatggttacccaatacagcaacatcagcagagtacagagtaccgaaaatcctggaaacactggaacaaatgaatttgcgccaattatcgtcgacgaactgacaacaagctcaaatggattagcaccaatgaacgttgaaccattgactgtaagctcaaatgagttcacgccatcgaacgccatgccaatggtagctcgtctagtcgagaatgggtcaactggatacagcgcacaggacactcacgacgcttctcagaattcagcgcccaaagctgcaaatcacgcgaaccaaactggacctcagaacaacagcaaccattcaacgttggtccctgtgaagcccgcgccgaaacgccgtggcaggaaaccgaaacgcgttgtgcacaagcagctggacatcccagatatctgcgaccggcttacatcgtctgtggcgtgcgaagaaatactgtactgtgaggaagtgaagaaccatgccgtttctgaaatcgatgccctgtacgatgagataaggcctgcggttgaagagcacgagagggacagccaagatagcgtctccacaagcctcgcggagaagtggatcgaggctagctgccgcaagtacaaggccgaattcgacctgtatgctgcagtactcaagaacgttgcctccactccactacggtcgaaggatgatgtgggcccaagagagcagaacgggttgaagtatctggagaacggctcatgatttcttttagctagaagcgtggaatattacgtacgccttcaatttgtagtatagggattgcattttttttaactgtggttggtcttgtatttaggtagaggcattgtaaggttacatgattttaaatagcgtggaatcatgtcaaacgcacatttgatct

SEQ ID NO: 33644 - DNA, 2271 bp, Zea mays
  Clone ID: UC-ZMFLMO17154B11_FLI
cttttactccattcccctctttgcgcctccgccagtccgccccgccccgccccgcccagcagacagcgcagccatgccgctccacctccacctgctgtcgtccccggccaccgctgccaagctcgcggcaggtctgcgtgcggcgcctctccgccggtgccacagcttggccccggcgccgcgccacacggatcgcgtggcccttgcgtcgtccctctcggcggtggcgcggtctgctggccccgccgtggcagcggcgcagaccaagcccagcgtttcaggaaagaaacaagtattgatatccttgtcggataaaacggatttggcttatcttggcaatggtcttcagggtttggggtattccatcgtttccactggtggaacagcatccagtctggaagcagcaggagtcagtgtaacaaaagttgaagaaatcacacacttccctgaaatgcttgatggacgagtgaaaacattgcacccaagtatacatggtggtattcttgccaggagagaccaggagcatcatttgaaggcactaaaagatcatggaattgggacatttgatgtggttgtggtgaatttgtatcccttttatgacaaagtcacctctggtaacatctcttttgaggatggcattgaaaatattgatattggtgggcccacgatgatcagagctgcagccaagaaccataaggatgttcttattgtggtggatcataatgattatcctgctttactggagtaccttaaaggaaagcgagacgatcagcagttccccaggatgttggcatggaaagccatgcagcatgtcgcctcttatgattctgcagtgtcagaatggttgtggaagcaatcaaataaaggagagatgttccccccaagctttactgtgccactggagctgaagtctacactccggtatggcgaaaatcctcatcagagtgctgcattctatgctgacaagagcctttctcttgtcggtgctggtggtattgccactgctattcaacaccatggaaaggaaatgtcttacaacaactacttggatgcggatgctgcatggaactgtgtatcggagtttgatagtcctacttgtgttgtggtgaagcacacaaatccatgtggtgttgcctcacgaaaggatattcttgaagcttacaggttagctgtaaggggagatgctgtcagtgcatttggtgggatagttgcattcaacacgactattgacgaggatcttgcgaaggaaattcgtgagttcaggagtcctacagatggtgagacgcggatgttctatgagatagtggttgctcccggctatacggagaagggtcttgaggttctcagaggcaagtccaaggcactgaggatactcgaggcgaagagaagtggaaaagggatgctttcacttaggcaggtgagtggtgggtggttagctcaggagtctgatgatctaacccctgaagagatcacctttaccacaaagtctgagaggtctccgcaagaaaacgagcttgccgatgccaaatttgcctggctttgcgcaaaacatgtcaagagcaacgcaattgtgatagccaagaacaactgcatgctgggaatgggcagtggtcagccgaacaggcgagagagcgttcgaatcgccttcaggaaggcaggagaggaggccaagggagccgcattggccagcgacgccttctttccctttgcctggaatgatgccgtcgaggaggcgtgccagaacggcatcggcatcatcgcccagccaggaggcagtaagaaggacgaggacgccgtcgcgtgctgcaacaagtatggtgtgtcgctcgtcctcaccggcgtcaggcacttcaagcattagccgtcatgccccatggctggtcatcttagcttagggagttacggaaaaaaaaaacaagcttcgaaggctgcagcttgtggagctgccctgatgtttagctttctgcaaagtgcaaaactgcaaattttggtttctgtagggcgtaggctttggtgggtgagctcgtggggaaggtaatgtttctcctggagtcgaataagctgatgggtgtaccgcgagtgacaattgaacccaacctaaggacttgcaggttggtacttttatctgtcaaaatcagccgtgcgcctatgcaccaggagaatcatcgatgtgacctacaatcttcggactacaaaccattgaaaaataaaaagagaaaaggtgcctgggaatttctgtgttcacaaatatatgagcgtttgcagttctgc

SEQ ID NO: 33645 - DNA, 1855 bp, Zea mays
  Clone ID: UC-ZMFLMO17154C12_FLI
tccacccacgctgccggcgagccggccactccatgatccaaatcacgacccaacccagatccagatccacctagctcagtgcagccgtggctaccggatctcacaacagaatattggtctctgagggtgcggcaccgccgctagagtcccactcgtgcattctccggtagcccgcgaatacctttcctcttcttcccattacccccagcgtgcgttctctcctctcttggcggcgactcggcgaccggcgctgccaccccatgtttggtgcccaggtcttcctggggcccttcgccggcgacgagcatcaccagcgagaagatgagggatcgagggcggcgcaggcggcgagctcgtgggcggaacagactggtgagattgaggatggatcaggagcttgagccctaggtaagccattctgaaaataggtatcgcgctgatttacccgctttaggatttgtggttgttgttcgtttctcaatgcgcttggttatcgatgcagctacctcatggtcttagtttagctgagttcacttgactaggaccagcatgtgcaatagaaaatccctggttaattatgggtccttctaacctccgttcgttgcttcaatttctcgttatacgtgccatgttccttcaagttgtttacttacaatcacataaagcttgtggtgttacgcggaacatgctaatttatttggatgttagcatgtgaacttgtgagtcagttcattgctcatttcattgaacctatgctgccatgctggtgaacagacaatgaagcagccggttggtgctataaacacaatacacctctgttttctaatccgtctgcttctcatagttgtagataaccttgtcatttcatcttatattgtgatgcacgggctagctagtagccgcaaaacagttttatatatttgttacctcgtagcatacaccacatgatcttgggtgcttcagactgatttacctccatggtaacagaccattatccaaaaaaaactatggtgcattgctgcaaactacaaacaacatccaaagtgtgctcagagatggcgaggataccgtctctgaagagcctcaatgcgtttccacatgcagaggaacacttgttgaagaagacttactctgaagagtctgtgatgttttatatgatatctaggattcatctttctcccaagtaatcgctgagacaccagtctcgacaactaaactttagcaggatgtgtttacataggtcacatttggatgcctcgctctgcataactttatttctttttgtcctatgcaaatagaaagctttgcaggcgcatctagttgaagtttctgtagaaagggtgaaggcatctgaaaccatatagtctctataggtaactttgacgtttagcatcattttattatcataaaatcataatttccaggtagtagttagttgtgctagtctattaggtgaatgcttttaatcattatacaattttctgttgtgctttactaaggaaagtagtgactcatgagtagctgaacaagactgatctcaatatgctggcgaaaaaatggtgaagttgcccgacttacagctgctctggaggagatgaaaggggagcttgctcatctaaagggagaacatgcttacacagacctgttttgacaagagccgagcagcgatgcttccatttcgaaccacgacctagctaaaggctaatggttccaagtgtcatgtcaaaaaaatcgtgtatgattgcaacaatattggcaaaatatcattgtactttatattttgatataccgtgaacaaaacaagtgtcctctgagaccatcctgatttatgcattttcaaactaaattttacgac

SEQ ID NO: 33646 - DNA, 2416 bp, Zea mays
  Clone ID: UC-ZMFLMO17154E05_FLI
gggctccgccgctccccccacctcacctcgtcaaccccctccttggatagggttagagttcccccggcacgagcgcgagccatggcctccttcacctgctcccaggtcggcgctgcggcagcgggcggaacctcgcccttcctcggctaccggcggcggagcggccccgggggcgccatcccgtcgagctccctcttcgtgggccggcggttggcggcggtgcggatgcgcgcgccctctcgcggggtccgcgggggctccgcgctgcgggtcacgtgcgagaaggtggtggggatcgacctaggcaccaccaactccgcggtcgccgccatggagggcggcaagccgaccgtcgtcaccaacgccgagggcgcgcgcacaactccctccgtagtggcgtacaccaagacaggggagcgcctggtggggcagatcgctaagcgccaggcggtcgtgaaccccgagaacaccttcttctctgtcaagcgcttcatcggccgcaagatgtctgaggtcgacgacgaggccaagcaggtctcgtacggcgttgtcaaagacgagaacggcaacgtcaaactcgactgccccgctattggcaaacagtttgctgccgaggagatctctgcgcaggttttgaggaagttggtggatgatgcatctaagtttcttaatgagaaaattacaaaagcagtggttacagtaccagcatacttcaatgattcacaaaggacagcaactaaagatgctggccgcattgcaggactggaagttctccgaattataaatgaaccaactgctgcatcattggcctatgggttcgagaagaaaaataatgaaacaattctagtgtttgatttgggaggtggtacctttgatgtctctgtattggaagttggagatggtgtgtttgaggtgctttccacatcaggtgatacacaccttggtggtgatgactttgataagagaatagtagattggcttgctagcaacttcaagaaagatgaaggtattgatcttctgaaggataaacaagcccttcagaggcttactgaggcatcagagaaagctaagatggaactgtcaacgctgacacaggcaaatattagcctgccattcattactgctactgctgatgggccaaaacacattgaggcaaccctctcgagagccaaatttgaggaactatgttcagaccttatagacaggcttaaaactcctgttaataatgccttaagagatgccaagttgtctgtcagtgatctagatgaagttattcttgtgggtggatccacccgaatccctgcagttcaagaacttgtgaggaagcttactgacaaagatcccaatgttacggtcaaccctgatgaggttgtttctcttggggcagctgtgcagggtggggttttggcaggagacgtgaaagatgtagttcttctggatgttactccattatctcttggtttggagacattgggaggagtgatgacaaagattatccccaggaataccacactgccaacctcaaaatcggaggtattctcaacagctgcagatggacagacgagcgttgagattaatgttctccagggagaaagagagtttgtcagggacaacaagtccgttggaagcttccggttggatgggatccctcctgcacctcgtggtgtcccacaaattgaagtgaagtttgatattgatgcaaatgggatactctcagttgctgccattgataagggcactggaaagaaacaggacatcaccatcactggtgctagtacgttacctaaggatgaggttgagagaatggtagaagaagccgataagtttgccaaggaggacaaagagaagagagatgcaattgacacaaaaaatcaggccgattctgtggtctaccagactgagaagcaactgaaggagcttggcgataaagtccccgctcccgtgaaagagaaggtggatgtgaagctccaggagctcaaagaggcaatatctggtggatcaacacagagtatgaaggatgccatgtctgctttgaaccaggaggtgatgcagattggccaggcaatgtataaccagtctggtgctagtgctgctgggcctactcctggtgctgaggctgggcctacccctggtaccggaccagcgcagaatgatggggatgtcattgatgcggacttcacagatagcaattgaggggtgatcgatgcatgaccatgtgttgagcatggttggcataaaggagagtgagcaaatagttccttttttgtgttgggatttttactgtaggctatctagtatggagttgatagcggtagtgtttcgcgaacttttctcgtgattttgactcaacaattggctgaatgctatataaagttcaaagaagggcacaaggtttttattcaaatttaatttgatc

SEQ ID NO: 33647 - DNA, 1053 bp, Zea mays
  Clone ID: UC-ZMFLMO17154E10_FLI
gctgttgatatagaggatgaaatttaggggatattgctggagatgaagaagatatagagtacagaatcttttagagagtgctgtaaaggacagagaatattcttttaggggatgaaatttaggggacgttgctggagacagcctaaccacccatgaaactcacacacacagagagaattcctgcacagcacagcagtagtacaaaatatatattcagcattcgtgcatccaaagtcaaagtgtgtgtgtgtggctaggtgaaatttagcagtcactttagctaggctagggcagcactgcatccccctctttcgtgcgtgaggatctgggacagtgggcgaggtgacaaaacgcgatgccttttgcacggcctggcgccggtcgagtcgtgtcaaaagaagaaaaaaaatcgatgccgtggcccactaactaacggtgtttggtgtgtggccattacatttttgcttattatacttgacttgacccactacggttgattttttttgggtttgtttgcaggttctggctcccctccccatcggcttcgccgtgttcatggtgcacctggccaccatccccgtcaccggcaccggcatcaacccggccaggagcctgggcgccgccgtcatctacaacaaggacaagccctgggacgaccactggatcttctgggtgggccccctcgtgggcgctgccatcgcggccttctaccaccagtacatcctccgggctggcgccatcaaggccctcggctccttcaggagcaacgcgtgatgagcggggcttggctgtggagcaatggcgggcgacctacgggcggggggccgtgagcgaggagaatgccatcattcatcgatcgacttgggtgccggtggttggttcgggtcgccttattttgtttcagcagctgctgcgttgcgcgcgtgcgtgagatttggtttggtttcgttcccctgcaatgtaatcatgtcgtgactctctcaagggattattccgctctgctcttatggcctctgttttctattttaatgattgttattaccatgtagcagt

SEQ ID NO: 33648 - DNA, 758 bp, Zea mays
  Clone ID: UC-ZMFLMO17154G04_FLI
gcatgccggagccgcgggacagcctgctggggtacctggtgtacaacacggtgatctcgatcgcggcgctggcggggctggtgcgggcggcgctggtgttcctggacctgcaggccgcgctgccgcccggggacgacggcggggaccaactggcggcgtcgggcccgggactggcagagcggttcctcagggccttccggccggcgctgtacgaggtgctggcgtcgacggcgacgacgtgcgaggcggacggcggcggcgacgactgcagcgtgtgcctggccgggttccgggcgagggccgtggtgaaccgcctcccctgcggccacctcttccaccgcgcctgcctcgagacctggctccggtacgagcgcgccacgtgcccgctctgccgcgcccacgtgcccctccccgccgacgagacgccgctgctccgctacccggagttcgagtgatccggtcggtaaaaaccaccaccccggtcccccaccccacccaccccccggcgagcggtgagcggtgaccccccgtcgcgcgcgcctcggctgtgtgctgcaagttccgtgtggccttccgtgtacgcgtagcaaaccaaagaagaagaaaaaaaaggtgtaggagcagtagtagtagtgcagggttgctgtcgcttgctttcccctttcgcttcttgtattccccctcccattctctttgcgttttccgttccgtgctgtcgcctgtagcgtgtaaatactccggttcgcacttggcagcgg

SEQ ID NO: 33649 - DNA, 1863 bp, Zea mays
  Clone ID: UC-ZMFLMO17154H10_FLI
cgaagtcttccctgcgcacgtcttcttccccgtcgtgccctctgctccatcttcaccagccgcgcgctgtgaagcccctggcgtgtcccttgttttcccagccgcgcctgctccctgtcccacgctcgtccggtggcctgggcgcgttcgtgcggtccgcttcggtgcggtacgcggccagacggtagagccagagtctgccgctgccccgaaactgtagcacgcggttaggtcgcgtactgaccccgagctccagccatgagcgccgacgtcctatctctgtgctggatctccctcaactccgactgtgttgtctgctgcgtcgagctcggggcctgctcgcaagtccttcagctcgcgattggcccagattgaatcttgcttcagctcgccgtctcctttccttgctgtggtagttggccgctgctgctaggctttgctgatgcgcgtgatttgccggccatgtcccttcaccggtggtctcctcgacccgtgcgttggtcgccttgtgtgctcggccgcaggcgccgtcgagctatcgaatcccgcccaccctctgcctagctgctgcttgtcactgccccaatgctgtggccggctctggaccctgctggcgagtttttcctcagcgccgtctgtttgccggtaatcttctgctcctccccatgtcggtgatgttctccaccaccgctcaaatttccgtgctcaattcgtggatgcctcggctccgcggtattcgtcgggtctcatcctcgacgtcggtcgctcctggtgttgaacccctagcttctggtgtcacacatcttctcatcgtcgctccctgcgccagcgctcatactcgccatcagttgcgccatgttgctgtgcctccttgcgtaagtgtcgtcgggcgcttgccagcgctttctctgctcgccgacggctcaaccgttgttttcccgcgagctcgcccccatgctcgggctttgctagtagtcggctccctctatgtcgcgcccttcctgcccggtctcgcagacgccgagttcgcccaggtcgcaagcctaagtgtcctcgccgtgtccttgctcagctttttcagctcgcctgtcatctatgcgcacacgtcatcgcctcccctagccattatgcttggccgacgactcgctttgtgccactgcgtcgatgtctgcacaggcttgcgatgtcccgtcttagctgccagttttagcttttctctggccgtaaggccgtgctcctcgttcgacctcgccgttggctgcttactcctgtcgttgtgcaagctatcaggttgtctgatgctgctctagtactcgccagttggatgctgaactgaagaaggcgacgttccgatgcgtcgctcatcaagcgttcgatcgaagaattcaatcagagactgtcatcgattctgtggtttcgagttggatttaatttaggtacgataattaatcacgtgaggcggaagacgatccaagtcgaccacaagatatcgatacgcgtgagtttcttcaaaagataatgttgatggattaacccgaagatggatggacgaagcaagtattggaacaaaggctggtcgtcaagtggtcgccacctaacaaacactaacgtagtgtttattccaggcaagcccaggtcatagttttgtgctactgatggtggtgttaagtgccggtgggctcggccttcttataagtctaagtaattcttctatacttcttattgaggatggtcacataagctagcatatatttcaaacttacaaataatttataacatctcaaagttattcctttgaaccacttttgtaatcactctgataaatacaatgtaaacttgttgtaacttgtaaaatttggtagt

SEQ ID NO: 33650 - DNA, 1415 bp, Zea mays
  Clone ID: UC-ZMFLMO17155A05_FLI
ccgctgctcacacacacacacacacacacacacactctacacgcgagcgagaccacgcgccggaccgccgcaagccggtcgccgccgccgcgacctggagcttgcgagctagctctggcctcgctgcctgcgccgactgagatggacccgcgctttccgctgccggccgcggcggcgccgtccacgggcggcggcggcggcgccagagggcaccaccggcgggcccactcggagacgttcctcagcttccacgacgcggacctgctcctcgacccggacggcgacttcttctccgacctcgacttcccctccctctccgacgactctccggccgcctccgaccccaccccgccgccgcatccgcagcagcagccgccgcaggcttccccggccccacgtccgcccggcgggacccacacgcggagcctctccctcgacgccgccttcttcgagggcctcgcgtttcagggacccagtgggagcgccgggggtggaggtgggcccggccacaagaggagcggctcgatggatggggacacctcgccgttcgagggcgagtcggcgctctccagcggcctgccggactacgccaagaaggccatgcccgccgagaggatcgccgagctcgcgctcatcgaccccaagcgcgcaaagaggattctggcgaacaggcagtcggcagcgaggtcaaaggagaggaagatcatgtacactagtgaactggagaagaaggtccagactctgcaaacggaggccactacgctgtcagcacagctgaccctgctccagagggatacaactggtttaactgccgaaaacagagagctcaagcttcggttgcagtccatggaagagcaagctaaactgcgggacgctttgaatgaagccctgcgagaagaagtccagcgacttaagatagccgcaggacaagtcgggaacatgaatgggaaccccttcaatggtggactccagcagcagattccatcctatttcgtgcagcagcagcagatgccgtactttggtggccaccaggctcagcatcacagtcaaaatcaaaaccatcgtcaccagatctcatcaaatgtggggcagacgctcagtggtcagtccctaaacgactccatggatttcatgtgaggagtacaatatcagggccagtattaccatcgtataccgactgcagttcagcactgtaaagatagctaaatgtacaatgtatgcatgtgcctcattggtagtgtgtagttagctcttctttgtatcattattctgaaaatggcctcgtgtatgtcaaaaatgatgtctcttttcttctttgctggtttctggagtaatgtgttagactgactagctacctttaacaatttatgtaaatctttagcttttttttttaatggtggaaggttcttatccgt

SEQ ID NO: 33651 - DNA, 855 bp, Zea mays
  Clone ID: UC-ZMFLMO17155A07_FLI
cggcgatcaaaaccaccttcgacgactacgccgaaaccctagcctctctctcattccactccgacattcacgtgcagctgtcgggagcaggcaatggcgccggatctaagcgaactcgccgccgccgcggcagcccgtggcgcctacctcgccggcgtcggtgtcgcggtcctcctcgctgcctccttcctcccagtagccgagtcgtcctgcgtgcgagataactcattggtgagagacataagccaaatgccgcaaagcagctatgggattgaaggattgtcacatataacagttgctggtgcgctcaatcatgggatgaaggaggtggaagtgtggcttcagacaataagtccaggtcaaaggacgccaatccacaggcattcctgtgaagaagttttcactgtcctcaaagggaagggtacgctcttgatgggatcaagctcactaaagtacccagggcagccacaggaaattcctttctttcagaataccacattttcaatccctgtaaatgatccacaccaggtttggaattctgacgagcacgaagatttgcaagttcttgtgatcatatcgagaccgcctgctaagatatttttatatgatgattggagcatgcctcatacagccgcggtactgaaattccccttcgtctgggatgaggactgcttcgaagcagcaaaagacgaactctaggtcacaagtgtttcctgcaatttatctgcttcatccatgatcctgctggtgctggactactacaattctcagcactagttgtaataaagccagtgcgcttttcatgtataattctgtattgtggctcgcgaaaataaaatttggcaacggtttatg

SEQ ID NO: 33652 - DNA, 944 bp, Zea mays
  Clone ID: UC-ZMFLMO17155A10_FLI
ttttggttattaaagcagggttgaggaaggtaaaaattctcacagatctggtgtcgacacgaaggcctaagaagacttgccagggaggtggcgaagataagttctgtgttaacagtgatagtgttgaatatccatgcgatactgagtctcttgatgacgatctagatgacagagttgaggaagatgaatttggagattcaactatcaggaagtctttcagttatgggtatctgcaatctgtcaactatgttggtggcctagtttatgcccatgcaaagattgatggggagcatgaggactggatatattatagtaaccgaaaaactgatgtcgctttccatgtagagaaagtattgccatcaaccacagagaatggttgctaactgctaagcgcagtatacttccttggagaaagaggaaactgagtttacggtcgttgaaggctaaaggtgaacctctcttgaaaaaggcatatgggggaagagggaggtgatgatattgactaggatcgacgcttgctaacatcatctgatgaatctgtttcagagggatcaagaggatatggattagcaaatactatggtgtcagaatttggtgatgacaattttgtcattgaaaattgggagttgaaggagataattagttgtgatggtcgtatgaagctttcatcccagatgttctttgcatcaatagaccagagaagtgagcgagcagctggggagactgcatgtacatcacttgtagctattattgcagactggttccaagcaaatcagaatattatgcctatccagtcacagtttgacagccttatccgtgaaggatcactagagtggagaaacctttgtgagaacgagacatatagaaagcgttttcctgataagcactttgatcttgaaactgtccttcataccaaaattcacccgctgacagtttcccccagc

SEQ ID NO: 33653 - DNA, 1303 bp, Zea mays
  Clone ID: UC-ZMFLMO17155C05_FLI
ccaagattgtattacctgggcccggcttaagtttgaggattatttctcgaaccgtgtaaagcagctgacattcactttccccgaagatgcaatgactagctctggtgctcctttctggtctgctcctaagcggttcccacgacctctggagttctcgtcttccgactcaagtcaccttaacttcttgttggctgcgtccgtattaagggcagagacatttggaatccccatacctgattgggctaagaacccaaaaaaactggctgaagctgtggacaaggtcattgttccagatttccaaccaaaacaaggtgttaagatagagacagatgagaaggctactagcctatcctctgcgtctgttgatgatgctgctgtcattgaagagcttattgcaaagctggaagcaatttttaaaacattgccaccaagattccatatgaaccctatacagtttgagaaggatgatgataccaatttccatatggacttgatcgctggttttgccaacatgcgggctaggaactacagcatccctgaagttgacaagttgaaggcgaagttcatagcgggaagaatcatcccagccatcgccacctcaactgcaatggccactggccttgtctgcctggagctttacaaagtcctcgctggtgggcacaaggtcgaagactaccggaacacatttgcaaacctggcaatccccctcttctccatggcggaacctgtgccacccaagaccattaagcaccaagacatgtcgtggactgtctgggaccgctggaccataaccggcaacatcacgctgagggggctcctggggtggctcaaggagaagggcttgaacgcctacagcatatcctgtgggacctcgctgctgtacaactccatgttccccaggcacaaggaccggctggacaagaaggtggtggatgtggccagggaggtggccaaggtggaggtgccatcataccgccgccatctggacgttgtggtggcctgtgaggatgacgacgacaatgatgtcgacgtcccacttgtgtccatttactttcggtaaagaggggctcacggcccgtttacatgttgatcctgtgcgatatttgtcaatgtttgtcagaaggatcaagtgtataatttgcgattgcaaccctgaactagattgtgtttaagcacatactgatgatttcctgtgctgccatctgggtagagttggctgggaattgtcgctgagatttggaccactgttatggaattcttgagcataacattatgatagctgttgcatgatactgtcgtcgct

SEQ ID NO: 33654 - DNA, 805 bp, Zea mays
  Clone ID: UC-ZMFLMO17155D04_FLI
gtaactttctgcagggccaagcgccgccaaaaggcatcagcagagaagaaggcgaccgtggccgcaagggataagcagttacattcaggcgtattttaagctcgagactttgaagcaagaccttaaatttcgagtctgcaaattctcaaactaatccagcttcaactaatctgcattcctccctccgcccctagacgaggggaagcaagctacataaggaacatatccggccttcaagtatttatttcaacctcaatcaggccttgaaatttgaatgtgtaaggatctgctgctaaactattttactgctagcaagaccacaaattgtgaatttcattcagaacagactttccaactttcccgagcagatagagaaacagtccagagacaagaatatgatctccaggtttggtgcatccttataaatgacaaagtccagttcaggatgcaatggcctcaatatgcagaattgcaagtgaacggtattcctgtacgagtaatgaccaggcccggttctcagttactagggataaatgggcgggatgatgggccactggtaaccacatgcagtagagaagggatcaacaaaattagcttatctagagtggatgctcgaaccttttgctttggagttcgaattgttaggaggactgttcctcaggttttgttcatttagctttctacttatcatatagttgaaatgactaggttcacatgattttctgttttgtaaatggtccctatgtattgtgaacttttatcttgtttcatgttaaatatcatctagacagcaatattttgtgtt

SEQ ID NO: 33655 - DNA, 1176 bp, Zea mays
  Clone ID: UC-ZMFLMO17155E03_FLI
agggacacaagaaacatgatggttgacaacatgttgaacactttccatacattgttgatggatgatccaaattctcctctgaacttccgggaagttttcaagaatgaattatttcgcttatccctggttcaggctttaggcgaggatgtgagttcaatctatgtggaagagtatggaaaggttatatcaaaggaggaaatctacaaggccactgtggttgacatgatgatgtgtgcaattgaggtcgactggagggatttcttcccgtacctcagctggattccaaataggaccttcgaaacaagagtactgactaccgaagcgaggagaactaccgtgatgcaagccttgatcaagcagcaaaaggaaagaattgcacgtggggagactaggatatcctacctggacttcctgctggcagagaatacactgactgatgaacaattactaatgctggtgtgggaagcagtcatagaagctgctgatactactttggtcacgaccgagtgggctatgtatgagattgcgaagcacccagaaaaacaggaatacctttatcaagaaatccaaaaagtctgcggcaataagacagttaccgaggatcacctgccagagttaccgtacttgaacgcggtgttccatgagaccatgaggcggcattctccagttccattagtgcctccaagattggtccatgagaataccaacttggctggctatgaggttccagccggcacagagataatcatcaatctgtacgggtgcaacatgaacaaaaacgactgggccgagcctgaggaatggaagccagagaggtttctggacgggaggtttgaagcagtggatatgcacaagaccatggcctttggcgcaggaaggagggcctgtgctggcagcatgcaggcgatgaacatctcgtgcaccgccatcggcaggtttgtgcaagagtttgcctggaggctcgaggaaggcgacgaggacaaggttgacaccatccagcttacaaccaacaggctttacccactgcatgtgtacctcgcacctagaggaaggaaatgagcctctactgtaaacgggtttcactgtactaatttaaaaaaataatttgctgttgcctgtgtatgacttttggatgatctctatgctgtgaagttgttggtctgaaattgggttaac

SEQ ID NO: 33656 - DNA, 996 bp, Zea mays
  Clone ID: UC-ZMFLMO17155E06_FLI
ggaaggttttcagtttgattatgtttttgactggaccattctaaagtaccaacaggcacagatgaccactgctccacctcgtgcaattgctccagcagtaggacaaagctctgggatggctcctgtggcaaacaacaatagacattcaggcactgaagagggaaggagaagcgggtggtctgacatggacccaatgcgacgccaggctccaccaccagttataaatgcaggcagcctagccaagcagaagtcgcctgttcggcctgagacatcaacatcgaaagatgctgtgttctccagttcgacttttttgggacgttcaagcggatcgtcaaggcggcctgctgtatctagtagccgagagctaagcactgaagcggagcaaacacgtagccgcacaactgacgcgagcccaggggcattccagaggtctggagctccacggtggagcccgcagatgcctgattcctcggacggcaggcgttcgtcttccagcaggcgccactcatctaaccccaagaactacgagtctaccattaggggcatgcagggcctaaactttgatggcgatgacagggtgcactattagcatctcatctgtctgggagggtgcatcgcctcccctccccatagatggatgtaccaaggacggccagataataagaggtttgggtgagtgagcccgagcagtccgggtgacgtctcgtaggaactgtgtatgctgcttagcctctgttgttgtacaggcttgtcatttgtttggtctgcgcttaccggtagggcgcgccttgtccggtgaacgatgatggtgtattatgagagggatttcttaaggggttcacgtttggtgtgcttgggttgctttgatagaaacatttgggagaggtttatcgcgcctgctctgctctctcatgtaactccagattgctgagctggcacctgctctgctctctcatgtaatgtaactccagattcctgagctgctatgtttttttt

SEQ ID NO: 33657 - DNA, 1712 bp, Zea mays
  Clone ID: UC-ZMFLMO17155F04_FLI
gccagcacagagattcgcgcctccttcttgattccttcaccgaggttggggccttcgatcacaagtattacattcatggcgaggaaaggtgtcggacatacgtggatcgaatgattagtgcttcaactataaatttgcatccagtaagggagggtgtttcagcaatagaattcgatagaaagggaatatacattgcatcagtgacactctcagggtgtctgacggtgcatgactttgagactttgtactgctctaaatatggcccaccatgcagtatgccagatgaatcatcaaattatgtgctccatatatctaaccgaattcccctaaatgctgtccgatggaatccaggaaaccaagacgagattgcttgcacatcaagtcaaagtgataacgttttcctctttgatattggctatgtctcatctacaccaactgaagttttgcataaaggaaaatcgaaattctcctcgctctactctgaatactgcaagagtttgactgatataacttttacttcagatgataagtcacggatatttgcatctggccttgatggggcagtgtacatgtgggacatgcgatcaagtaagacacactgtcttgagcttgtggcatctccagaagctcagttcaacactgtcaagttaactgtggataatcggactgtgtttggtgcaactaaaaatggcacaattcatgtttgggatctccgtggagggagggcatcagctgcttttcaaagccacaacgaggttcagcaattgatgtcagtgaaattatcaacgttattgggcaaaattgcatcgctaaaggaacaatcaaacattgtttcaagtccgattctgtcgatagacttcaaccctagttgttcatatcaattggccttccatcttgatgatggctggtctggagtcctgaatgttaacaatctcaatgtgactcatcttcactgccctcctcctgcttggttggagggcacagacttggtgctgcaaaagcaattaagaaagccaacctggctgctgacatcttcaatctatgcagttggatcttcctcatatgatggaatctatctactagactttcatccggataccagctctgcatgccatgtggactacaaagaggaaacaagagtctccggggaaaatcaacctgcaggaaacaagtttgttcctttatcccaaagggtgctttcctgtgcagcccatccactcagtcacaccataattgctggtacacagttctcatcgttgctcatgttatcacaaaagtacaagagtatcagaaatacagagccttgatgacatgccgtttcctccacgcagcatctacaatcgtgcatctgcagaatcacaatggtgtttgttcatctccatcgtgcagtaaagaattatgtgcagcatgtaaaccttgctttgctggtgcattggacgctcactaggttcgaagtgctgccagcaataaccgtctttcaagaactgatgaatacgcagccattcacaaaaatgcacccatagagaggaaatctcttgctataaaaaaaaaagaatggcaagagatttcctcccccatagatctcttctaatcctcgtcaccaaatcagctctaaagagttggatcaccaccactgtacacatcggctctgtttttcttggacatgattcttgtaatcgtcgttttctagtatcgctagattcttgtcgatt

SEQ ID NO: 33658 - DNA, 1805 bp, Zea mays
  Clone ID: UC-ZMFLMO17155F09_FLI
ggccccagcccggcaagcagacatgggcaaccgtgcgtcgcgccaccaccgccaagccgccgagcagcaaccggcgacgccgaccctgccgaagccccagccccagatccagccgccgcctccgcctccgccgacgcagacgcagcagtaccagcaggcgccgccgcagtcgcagcagaagccgaagccggcggcggacgtgggggcggtggggcgcgtgctggggcggcccatggaggacgtgcgcgcgacctacactttcggccgcgagctcgggcggggccagttcggggtcacctacctcgtcacgcactcggagaccgggcagcgcttcgcctgcaagtccatcgccacgcggaagctcgtccaccgcgacgacattgaggacgtgcgccgggaggtgcagatcatgcaccacctcacgggccaccgcaacatcgtcgagctccggggagcatacgaggacaggcactcggtcaaccttgttatggagctctgcgagggcggggagctcttcgaccgcatcatagccaagggccactacaccgagcgagccgccgcctcgctctgccgcgagatcgtcgccgtcgtccacagctgccactccatgggggtcttccatcgggatctcaagcccgagaacttcctgttcctcaataacaaggaggactccccgctcaaggccacggacttcggtctctccgtcttcttcaagcacggggagacgtttaaggatcttgtgggaagtgcatattatgttgctcctgaggtactgaaacggaaatatggggcagaggctgacatatggagtgctggggtcattctttacatccttctgtctggtgttcctcctttttgggcagagaatgaggatggcatatttgatgctgtcttgcgcggtcacatcgatttctcttctgacccttggccttcaatatccaatggtgcaaaggatttggttaagaagatgctgcgacaagacccaaaagaacgcctgactgctgctgaaattttgaaccacccatggattagagaggatggagaggccccagataagccacttgacattactgtcattggtagaatgaaacagttcagggcaatgaacaagctcaagaaagttgcattgaaggttgtggctgagaacttatcagatgaagagattatgggcctaaaagaaatgttcagatccctggatacagataacagtgggacaattactcttgaagagctaagatctggtttaccaaaacttggtacaaaaatttctgaatcagaaattaaacaattgatggaggcggctgatgttgatggaaatggtaccattgattatgcggagtttatatcagccacaatgcatttgaatagattggagaaggaagaccacatactcaaagcttttgaatatttcgataaggatcacagcggatacataaccgtagatgagttggaagaagctttgaagaagtatgatatgggagatgacaaaactataaaagaaatcattgctgaagtagatacagatcatgatggaagaattaattaccaggagtttgttgccatgatgaggaacaacagccctgagattgttccaaatcggaggcgcatgttctaactgtcatggacaatcacattgaatactttcaagaacaatctgcccttagacataatctttgtcccattttctttttggaacagccgttaagaagactccttaatttgagatccatgtctctgctgcccggacctgtttgtcccaaaatagggtggtgttatagtgattcgtacttgatgctttgagcttc

SEQ ID NO: 33659 - DNA, 684 bp, Zea mays
  Clone ID: UC-ZMFLMO17155G02_FLI
atgtaacaccaaagcagctgcctatagtcatcagtgcaaaacgaaccggcaacatagctcgctttatgaaccacagctgctcacctaatgtgttttggcaaccagttctctatgatcatggtgatgagggatatccacatattgcattctttgcaattaagcatattcctccaatgacagagcttacctatgattatggccagaaccagcgtaatagtattcaaatgggaacccattctggttttcggaagtctaaaagttgcttatgttggtccccgaagtgtagaggttcctttggctaataaccagccctataaggaatatattggatcataatactccatttcaaagttacacctaagatatctgctggtcgacttttatattcagctcccaaaaatctgtcacaagtttgtgagagcaactgaattgtctttaccagcagaagcagcccgtcatggtggcctgtatgaatcagcaggggtctcctatgtcctaggcgttccatgcaccatcgaataaatccacccctcttcatgttagaatgggaaacggggatgtgttttgcacaaattatctgtcatgcagtcgtcgtattaagttatcttgaactagtttgtagtcatcctctgagaatgcatgctgtgcactttgtagtaatatatgcaggttgttatcccacct

SEQ ID NO: 33660 - DNA, 1629 bp, Zea mays
  Clone ID: UC-ZMFLMO17155H06_FLI
cctcaaggacaagtacagcctggggcggcggctcgggcaggggcagttcggcacgacgcacctgtgcgtggagcgcgccacggggaaggagctcgcgtgcaagtcgatcctgaagcgcaagctgggcagcgacgacgacgtggaggacgtgcggcgggagatccagataatgcaccacctggcgggccaccccagcgtggtcggcatccgcggcgcgtacgaggacgccgtggccgtgcacctcgtcatggagctctgcggcggcggcgagctgttcgaccggatcgtgcggaggggccactacaccgagaggaaggccgccgagctcgcccgcgtcatcgtcggcgtcgtggaggcgtgccactccatgggcgtcatgcaccgggacctcaagcccgagaacttcctcttcgctgaccactcggaggaggccgctctcaagaccattgacttcggtctctccatcttctttcgccctggccaaattttcaccgacgtcgtgggcagcccttactacgtggcgccggaggtactgaagaagagatacgggccagaggcggacgtctggagcgctggcgtaatcatctacatcctgctgtgcggagtgccgccattctgggcagagaacgagcagggcatattcgaggaggttctgcacgggaggctggacttcgagtcggagccgtggcccagcatctccgacggcgccaaggatctcgtgaggaggatgcttgtcagggacccgaggaagagactgaccgctcacgaagttctacggcatccgtgggttcaggtcggtggagtggctcctgacaggccgctggactcggccgttctgtctcgcatgaagcagttctcggctatgaataagctgaagaagatggctcttagggtgatcgccgagaacctgtcggaggacgagatcgccgggctgagggagatgttcaagatgatcgacgcggacaacagcgggcagatcacgttcgaggagctcaaggttgggctggagaaggtgggcgccaacctgcaggagtcggagatctacgcgctcatgcaagccgcggacgtggacaacaacggcacgatcgactacggcgagttcatcgcggccacgctgcacctgaacaaggtggagcgggaggaccacctgttcgcggcgttccagtacttcgacaaggacggcagcggctacatcaccgccgacgagctgcaggtggcgtgcgaggagttcggcctgggcgacgtccagctggaggacttgatcggggaagtggaccaggacaacgacgggcgcatagactacaacgagttcgtggcgatgatgcagaagccgacggtgggggtgctcccgaagaaggccgacctgcagaacagcttcagtatcgggttcagggaggcgctcaggatggcctagacctctctgtctctgctcccctgctgcctgcgtgtaggtgtagatgattgaattgagtgcatgtcagtgcagttgctgtagagaccaccgtagcatagagagctgatgagatgcgagttgaggcgggccaggagacgtgtacatgtgccatagtccatagccatacaggcggccctgcagcggtttggctgcttggttccaaacggttctgtttc

SEQ ID NO: 33661 - DNA, 1146 bp, Zea mays
  Clone ID: UC-ZMFLMO17155H10_FLI
tttggaattgacccaaacaatgcttttgccttttgggactgggttggcggccgttatagtgtttgcagtgctgttggcgttctgccattatctcttcagtatggctttccaattgtccagaaatttttggagggagcttccagcatcgacaaccacttctactcatcttcatttgagaaaaatatacctgtacttcttggtttgctgagtgtgtggaatgtttcatttcttggttatccagctagggcaatattgccatattctcaggcacttgagaagttggcaccacatatacagcagcttagcatggagagtaacgggaagggtgtttccattgatggcgcccaactttcctttgagacaggtgaaattgattttggtgaacctggaactaatggccagcacagcttctatcaattaatccatcagggaagggttatcccttgcgactttattggtgttgttaaaagtcagcagcctgtttacttgaaaggggaaactgtgagtaatcatgatgagcttatgtccaatttctttgcccaacctgatgcacttgcttatggaaagactcctgaacagttgcacagtgagaaagttccagaaaatcttatccctcataagacttttaagggcaaccggccatcgctaagtttgcttctgcctacactatccgcatatgaggttggacagcttttatccatctatgagcaccggattgcagttcagggcttcatatggggaattaactcatttgaccagtggggagtggagctagggaagtcactcgcttctcaagtgaggaaacagctgcatggaacccggatggaaggaaagcctgttgagggttttaaccacagcacatcaagtttgcttgcacgatatcttgctgtcaagccatccaccccgtatgatactaccgtgctgccgaaggtgtaattactcagttgtttttgacatgccaattgctgagttctgacttggcaaggttgagcataagtctttcttcattttgggagttatcacagagccagtttggcagtgctgtagttttggttttacctactctttgtagaagaaaagtgaagagtggatattatggaacaaaatatatacctacggcagcacgcagcatgatgaaacatattt

SEQ ID NO: 33662 - DNA, 2851 bp, Zea mays
  Clone ID: UC-ZMFLMO17156B07_FLI
gcgccagctgctcccgtcgctcgtatatattactgcgaagtaaccctagctgccaccagcctcagcctcccctctcggctcccccacacggcactccagcccccagcctgccactcaaacagtacaccaccgccacaagcccgggccgaataagtctacagggcagcagggctaccgctgccgccgcacttcgccggcaaagaacgccctccagatcaacccctgcgatggagtccacggtgaacccgaaggcgtacccgctggctgatgtgcagctaacgatgggtatcctcgatatcatccagcactccactaactacaagcagctcaagaagggagcgaacgaagcgatgaataccttgaatagggggatatcagagtttgttgtgatggcggcggatacagagcctcttgagatcctactccacctccccttgttaggtgaggataagacaaaatcatctcatacaagaggtgatgattgaagactactgaattgcttctgcattctaaaaaggataagatacccagccttcatcgatttcatgtgcgcaggctgcatccatgtctgcatcagcagactccgtcgcacctgaagattgcctagccagacagctaccagagatattgggagacttagctgacagaactggtgatggtgatagctctgcttccatcactgctgattctaggtacagcctccgcctctttgtaccttgttgctgtagtctatttattaagtattccctttgctaagatttaccacaaatccaaagctgatttagaagtgtctcagcctttcttacttttactagattttgtgcatgttttcttcttttgtttcgttcatgtttttctagcggtctgcaacatggattgtgtgggagctttggatggttacagttcttttttgggaggaaggacaacggtagcaggtttagtaggccttcttatctgacaatagaaatatagttaataaataaatttgagataaatgcgcttaaaaggaaggctcagaaggcggcgaacccagcgagcggtgtggcaaggctcacaagcgcgagagcaggctacactgcagtggttgcaatcctgctattgtcctcatcggtgtgttcttttcctgaccaagtaaaacataacagcaattcatttttaccatgaaggaaattctttgcaggtaacattgtattttactgtaactttttctttgatgtttcccttcttgatagtgtaaattgttctgtatccgattagaaatagagaacagtgaatgactacaaattagataggataaccagccttacaaaaatcctaaataatacccatccgttccaataacataagagccctaattattttacttttagcgtaagtcaaactgtctagaaagttatacaaatatctactgctcccgttttaaattataaatcgttctacttggtgctatgcttataatttaaaatagaaagtacacaacactagatgacagaactatgataatctatgccatggtggatttaataaaaactattttaattttataattatcgacgtaatttctatagacttaaagtcaatgccctatagacttagttaatgttaataagagaaagatagaagacttacatttataaaataaatggagtattactacaaatatattgagttattacaataaatacagatcaattatacttaagacaacatcaacctctcaatttagagcaaactatattataatatgaagaatacagatcattgttgcaatgggatgtattcttccattttgtttattacatacaattttttaaaaaatacatgctatctcctcaaaatgctgcccatcagcttcgtttggtcatcccatcaatttgctaggaacagtagcagtgtagctttactttgtcagcagctaccagtgagagaggtccttgtgggttgaccatggacgttgaatccttgatggatggtcagatcatgtatttttgttctcataaaatattcatgcatcattataattttaatacaaaagcataatcgtacaaacaatgtataagcttagagactagatcaacatatttgtaaacctcaatccaaacatctagcacatatgtaggggagctaatactaccaaatagggattatgaaacttgtcaaactttttttcaagtgtgcaaaatgctcaagcaagcaacacaaatccataccaagttcatggttcatatttgtgtcaagtactagcctggaatttaaatataattcatgaggcaggctgagtcccgtcaacggaacgctagcttcactaagcatcggcagccatgttcggctccaccaaacgagactatggaagccaaggctattagaaggcagtgaaacatattcacttagtgagcggcttatcatataaaacggagctctcgaagaacaccagcagaataatgaacatacaccacagggggagcgacttcatggttttttaatgaaatacttacccatctctaggagcgcaagccatgattccaacgacactgtgtgcacatgtgaaggccctgcaaccgcttgctaggccacaccaatcctgcttacttattgaagatacatatggtgccacctaaataaaagttgtttcttgttatgtctgtccttgacatatcaacagattagtgttgggttgcattcatggggtgtttaaatctctgagaaggcaagaagtcattgttatcgacattgtggtcgttaggcacagaagtactcaaaagtgagagctacttgttgccaccaaatggagggcgatataggttgatagttaaattcagcgctctatatagaaggagcagattttgtttag

SEQ ID NO: 33663 - DNA, 1434 bp, Zea mays
  Clone ID: UC-ZMFLMO17156B10_FLI
gcgacgccgacgcgaacacctccgcggtcgtcttccccggcgccccgcaccgaggcggtagtcccgccggactgggactccgctgtatcgaccgtctcctcccaccccacgcccccggtggtcgtcgtgtgcgggcccaagaacagcggcaagtccaccttctcccgtgtcctcctcaacgcgctgctccccaggcatggtaaggttgcttacctggacaccgacgtggggcagccggagttcgggccgccgggatgcctctcgttccatgtcctcgacgaagctatcgtagatttgatgaacccaagtctacgggaagctgaaaggtgctacttctttggtgacatttcatcgaaaagagatccagaagcatatctgaattgtctattccattcgtatgactactttgttggaaaatatcgatgcgatgagaatgaaatgctgccactaattgtcaatacacctggatgggtaaaaggtgctggctttgatatgctcgtagagatgctaaggtatatctgccccacaatagttgttcagatacgcatcacaatcaagaacaaaaatctccctgatggagggttttggttagatggtgggcaaacaggacctatgatgattaacatcgatgctgcatttcatgatgcctcaaatagatcgttgttaattcagaaagattcatgtggaatgcgtgaacgccgacttgtagagtatttgaaacaatgttttccaagcaacatctctctttcaactaataaggagcttgcttatgccctagcttcacttccaccttatcaagtaccattttcagatgttgcaattgtgcatcttcattgtaaggtacctgctggtgagatatggcatagtctgaatgcaaccatagttggtttggcagtttccaatgcatctgagggaaccagatcaatcccttactgtgttgggcttggcatcataaggggcgtcgatattcaaaaaggcctgttatatctaataactcctgttcctctccagcgcctgcaaagcgttgatcttttgcaacagggtctcattgagatacctactgctcttttgcaggtccgcggatgtgtgtcgccctacatgtcgacgaatgtgcttcacaagatatctgaaagggatttgtatgctgggtgatgttggcgcaggcagtgtccgagatagacctgtgtttgctggtttctgacccggagagcatgaaccggactgtagtttcaggctgcccagcggttgcctctagctcctaagattagatatgtgacctgtgatgtgcaactcctctgtcaaattagtagtcacggagatctgaatgctacttcctggattcattgaattgaaattctataattctgtggcaagttactcactttgcttttgcctttgaattgattagtataaagatattgattaattggtatc

SEQ ID NO: 33664 - DNA, 1934 bp, Zea mays
  Clone ID: UC-ZMFLMO17156D05_FLI
cgggagacagcgcagctcgggttcgggttcgggggggcggtagccacctgagcaggatgtttaactggaacgacgagcagcaccaggtaagggatgcaatatgggctgaattcaatgagtgtgatgaccatattgtgccttgtcctaaaggtgcacaagatagcacgatagttagttccagggttcgcaagaacaatgaggaagaggtggctagtattgctgccatcactgaacagtctgcaggtgttcaaaatggacatcaagggatggaaaagcagactgcaagtcacacaagtgcacatatttcagccacacaaattgacatggaatcctggcctgatcttccttccctgaatcctacacttgatagaaattatagtgatgacaacatagcatccacatatctggatttttgtgctgcaaccagtttacaagaagtgaccggaaattctacagagcaactagatggtaaatcagaagtgtttggtaatgatcaagaagaaaagagtaacagtttccttgattgcgactggggcaatattggagattttgatgattttgaccgtctatttagccatagtgactccatatttggtaatgagatagttgccaacgacagtgattttctttctgcatcttcgaatttgatggatactgctgtgctatcaatcccaattccggtcgaagcacataagaggccagtgtggtcacgtagaaaaccagaggaaagaggtaaaagtaaaatatccagcagtacaagtggcttctcccacagcaaagtagagagttcatcgacgaatttgcaaactcctatggaacctgtacagactcctcaatatgcactgttccaggatagcaagaagataggagaagttcagcatgctaatcagtttatgtttcctggatatgggtatcctgcatatccatttcctaccattccgttagtgtcaaacattcaagctgaaggctatcagacaaaaccagctggcacaagcaaccgaacttcggaagattacctaaaacagtcaagttccacagaaatgtcacaagatataccatcaagaccactaacaatgacaccacaagaaaagatagaaaagcttaggcgccggcaacaaatgcaagcactgatagctattcagcaacaacagcaacagtttggtcaacagggtcctggcagtgacacaatggtgtctcaagcatacacccctggtaacaaaaatccggattccttagggagttcaattgtcatagatgaaaacacaaataaggttatttcgcctgagatgattccaactgaccatgaccgggttcacaagagttctgcaatttcagatgatccctttatagaggaaaaaatatattatcagctacaagatgctcttggcaagttggataccaaaactcgactatgcattcgagatagtttgcttcgtttggtccatagtgcaacagagagaaagattgatggtgataggagcactaacaagactaataaagatgaagatgaagcttcggaagacgcatctactaggaaaacaaggtctccaaacaaggaagcagaaacaaccactaatccaattgatcgtatagtggcccatttgctgttccacagacattgctccaaggttgcaaaagcaacaaaagaaataatatcgtcaatccccttgactctagaacctgagccgaaggtaccctttggaactcctagggttccatcaaaagatcaacgagatgagcaagaaattgtgttgcaaccatcacaataatgtgagatgtgctagaagataaggttttactcaatttgagtaaacttatttgcatttagttagcctatgaatctaatgtcgtccttctaatgagtatagtacacatgctgattaatcaactgttcaggataaaaaattatgcaaatccagtgatgatggcagtct

SEQ ID NO: 33665 - DNA, 2337 bp, Zea mays
  Clone ID: UC-ZMFLMO17156D10_FLI
caggggtcctggacagagaaaaataaagccagcaagagttggtggttttatttatgacggcaatgaagttgatttagatgcttcaaaggatgcagacttctcgatggaaccatgctcaaaatcaaagaagaaatctttgaaaaagactgtaaaacccagggatgaagtggttgctgtaaatggacgaaacagcacagggaatgttaaagcatcattgtcctccaatgaacaaaacaaatctcttcctcttatcacggcaaaacagtatgcctgtcgtgctgcacatttgtcttcccttgtagtttcatggtctccagttgtgtcattaagtgatagaacttcttgtttattgaggcattggtgcattcttgctgttggctctaaatctggaaatatttctttttggaaactatataagccagaatattacacaatagatgctggagtggttaccagtgatccgatgctcatcggggttttgcatgctcatgaatcatgggtcaatgccataacttggcaagttctttctgcgggctcttcaaaatcctcgttgcttttagctactggatgctcagatggaagtgttaagatatggttagggaatattgaagggttaaatcaatgtgcaattggagaagaagtgccatttgtgttagttgctgaggttgccgctaatttatcagctccagtgtcgtcaatctcattgggcatacctgcccggtctcaacatgaggttagtttggcaattggaagagtatccgggttactagaaatatggatatggaatgcatctaccaacaaaattgagagttccagtgcatggcatgcacatgatcaagtggtgacaggtttacgatgggctatcgatggcaattgtttattcagctgcagtcaggacaattctacacgttgttggatatctcacgaaaaccaccttgaagaattttttttgcattcagaattttcagagctaagggagtcagaagatctatcaaaagtttctgatcgatgctatggtcttacgctatcacctggagaagagataattgctgtggtccgcagtttggatctgaaccttttgaaccagatgtatcaagtcaggacacaaaaggcggtggtcgagttcatttggatcggtggccaatttgttggtattccactggacgggagtatcgatatttgcagtccgcagtctgcggacttatcctcaagtaaccttatgtggtggggatccaacatcttgtggtcgctgaagaaatacgaaaatgtcgaaaagaggcttgtgttgtgggacgttgtagctgcgctgcaagagctgaagaaaaccgcgcccgcctttctggagactctagtgcacagttgggcctcagctttatttgcgggcgactcacagtgtgtttctatcactgcccagtcatcacgctcgatgcatgacatgatgccccatgtcagctcgcggaagctgcacttactgaacataatctgcagaaaagtgatgctcggcaatcatgcgcggcatggtcctggtgctggaaacaacagtaatgatggaacaactgatttctggagcactcttttggtagcgagtgaaacggagctgcgagagaggctggtgggtttcacctttgccgcggtcgtgaaacggacagcgtgtctgttcaacggcacctccaccgcaaattgctggttccctgtcggcgtcgcccagatggattcttgggtatccatgaactacgaaaaggtgcacggtcagctgcagtcgatcagatcgaagatcaaagagctaggaagcaggatcgacggatactccgacgtagaaagctgcccctactgctcttcgccggtccgtttcgagtcgcctgacgtggccatctgcggagaaaggcacacgctgtcgcggtgcaggacatccatgaccctgtgctccgtcgcgcagccagtgtggcactgctcgtgctgcgggggcacggtcgacaagctgctgccggagtcgttcttcaccatgcctttggacgccgtccgtgacgacaaaggatcgctcgatctgtcggcagcctccgccccgctttgccccttctgcggcgtcctgctgcagaggtcgatgccggcgttcctgctctccacctcgccggtatagtcttcggatgcccccaggtgttacatgcagtagcaatgcaatgggaatatcgtagtggagccaactaccaagtttgttgtagctgatgctgtatggctgcagagtggcagtgccgtcattggggctcgaaatgtttgtgataggttttgtgacttctttctgcttagcccctctaatatatctcgagatacctatttttt

SEQ ID NO: 33666 - DNA, 1148 bp, Zea mays
  Clone ID: UC-ZMFLMO17156E04_FLI
gattatttgtccttgtcttctaggagcaagacatggttgccagaacaagaatctatcgtcggaggggccgcaatcgaaagctgaaatatacttggaagtctgcagggcatccaactgttagaaaaagaattggtgatgggaagcaatggtacacacaatataacccatgcgtgtgccagcaaatgtgtggtaaagattgcccctgtgtggaaaatggaacttgctgcgaaaagtactgtgggtgttcgaagagctgcaaaaacaagtttagaggctgtcattgtgcaaaaagtcaatgcagaagcagacagtgcccctgttttgcagccagtcgtgaatgtgatccagatgtttgtaggaattgttgggtgagctgtggagatggttcactaggtgagccacctgccagaggtgatggttatcagtgtggaaatatgaagctccttttgaaacaacaacaaaggattttgttaggaagatctgatgttgcaggttggggtgcattcatcaagaatcctgtaaataaaaatgattatcttggagaatatactggtgaattgatctctcacaaggaagcagacaaacgtggcaaaatttatgaccgggcaaactcatcatttctgtttgatttaaatgaccagtatgtgttggatgcttatcgcaagggggacaaattaaagtttgcaaatcactcatctaaccccaactgctatgcaaaggtgatgctggtggctggcgaccatcgggttggtatctatgcgaaggagcatattgaggctagtgaggaactcttctatgattatcgttatgggcctgaccaggctccagcttgggctaggagacccgaagggtcaaagaaggacgaagcatccgtctctcaccatcgagcacacaaagttgctcgatagctgaagagcagctccggatgatacaatatgcagtaaattatatatttaatacatgatttagtcctagttcattatacgaggacttcgttggtagataagcatattgtatattcattagtgaataaactcccatacatcaagttggggaataagtgcatataaatattttttaccttaggtcggaaggtgacaaactgacaaccttgttaggttgagtaaagttagtgcttacaggttttc

SEQ ID NO: 33667 - DNA, 1505 bp, Zea mays
  Clone ID: UC-ZMFLMO17156F11_FLI
gcaggcattgctggatcttatagagtttgtcgagtcgaccaacgctcgcttctcggaggcagccatcgcggcctgctctaggatgtgtgccatcaacctgttccgggcgttccctccgagttgcagatctggctcatcaggtggtggtgagggcgacgaggaagagccaatgttcgaccccgcgtggtgccacctgcagcttgtttatgagctgctgctgaaatttatcggatcctcgtccttggacgcgaaggtagggaagaagcactttgatcactcattcatcgtgaagctccttaatcttcttgactccgaggatccaagagagagggattgcttgaaaactattctgcacagggtatacgggaagttcatggtacaccgtcctttcatccgcaaagcagtgagcaacatattctaccagtttgtctttgagactgatcggcacaatgggatcgcggagctgctggaggtctttggcagtgtcattagtgggtttgccttgcctctgaaagaagaacacaagatctttctttggagagttctgattcctttacacaaaccaaaatctgttggtgtgtatcttcagcagttgacctactgtgtaacacagtttctggaaaaggacccaaagcttgcaagctcagtgatcattggtttgttaagatattggccgataacaaactgtcagaaggaagtgatgtttctcagtgagattgaagagatcttggagtctaccagccaagcagaatttcagaaatgtatggtaccattgtttcggcgaattgctcattgtattaccagttcccacttccaggttgctgaaagagcgctcttcgtatggaacaatgatcacattatcagcttgattgcacaaaaccgccaagtgatcatgcctcttgttgttccagcgctagagcagaacattcagaatcactggaaccaggcggtcctgaatctgaccgtgaatgtcaagaaaatgttatctgagatggacgacgatctcttctcgtcatgcctggccaagtacaaggacgaagaagaaaaacgcgcgtcgctagaagcgaagcgtagacttacgtgggagaagctcgagtcagctgcagctttccagccagtgactggccatacagccgtcctagtaggccaccggccgtcagcaaatctgatcgccaccatgatctagctcatgcatgtatgccgaacaagcgaaggtggtgctctcccccccttttggtgaggcgcagcaagtgtagtgttctctattttgctcctgtttattattattattttccttttgctggcatgggtaatcagtgtagtagtaagttgtaactatttccggatgtttatgttcttaaggcaaggatacctgtaacttaagactgccgagtgctggcactctacatgtatctttgcctgtttatggatgaacaggtgtcctacagtttaatttcactttccatcttgcctataggctatatatatagatgactggtatgcag

SEQ ID NO: 33668 - DNA, 2371 bp, Zea mays
  Clone ID: UC-ZMFLMO17156G04_FLI
gtcgaaaccgctcacctgctacaacctcaggtgaccagatcacacatcaaaatgctatgcagaactccaactctgacacaacccaagggaagagggatgctcaaggtactacagagaagcatgtgaagccatatttgaagaaccctcagaatgagcagcactttccaggttctgacccagctcatgggtcagccaatgttagaattgccggtggaactgttggacctgctcaacgtcatgttggagttgttaattctactaggcaatttgctgcccgttcgggttctcagatgcatgcaccaagtggttcttatgcaaatattcagagggggagttttacctcagtaggggcatctgggcgttactcagctttcatgtctagaaacattcaacaaaaccagagacctgatacaatgtttcgtggaaggcccactgttagatcttttgttgcacaaaacaccaacagatatcaccagggttctactagcaaccaaaaagtacaccctattaaggagtggaagccaaaatcgacaaagaagtcaccgaccattgatgcagataacagtatagctgatgctacatctccttcagctagcaactgtgaaagtgccaacacactgaatgtaaacgaattgcctgaaaaaatttcacaaactaacttgcatgaggtggagcatgttattattccggaacatcttcgtgtgccagaatatgagcagaccaagttaaggtttggcagtttcacatctggtttggattcggaacaagtatctgcctcgaccccacaagacactgagcaaccagaacatgtacaagagtcagttcaacaggcaagtgaatatgatagtttggatgctggacctgatgacatggatgagcaagctagatcttcacaacacctgtccacatcaacggctgagatttccttgcccccatctgaggatagtgatcgaatgagtggtcaagtagagaatgatgatggcctgggcttagttcagagcgacactccaattggagcagcagacggtgacaatacccaaatcacctcgactttgactgctttttcggcttatagtcatgaagatcctaatatgcatacaaacaatgaggcccagttatacggactggtggagcctaatgtacatccgcaagtattagcttcctcttctcaggggtacccttcagaaaacccggaagcagataatgctgtgcaagtcttcaggatgccagaatctaatgttcactcacaagttctcccttccacatctgaggctttaaatccacagattgtgagcaacagccctgtttcgatctcgtcacagcagcagcagcatatctcccagcaacaagccgcagcacagatgtaccctcaaatgcatgtgcagcattttccaaatttcatgccatatcgacaactctattctccagtttaccccatgcctatgccaaactattcgccaaatgtcccttatccatcaaatggaaataattatcttcagatgcccagtggaggttcacatttaactgcaggaagcgtgaagtatggagtttcacagtttaaaccactcccatctggtaacccttctggctatggaaattacactcatccagctggttttacaatgggttctcctggtgttattggagccacagttggtgttgatgatgtcaataggatgaagtacaaggacaacatttatgcctcaactccacaggtcgagacatctgacatctggattcagcaagctagagagatgccacctatgcaggttccttcatattacaacataccaggtcaagcaacaccaggtgcttttgtgccaaatccagcaaatgcatctttcaatgctacagctcaatcctctcatgtgcagttcccaggcttgtaccatcctcagcaacctccctctattgtaagtccgcaccccatggtgcatcaacaggtgccatcggccattggtcccaatgttggggttggggtggcagctccaggcccgcaagttggagcttatcagcaaccacagcttggccatatgaattggagacccagcttttgaagaaggtttcttaattatctgtaattagggggggtcacaagagcctttatgtaacaacagtaggctccttttaacaggaagcacctttgtttttagtgcagctctttctgatctatttaagctataacgaggtttttgttagcctttccatcccccaagtgaattcagtatcccatctgaactggtatgatgtagattatgagttaaaacattgggcaaaatctcgcacgagcccaaggttgagtgccttccattttgttatattgttttgtttcctaatcaaatttgtaggttgagtgccttccattttgttc

SEQ ID NO: 33669 - DNA, 2254 bp, Zea mays
  Clone ID: UC-ZMFLMO17156G06_FLI
caaaacccctcgcctgcggcttcgcgttggccggcaaccgccgctgttgccgacacttcaacgcgtacctcgcgcccccgcgctgctgatgcgatcagcgacgcacgccagatccgagcttctgtaggaccttcagccgtccccgtcccatgggggactgcgtcgtcgcggacggccacgtgcaccatccctcggatgaggtggagggcgcggttccattgacggtagccgtggagctcgatgagcgggcgggagagtcacgggaggagggtggtgggcagcggaagaaagtgggcgggatccgaagggagccgtcgttctcgcggtggtgcagggacacctctgtcgccgccgcctccaatactgccgttgctgcggcgatcagcgacagcgacagcgacgactcagaggagttcgacctaccgctcctgccatcctcctcgggcggcgggagctcacctatggacattgaggcgggggcgacggtgagatctgatgatctgccgatctcaccgaggttgcttgcgaaggtcattgggttgatagcgtgttggtacacgctgagcacatgcttgactctgtacaacaaggagatgctggggaagcacatgtggaagttcccggcgccattcctgatgaacacggtgcatttcacgatgcaggctgtggcgtccagggccatagtgtggttccagcaacgtggcctggagggagggccaaacaaaatgtcgtggaaggattactgtttacgagttgtcccaacagctttggctactgctcttgatataaatctgagcaacatttcacttgttttcattactgtgacatttgctacaatgtgtaaatctgcttctccaattttcattcttctctttgcttttatgttcaggcttgagaaaccaagctttagccttcttggaatcatgctggttgtttcgtttggagttctactaacagttgctaaagagacagaatttaatctgtggggatttatatttattatgcttgctgctgttatgtctggtttccgctggtccatgactcagattcttctccagaaagaggaatacgttattatgtaggattgtagtatcattggttgtggactcctttgtgggacaccagcaccgttgtcaacctaagcaacagcccagctcaagctgtggctatgcgacgtcagcagcatgcaaaacagaatggtggtaacgggagggaaattaggaaggattgttaggattaaagaatccttttaccttgatgagccatgttaccccggtgatggcaatagtaacagcaattatttccattgtgatggatccatggcacgacttcagagcaagtcacttttttgatagttctgctcacataataagaagcagcttgttgctgcttttaggtggcgctttggcctttttcatggttttgacagaatatgtccttgtttctgtgactagtgctgtaacagtgactgtagcaggaattgtgaaggaagctgtcactattctggttgctgtgctattcttcaacgatccatttacatggttgaaggcgcttgggctagcaataataatatttggtgtcagtctattcaatatttacaagtataaaaggttcaaaaaagggcattacaatgaaaatgctgggacaaatacccaatcttccaattggacttcaaaatacgtcatccttgatgaagatactgaagctcaagatgatacaggctgatctgaatgtgatagaatgcagactatatatggcgcttccagagaagcaagatcatctgtgcctgcatagtcttactttcacaggctaactgacttcatattctttgagttcatcaattactctggtcagccatgcacgaacatgacgcttgcagccgtgtggcaagttgggaagattacacatacatggaacatacaagatacaacctggtatcagtacatatgttttgtcctttcattcaaaacaaagaacagtgcatatatctgaacgaggcattctgcattatgtccactaagaaaatgctccatcaaatacaattagaactacagctgacacacttaactttctggaagaggataggactcaattttatagtccattctgattgttgaagagagattcggcatcggaacgtagctttcttttctttatttatttttagatgaaaataaacactcgtatatgtaatgttgtatgtatgggactgtatactgttttacacacgagcaccacaagttgaagttcttcc

SEQ ID NO: 33670 - DNA, 1616 bp, Zea mays
  Clone ID: UC-ZMFLMO17157C11_FLI
cagctcccaacaccagtacaccacgcgccggctgcgagcgatgcccgcgatcccaacggcccccgccccctgccccgtgcgcttcctcctcgcccgccgccacagcctccacatctcctacccgtcgccttgctctaaccaccagcggctcccgccccgcctcctgcgcctgcccgctcgcccccgggccgctcccatgtcggccgaggcgcgggcacccgcgtctccggtggcgccgccggcgcaccccacttacgacctcagggccgtcatcgcgctcgccctcgcagaggacgccggcgaccgaggggatgtatcctgtttagccaccataccttctgatgtcgaagccgaagccacatttattgctaaagcagatggtgtcattgctggaataagcctagcagatatgatatttaaccaggttgatccatctttgaaggtcgaatggtttgaaagtgatggcaattttgtccacaaaggactgcagtttggaagagtatatgggtgtgcccgcagcatcatcgttgctgaaagggttgtgctaaatttcatgcagcggatgagtggcattgcgaccctaacaaaggctatgtctgatgctgcccgtccagcatgcatattggaaacaaggaaaactgctccaggtttacgtctgattgacaagtgggcagtactgattggtggcggaaagaaccacaggcttggtttatttgatatggttatgataaaagataatcatatttctgttgccggtgggattgcaaatgcaatgagatctgttgatcaattcctgcagaaggaaaaactcacaattcctgtcgaggtcgagacaaggacaatcgaagaagtgaaagatttgttgaagtacgctgctgagaacaaaacttcattgacccgtataatgttggacaatatggttgttcctcttgggaatggggatttagacgtttcaatgcttaaagatgcagttcggttgataaacggtagatttgagactgaggcgtctggaaatgtgacagttgatacagtgaagaaaatcggagaaacgggggtcacctatatttcaagtggagcattaacgcactctgtgacggcgcttgacatctctctcaagatagacaccgagctggctcttcaggttggaagacgcacaaatcgtgcttgactcccacagcattacgttgtggacgcacgcaagtaaggcaggatgacagagggaccagcgtggcaaaccagcttaaatagcttaataataacttggcgctgaggcctctgactgcaactacgtgggattcattcttcagtttcatgcacaaacgaccgcaatattgatcggatcagaataattggcaggacatacaggttttgttctagcaccaagtttgggagcttgcgttctgcggcagataggcaggccaggtaggtgtacctcctcctgggcccagccacagctcgacagcaggtaccaggtaggtctactgtaaacgggggatgtcgcactgaactcgcaataccaaagacaaaataacaaaaggtggagataagatgcttatcttactgccattggtgataaaagcaacgtcaactcacatctattatttattgtatcgttc

SEQ ID NO: 33671 - DNA, 1519 bp, Zea mays
  Clone ID: UC-ZMFLMO17157D03_FLI
ctattgcagcagtgcttgaggattcagtgatcagcagatctgcaaggacaaaaggaccaaaggagtgagctggtttttatattttaactgatgcacctggatgctttattgagcggtgtctatgaaatgagttggatggaagggagacttcaacttgtcaactctgtcctctcgtctctgccaacatacgccatgtgcaccttacaagttccagcagcggtcttggagtacattgacacagccagacgacactgtttgtggcgtaattctgatagcaatgcaaaatttaagcctctggtggcttggaataaatgcacacgaccgaagaaaaaaggtggtctgggggtcatcaacctaagaagccagaactcgtatctccgaatgaaatttcttgacaagctctacaacaggaaacaaatcccttgggttaacctggtttggaatacatactactctgacggcaagacccctcatgcatccaagttcatgggctcgttttggtggagagacgcccttaaactttgtgatctcttcagaggaatctccaactgtaaggttggagatggtaaaactgttctattttggcatgatttatggaatgacaacatccgcagaaacaaatttccaaggcttttcaccttcgcaaaaaatcaaagcatttcggttgcttcctttttgactcaggagaacttgacagacaatttccacttaccccttactgagcaagcaaacactgagctgcaacaactcccggatgaagtgcaacaaattcgagaatcagtgattgaacctgaagagaaagactcttggagttatatttgggggaatagcacctactcgtcaactaaactttaccactacactttcaaaaatgtgaatcctccaaaaccatttctctggatcttggagtccagatgttcaaacaagcttaaagtcttcgcctggctgctgttgatggacaggctgaacaccagaaacatcctaaagagaaagaactttaaggttcaaggcgacaactacagctgtgctctttgtcaacttcaaagagaagaaactgccttccatttgttcttcaattgccctttcagccaagactgttggagacatctgaatattcagtggaaccaccaaattgacttctttgcgacctttcaacaagccagggacttgcacggttcaccattctttatggaggtctttatcatagcagcttggcaaatctggaagcaaagaaacaattttatctttgacaggggacgaccatctttcattggctagaaaaaagaattccgcgccgaagctcttctgcaagctaaccgcttttctgaagagaaatcaactcttttctcctcgcttgtgaattcctatagatagcagatagttttttccctgtgctttagttagtttccttctggtttatgtcttgggagcgactgctaatgctctttgtccgtcttcttctttatattaatatatatctaccacagcacagcaggggcttcccttgctgtacattttc

SEQ ID NO: 33672 - DNA, 1235 bp, Zea mays
  Clone ID: UC-ZMFLMO17157E04_FLI
ctggggatattgctcgcaagttcataaaagatcaggagctactctccttcatagatgctgagtgttttattgtgagcacagtcaatgccttgcaaacacccatgataaatgcaagcatggtcttgtgcgataggcactttgggggaattaattatccagttggtggcgttggtggtatcgcattatccctggcagatggccttgttgaaaagggcagcgaaatccgttacaaggcgaatgtaaccaatgttgttcttgaaaatggaaaggctgttggggtgaggttgtcaaatgggaaggagttctttgctaaaacggtgatatcaaatgccactagatgggacacatttggaaaactcttgaaagaaaaagaacttccagaagaggagaaaaactttcaaaagaattatgtcaaggcaccatcattcctttcaattcatatgggtgtcaaagcatcagttcttcctgctggtactgactgccaccattttgtacttgaggataattggaataatttggaaaaaccctatggaagcatatttttaagtattcctacagttcttgatccatcattagctcccgaaggacaccatatacttcatatatttactactgcaggcatagaagcctgggagggtatttctaggaaggaatatgaagagaaaaaagagatggtggccaacgagattataagaaggcttgaaaagaagttgtttcctggtcttcaagattcaatagtcctcaaagaggtaggctcaccaaagactcaccggagatttcttgctcgaaatgatggtacatatggaccaatgccgcggggtaaacccaagggcttacttgctatgcctttcaatactacttcaatagatggcctttactgtgttggtgacagctgttttcccggacaaggtgtaatagctgtagcattctcagggatcatgtgcgctcaccgagtcgctgcagatattggactagagcaaaaatctccggctctagatgctggtcttcttgggctactcagatggttgagaacacttgcatagaacgatatcagacagttgaaaatggacttcatttttccccccggaaggctgatgtttcaccagagttaggattctgcacgatctgttatgatgatcttgttatctgtaccatctcagcatcgatttcttgaaactcctaacggaaaaaaaaaggaatacgaatgggtgtacaggtttcagattttgaattat

SEQ ID NO: 33673 - DNA, 1393 bp, Zea mays
  Clone ID: UC-ZMFLMO17157F03_FLI
cctaaccatatgaatgctccatgtatgaaaaatggaatatgctcaaaaggttatccaaaagattttcaagaagaaacaacaatagatgggaatggtttcacagtttatagaagaagaaacaatggtcgtttcattgacaaaggaggtgttaggttcgataacagatcagtagtaccaactaaccttttgctgctgaaaagattccaagctcatataaatgttgaatggtgcaacaaaagtatttttataaaatatcttttcaaatatgtcactaagggaccggatcgtagcaaaatctttcttaaaagagtacaggctggcgaagatgttccatataatgaacaaacagatgcaaaggatgaaatcaaagagtatcttgatactagatatatttgtgacaaggatgcttgctggcgagtgtttggtttcgaaattcataggcattatcctgctgtggaaagaatgcctgttcacttgcccaatcaaaattacattacttatacctctcgatcaaatatggcacaagtgctatcagaggctttccttcgtcaaacaatgctaactgaatggttcgtttgcaactcaaataacccaaacgctagagatctaacatattgtgagttcccatcgaaatggaggtgggacgagaaaacacggagttggagaccaagactagctagagacagcaaaataggacgcctatattatgttcatccatcagcaggcgaaagatattacctaaggatgttattactggcagtaaaaggtgcatgtagctatgaatgtcttaggagttttaataatactgtatttccaagctttaaaaaggcatgtcaagcacgtggtcttcttggtgacgacaaagaatggtttgatgcttttgacgaagcagcaagttgggccacgggtccacaactacgccagttgtttgttacaatgctcctatattgtcaaattagcgacgaacgttcattttttgacaaaatttggaagttaatggtcgacgacattgaatataatatacaaaaagcaatgaattgtcctacctatcaaatggcagatgatgatctcagaaatgaattgctagagaggttaactgttctcttcaacaaaagtggtgggaatatacatgacttcaacttacctcaaaaggtacatacaacacaacaagacctaaatcgtttaattgaagaggaaacttcttatgatcctgaaattcttcacaatgaatctcaaagcctcatctcacagcttaatattgatcagttaaatgccttcaataaaattgttgaatgtgtcctttgtgatcgacctggattgtattttgtttctggatatggtggcactggaaaaacttacttatggaatgcaattgtagcatacttaagatctc

SEQ ID NO: 33674 - DNA, 1395 bp, Zea mays
  Clone ID: UC-ZMFLMO17157H05_FLI
aaaaagttggagtactgttattaaaccttggtggtccagagacacttgacgatgttcaaccatttttattcaacctatttgctgatccagatatcattcgactccctaggctcttcaggtttcttcaaagaccactggccaaacttatttctacttttagagctcctaagagtaaagaagggtatgcttcaattggtggtgggtcgccgttaaggaaaattactgatgaacaggcgaatgctttgaagattgccctggaaaagaaaaaattgaacgcaaacatatatgttgggatgcggtattggtaccctttcacagaagaggccattgatcaaattaaaaaggataagattaccaagctcgttgttcttcccctttaccctcagtactccatatcaacaagtgggtcaagcattcgtgttctccaagacattgtcaaggaagattcatatttttctggtttgccaatttccattattgaatcatggtaccaacgagatggctatgtgaaatcaatgtctgacctaattgaaaaggagctctccgccttctccaatcctgaagaggttatgatattcttcagtgcacatggtgtgccacttacctatgttgaggatgctggagatccttacagagatcagatggaggattgtattgctttgatcatgggggagttaagatcaagaggaatcttaaatagtcacactttggcgtaccagagtcgggtggggccagttcaatggctgaagccatatactgatgaagttttagtagaacttggtcaaaagggtgtgaagagcctcctggctgttccagtaagctttgtgagtgagcacatcgagacattggaagaaattgacatggagtacaaggagttggctctggaatcaggcatcaagaactggggtcgggttcctgctcttggatgcacttcaacattcatctccgaccttgcagatgctgtcgtcgaagccctgccctctgcttcagcgctcgcgaccagaaagcctgacgacatcgattccagcatggacctgacgcattacctcaccaagatgctgtttggctcaatcttggcatttgtcctgctgctatcaccaaggctagtttccgccttccggagcaccatgctttaagtttttctccaaagcactaaatttgagattgagaatgagatatttcattttggacctttttttcctccttaatagaatgatgtgcagttcttctgctcgttccagagaaaaaaataactgctaggaactcacaaggtagtaggggattgcaaaagggatgtgaacagctgttttgatcgaagttgtctataaataccgtgctcacggactctgtattttaatggtttcttgtgctcgactaattttgttgttcttgtcc

SEQ ID NO: 33675 - DNA, 677 bp, Zea mays
  Clone ID: UC-ZMFLMO17158A03_FLI
cggagcagccgcagtcccaccgaccccgccgccggtcgccctccatctcctcgccgctgcctctcgtttctcttttcaataatcaagatgagccgtggtggtagtgccggtggtggtcaaagttctctgggttatctctttggaagcggtgagccccccaaaccagcagtggcaccagctgcaagtgctccacctgttgagaaaccatctgctgcaaagactgatgcggccaagcaggttgctgctggggttaccagccaaaccaataactaccacagggctgatggtcagaacactggcaacttccttacggaccgtccttcaaccaaggtccacgctgctcctggcggtggctcttccctgggctacctgttcggtggcaactgatgcccgtgctggtgcgctcaccaaagttatcctcccctgcctgctgcgtgctatgtctgaatcgtgaacaaccgttgttgtcatttcatgtgtgtaccccgtgcaatgctttgtgcgcatggttgatttctctgtggcaaacttcccgtcctgcatggggttgtaagctgtctctaaatttcacggcatgtcgtgtgcctgaaccttcatcttaagttgttgtcgtatcccttcgtcttgtttcggttgcaccccgtgatggtatggattggttgctgaccacttgatct

SEQ ID NO: 33676 - DNA, 1644 bp, Zea mays
  Clone ID: UC-ZMFLMO17158B11_FLI
gttcaccattttcaccccaaatctgccgaggggattagccgatcgaagcgtcgtcggcggctgcggcaatggcggggctgtcgctgcggtgcggcgactgcggcgcgcagctgcggagtgtggaggaggcgcaggcgcacgctgagtccaccaaccacgccaacttcgtcgagtccactgaggccgtcctcaaccttgtctgctccaactgcggcaagccatgccgctcccataccgaggtggacctgcacacgaagcgcacgggccatacggagttcgcggacaagaccgcggaggcggccaaacccatcgacctcgaggcgccgcttaagccggcctccgatgatgccacggacgtcgatgcgtcggcctcggcgactgaggagacacaagagatggttgtgccagaggtgaacaaggaggtgctcacggaccttgagggcatgggtttctcgacagcgcgtgccactagggcgcttcacttctctggtaatagcaccattgaatgtgctattaactggctttctgagcaccaagaggacgcagatattgatgagatgcctctggtaccagctaactcaaaaacagaggttaacaagcccagcctgactcctgaagaaatgaagattaaagcacaggagctaagggagcgtgctcgtaagaagaaagaggaagaagagagaagaatggaaagagaaagggagaaggaaagagtacgaatcggaaaagaacttcttgaagccaaaagaattgaggaacaaaatgaaaggaaacgcatgatagaattgcgaagacttgagaaagaggaggagaaaagagctagagaaaaaatccgccagaaattagaagaagataaggctgaaaggagaaggaaactaggattgccaccagaagacccagcagctgccaaaccaagtgcaccacctcctgttgaagagaagaagagtgcattacctgtcaggccagccacaaaggcagagaggatgagggactgtctaagaaatctcaagcaacagaataaggatgatgatgccaaagtgaagagggcattccaaacactgcttacttacattggaaacgttgctaaaaatcctgacgaggagaaatttagaaagatcaggctgacgaatgcaacatttcaggagagggttggaaatctgcatgggggcatagagttcctggagctctgcggatttgagaaacttgaaggcgacgaattcttgtttttggcaagggaaaaagtcgacagtgctatcctgaacacagctggagccgagctgaattctgccatcaccaatcctttcttcggagtcctttgaatcgtaaaaggctacaatgtatactcaaaactctcgggttctcctttgcttgacatcaattgggcgccaactgtagatttccaagtctgtggtcagtctcagattccatgaattattatcagaccggattccgtacattgctgaggcaatctttgaagcaacttgctgcgcatatatgcttgggatctttccgatctcatcgcttcgctgaccttgatgcattttacaatgttctagcaccaaaaataagtgatgtactctgatgtatgcgttttacaacgacttcacttgttaatgacaacccgatcatctttaattatagatt

SEQ ID NO: 33677 - DNA, 930 bp, Zea mays
  Clone ID: UC-ZMFLMO17158C09_FLI
gcagcgagaaggccaccgccggggagccaaaacaccaggacaaatgcaccggcggaaatccaagggaggaggcagccggagaggaggaggaggaggcgcagcagctgaccatcttctacggcggcagagtggtcgtcttcgacatgttcccctccgccaaggtcgaggacctgctgcagatcatgagccctggcggcgacggcgtggacagggcaggcggtgccactgtccctacgcggagcctgcataggccttcacacgacagcctctctgatctgccgattgcgaggaggaattcgctccacaggtttcttgagaagagaaaggacaggataactgcaaaggcgccataccaacaagtcaacagctctgttgttggcgtcgaggcgtccaagcaggcggctggagctggggtggaaaaaccttggctggggctgggccaagaagcgacaacagcgaagctggagatgtgatgaatgttgcccgacaagaaggtgcagtgcacgagattcacggatggtgcaggtcgtagcttcaggttaaggtgaaggataacttaccgtcgggtactctactcactttactgctctactactactactgctggtgacgaagttagcaagaaacgttcttctgctaccggtgggtcggtcggtcagccgttcgttggcgagattgtttgctgctggagacggacgtgctcgcagcagtttcgctggtccgtgaccgcgccatatgttgccacgaatggttggttgttcggtacgttgaggaacgatgtgtatgtagtgtgcacgtttccggtgcatcttgttctcctcaagcctgtcctgtatgtttacccccctgcaccccctcctccctctttgtagagagagggtctgtatgttcagtggaagatggttgttctatttgatttttattttatgg

SEQ ID NO: 33678 - DNA, 2143 bp, Zea mays
  Clone ID: UC-ZMFLMO17158D02_FLI
gttcggccgcggcgtggtgattggcctcctcgacaccggcatcctgcccagccacccgtccttcggcgacgccgggctgccgccgccgcccaagaagtggaagggcgcctgccagttccggtcgatcgccggcggcgggtgcagcaacaaggtcatcggcgcgcgcgcgttcgggagcgcggccatcaacgactcggcgccgcccgtggacgacgcgggccacggcacgcacacggccagcacggcggcgggcaacttcgtgcagaacgccgacgtgcggggcaacgcgcacggcacggcgtccgggatggcgccgcacgcgcacctggccatctacaaggtgtgcacgcggagccggtgctccatcatggacatcgttgccggcctggacgccgccgtcaaggacggcgtcgacgtgctctccttctccatcagcgccacggacggcgcgcagttcaactacgacctcatcgccatcgccacgttcaaggccatggagcacgggatcttcgtcagcgccgcggcgggcaacgacggccccgccgcgggctccatcaccaacggcgcgccatggatgctcacggtcgcggcgggcaccatggaccgcgcgatacgcaccaccgtgaggctcggcgacgggcaggtgttcgacggcgagtcgctgttccagccacggaacaacaccgcggggcgcccgctgctgctcgtcttcccgggccgcaacggcgacccggaggcccgcgactgcagcacgctggtggaggccgaggtgaggggcaaggtggtgctgtgcgagagccgcaccatcacggagcacgtcgagcaggggcagatggtgtccgcgtacggcggcgccggcatgatcctcatgaacaaggcggcggaggggttcaccaccttcgccgacgcgcacgtcctgccggcgtcgcacgtgagctacgccgcggggtccaagatcgcggcgtacatcaagtcgacgcccaggcccacggcgaccatcacgttccggggcacggtgatgggctcgtccccggcgccgtccgtggccttcttctcgtcgcgcgggccgaacaaggcgagcccgggcatcctgaagcccgacatcaccgggcccggaatgaacatcctggcggcgtgggcgcccagcgagatgcacccggagttcgcggacgacgtgagcctgcccttcttcatggagtccgggacgtccatgtcgacgccgcacctgagcggcatcgcggccatcatcaagagcctgcacccgagctggtcccccgcggcgatcaagtcggcgatcatgacgtcgtcgggcacggcggaccacgcgggcgtgccgatcaaggacgagcagtacaggcgggcgagcttctacagcatgggcgccggctacgtgaacccgtcccgcgccgtcgacccggggctggtgtacgacctcggcgccggcgagtacatcgcctacctctgcgggctgggcatcggggacgacggcgtgaaggagataactgggcgccgcgtcgcctgcgccaagctgaaggccatcaccgaggcggagctcaactacccgtcgctggtggtgaagctgctgtcccatccgatcaccgtccgtcgcaccgtgaccaacgtcgggaaggccaactcggtgtacaaggccgtggtggacatgcccagggccgtgtccgtggtggtgcggcccccggtgctgcggttcgccagggcgaacgagaagcagagcttcaccgtgacggtgcggtggaacgggccgccggccgtcgccggcgccgaggggaacctgaagtgggtgtcgagcgagcacgtcgtccggagcccgatcgtgataccgccggccaaggccgtcgcgtaggcgtagctcccaatccaatctctgcttgacggtcggcaggaccgttctctgctcgtgtcgtgtctccgaggatgaaggtcatcagtattcagtagctttaggtaatcgtgagtgtgcccggtgtacgtatggcgaaggaagtaggcaggcgactgttgtataggctggaggcagggtacccgatcatctgcgacgcagcaagctcagctgcaatggcaatggcgcccgttcgttccgtatgtaaaaaaatggcggaaataattaatcgcatcgaaaaccccc

SEQ ID NO: 33679 - DNA, 1065 bp, Zea mays
  Clone ID: UC-ZMFLMO17158D12_FLI
gcaaaatcttggggagtcaagttctgatccacaccctgattatttcaattttgggataaatgaaagtgagggttgtagcttgttatctgaggaagaaccatgcataaagatcagaaactcgactgcacagtggtgcattgagcagaacatagaatatattgaggcctgtgcttccaatgctgactttgataagtgtctatcagtggatggtgatagccaaggcttagagcgactccttggagctctttctgcacatatgtggcctggaatgattctgaaatctggaaacagaataactgtcccatccttggttgaaaaacaagaatccacagatgatgaatccaactatgattttgagtacgaggtcttgtctcatggatccgatgaccagtgggaatttattggagagacaagtacatccagaagatttgagagaccaaatgagcctgatggtgcacaggatcacacacatcaagttgtgaatgccggtactgactcttcagcatccaactctcccccgactaacacacccacagaaactgctgaagagaatactgtaactcagagcaacaaaaccgacaatagtgatcatgtggacaaaaccacagcatatagcactgaggatcatcaaagtgatcttcgagaggctaaccatctttttgaggacgagcattatggtctggatgacctggagaaaataatgtcggagattggcaacatgcgatcaaacttaagactcatgcctgacttccaaaggagggagatggctgcaaagctagccatgaaaatggcagccatgtttggtgatgatgatgaagaggcatttgatgatatctaaggcaattcatgtaactccaccttgctgattcccagacagggttgcagatgattgaaagatggctttgtacaagccgacgagcctcttgccacctagggcctttctcatgataatgtcttttttcttagtgaaaatttttgtggctgttgagcgttctatatgccttgtaagatgtattattatgaactttaactccttcaatcatccaggtggaaattttgtggacc

SEQ ID NO: 33680 - DNA, 1454 bp, Zea mays
  Clone ID: UC-ZMFLMO17158E12_FLI
attttgaccgtctatttagccatagtgactccatatttggtaatgagatagttgccaacgacagtgattttctttctgcatcttcgaatttgatggatactgctgtgctatcaatcccaattccggtcgaagcacataagaggccagtgtggtcacgtagaaaaccagaggaaagaggtaaaagtaaaatatccagcagtacaagtggcttctcccacagcaaagtagagagttcatcgacgaatttgcaaactcctatggaacctgtacagactcctcaatatgcactgttccaggatagcaagaagataggagaagttcagcatgctaatcagtttatgtttcctggatatgggtatcctgcatatccatttcctaccattccgttagtgtcaaacattcaagctgaaggctatcagacaaaaccagctggcacaagcaaccgaacttcggaagattacctaaaacagtcaagttccacagaaatgtcacaagatataccatcaagaccactaacaatgacaccacaagaaaagatagaaaagcttaggcgccggcaacaaatgcaagcactgatagctattcagcaacaacagcaacagtttggtcaacagggtcctggcagtgacacaatggtgtctcaagcatacacccctggtaacaaaaatccggattccttagggagttcaattgtcatagatgaaaacacaaataaggttatttcgcctgagatgattccaactgaccatgaccgggttcacaagagttctgcaatttcagatgatccctttatagaggaaaaaatatattatcagctacaagatgctcttggcaagttggataccaaaactcgactatgcattcgagatagtttgcttcgtttggtccatagtgcaacagagagaaagattgatggtgataggagcactaacaagactaataaagatgaagatgaagcttcggaagacgcatctactaggaaaacaaggtctccaaacaaggaagcagaaacaaccactaatccaattgatcgtatagtggcccatttgctgttccacagacattgctccaaggttgcaaaagcaacaaaagaaataatatcgtcaatccccttgactctagaacctgagccgaaggtaccctttggaactcctagggttccatcaaaagatcaacgagatgagcaagaaattgtgttgcaaccatcacaataatgtgagatgtgctagaagataaggttttactcaatttgagtaaacttatttgcatttagttagcctatgaatctaatgtcgtccttctaatgagtatagtacacatgctgattaatcaactgttcaggataaaaaattatgcaaatccagtgatgatggcagtcttatgatcacctgtggccccggagatcgcttgtgtaatatgtagccatttcaacattgtaggatccttttattttc

SEQ ID NO: 33681 - DNA, 1596 bp, Zea mays
  Clone ID: UC-ZMFLMO17158F08_FLI
aacctggaggtgataaactacaaattcttgacgagtccactaagaaaacttcaagcaaagatatctgtggagaaagcccaattactactactgaaaatgtgggaagagagagtaaaaaagtatcttcaacaaagaatttcttggagcacactctttcatgttggagtgccttagagcgagatctatacttgaagggcatagagatatttggaaagaacagctgtctcattgccagaaacttactatctggtatgaagacctgcatggaagtggccaactacatgtataacaatggtgcagcaatggcgaagagacctctcttgaataaatccatctcaggcgactttgcagaaactgaacaagactacatggagcaagacatggttgccagaacaagaatctatcgtcggaggggccgcaatcgaaagctgaaatatacttggaagtctgcagggcatccaactgttagaaaaagaattggtgatgggaagcaatggtacacacaatataacccatgcgtgtgccagcaaatgtgtggtaaagattgcccctgtgtggaaaatggaacttgctgcgaaaagtactgtgggtgttcgaagagctgcaaaaacaagtttagaggctgtcattgtgcaaaaagtcaatgcagaagcagacagtgcccctgttttgcagccagtcgtgaatgtgatccagatgtttgtaggaattgttgggtgagctgtggagatggttcactaggtgagccacctgccagaggtgatggttatcagtgtggaaatatgaagctccttttgaaacaacaacaaaggattttgttaggaagatctgatgttgcaggttggggtgcattcatcaagaatcctgtaaataaaaatgattatcttggagaatatactggtgaattgatctctcacaaggaagcagacaaacgtggcaaaatttatgaccgggcaaactcatcatttctgtttgatttaaatgaccagtatgtgttggatgcttatcgcaagggggacaaattaaagtttgcaaatcactcatctaaccccaactgctatgcaaaggtgatgctggtggctggcgaccatcgggttggtatctatgcgaaggagcatattgaggctagtgaggaactcttctatgattatcgttatgggcctgaccaggctccagcttgggctaggagacccgaagggtcaaagaaggacgaagcatccgtctctcaccatcgagcacacaaagttgctcgatagctgaagagcagctccggatgatacaatatgcagtaaattatatatttaatacatgatttagtcctagttcattatacgaggacttcgttggtagataagcatattgtatattcattagtgaataaactcccatacatcaagttggggaataagtgcatataaatattttttaccttaggtcggaaggtgacaaactgacaaccttgttaggttgagtaaagttagtgcttacaggttttcaaactggtgtggccattgctagagtatcaaatagctgagatggctacaactatagccttgtttgtattttttttggcaagagggatggaatttatttgcc

SEQ ID NO: 33682 - DNA, 2203 bp, Zea mays
  Clone ID: UC-ZMFLMO17158G05_FLI
attttgccttccttttgcaaagacatgttctgtatactagattctttgaactttaatagtcttattgaagatggatctaccatgaagctcaggattgcaaagagatgtctcattatattttgcgcacttgttacacgtcaccggaaacatacaaataaccagatgccacatattgtcaactgtgcaatcaaaatatcaaaacaaagcatccatttaagtaaactcgactctctccccaatcggattgtttcattggcatttgatgtgatttcttgagttttggaaacaggaccgggatggcgactagtttcaccacatttttcttcacttcttgattcagcaatttttctagcattagcattgaatgagaaggatatagaagaatgggaggaggatactgatgagtatatgcaaaagaatcttccttctgaacttgatgacatttctggatggactgaggatttgttcactgccagaaaaagtgcaatcaatttacttggtgttatagcgctatcaaaggttgtgattccttttttattatagtttgttgaacacacatagtactgacttcaggctgagcaaaacattttaagggattgttttgctatattgtattccatgactttgtcattctatatcaagtgatttcaatggctgcatgcggtctttcatatttgaacacacttgctatttttcacagaaccatgtagtttgttgaattaactcaaaaattgagatgttgatgtcatttgcttacactttttttttggtttcagggtccaccagttgcatctgcagcatcaaagcgtaagaaaggtgataaaaataaagggaaatctgaaatgagctcaattggggagttattggtcatcccattcctgtcaaagtttcctataccttctcatggtgaggatgcatcatcagtagcagtgcagaagtaagaaaggcttaaagacgattagacataccactatgtttatttactatactattatcttgatgtactaaatgatttcattttagttatttcggtgttttgatggcatatggaggcctccaagattttctgactgaaaagaaagatttgacaattacattgatcaggaaccggattctcccattatattctttggatccttgcagcccatatttgatttcaacggctaattgggttattggtcagcttgcgatatgcctaccagaggttacatgtttttcttgtttttaaattccatcatctcataggacatgctggatcaaagtagaggcttaatgtaatatgtatatccctctacattatacatttcactttatttcttgtttgcttacctgtaggacatgagttctagtatttatcagtccttaatgaaggcgttgaccatggagtatgtggaggacataacttgttatccggtttgtgcctctgcttctggtgctattgcagaactcatcgagaatagttatgttccacctgactggctcattcttctacaagtggttctgaaaagaataagtactggagatgaaaatgagtctgctcttctgttcaagcttggacaggaaaatattttgtctctgtttttttcagaatagttatgttccacctgactggctcattcttctacaagtggttctgaaaagaataagtactggagatgaaaatgagtctgctcttctgttcaagcttctgggcacaatagttgagggtggacaggaaaaagttctgtctcatattcctaaaattgtatccaacattgccagtactgtaatggagctcctgtcccctgtcccagatccttggcctcaggtagtagtgcatctttcttctgtgtggtcaatattttggtactttatcatgatgaccggcgggaggaacaccgggcgtgtaggagtgatcaagaacagggagaagtacaagcgcagagtgatcaagaacagggagaagcacaagggcagcttcgagaccatccacgtgctgcttagagctttttgttatgtctagttttctcctatttgttgtacaggaaaacatagaatggaattcaaatttggtggccacaaaatgtggagacttgaattcatataaagttaggcttaacattagtacaaacagttgtattttagtttagatttagagtacacttatgtatgtgttgtttgacaatgcttatttatgatatattgaatgatacttatttatatt

SEQ ID NO: 33683 - DNA, 1800 bp, Zea mays
  Clone ID: UC-ZMFLMO17158H04_FLI
gtttgtgttctttctattcttgttcagtagttgtagttacaaataaagattctgaacattttccttttttgctctctgttcaaaacaaccttctttttgtttcacgtataaaaatattggtagcatggttagacagttgaactgcataagatcatataattgtatatgagcattgcagttctgatggttctttgttttccctttcaatcttctaaaaaaatgcttgttttgtttttccttttggccaaccaattgtagtgtcgagtgtgtgtgactaccaattcccatttttaccatgtttcagcttggggtagtcctaggcaaaattttcatacgcaatacggtaaaattcactaaaataaaggtaaccaaacaattattcagtagcttgtcactcatatttgtttctcacattattcttcactagacaatgcaaagagtactgttgatctgacaacaatttactaaagaaccggaggctggtgaattctctattgaggtactaccaaattttagaaacatatttctttttttaggacaattattgttgaatgcaaacaaaacattgagaaatctttatatgtagcatgctcttaatattcattttattttgatcttagatatacaaacaaatgagtgcttagagaaaaatggtggctgttggcaagataaggctgctaaaatcactacaatatttgttttgtacagcctatacatacaatacttgttcggtttatatacaggattcatggaagagtttgcgagtgtctaattgcgatttgtgaaggtacatacaaagcattaggagattcatcttctagcattttctttgatcaggtgttaataaagccttatggattataatgtgtatttttagcttctggatctgcacgatgtgaaattaacaattgaggatgttggaaagatagcaagaatagtggggcatactctacttgtctttaagtgttagttgaggttttgttgtccttaaaactgccctattatcaggaggatcttgtccaactttttattaaggagttctttaaaatctgatattttgtttatgggtctgttatatgctggatgatggttgtaaatatctagatggattcaagggtggcagtaggcacagatgtgaaggtaaggcacatttccgaggcctgtctttctagaagtgcttgcatgtcctccgcaacttctgatgtaatgttcttcagagttgtgtttctctcttgagccatattatatgtaaaacatttcccttttgtgaatgtaaatgtgaaacatgttgtgacatatattgatgaatgtaaggaaaggattgtgtcaatgcaaagaatccaaatgcaaaaacacatggggaagctatgagtatggctgcagtgaaggcttgctttacatgaaggagcatgatacatgcataagcaaaagtggagcatcataatctggctggggcttcttgtgggtcatcttcttcagtcttgtcgcaacaggaattacaggatatgcatcgtacaagtacagggctcggaggtacatggattcagagatatgtgccatcatggctcactacatgccctgtacaaccaaggagagatccaaattcattctcatcacattgagatgtgaggtagtaggacacagactttgatgaagggagactaggacttgatctatatctatttctgaagtaatagatcacttgcatcagttctattgtattctatttttatgtatgttttttatacacactgtatgcttttcgtacgatgcaagtgcatcggtccctatttcacacac

SEQ ID NO: 33684 - DNA, 1278 bp, Zea mays
  Clone ID: UC-ZMFLMO17158H07_FLI
cctgactcttcatcaacagcatccagaataacatgctctgatgacagatgtacagctggcttccaaacaggggaagcaatctgtcaaacctcaaattcccaaagcagcccttgtgggtacactttcacctatggtgatgggagtggcacatcagggtactatgtgtctgacacgatgtttttcgaaactgccatgggaaacgagcagaccgccaattcgtctgcctctattgttttcggatgtagcaactcacagtcaggagacctgacaaaggcagatagggcagttgatggaatttttgggttcggacagcatcaactgtctgtaatttcgcaacttaactctcttggggtgtcccctaaggtgttctctcattgcctgaaaggttcggataatggtggtggcattcttgtgcttggtgaaattgtggagccaggattagtgtatactccacttgttccatcacagcctcattacaacttaaatctggaaagcattgctgtcaatggtcaaaagctgcccattgattcctccttgtttacaacatcaaatacacaaggaacaatcgtggattcaggaacaacattggcataccttgcagatggagcctacgatccatttgttagtgcgatagctgctgcagtctctccatctgtgcgttctctagtcagcaaaggaagccaatgctttatcacttccagcagcgttgactcatcgtttccaaccgtaaccctttattttatgggtggtgttgcgatgtcggtgaagccagagaactatcttttacagcaggcttctgttgacaacagtgtattgtggtgcattggttggcaaaggaaccagggccaagaaataactatactcggagatcttgttttaaaggataagatattcgtgtatgacttggcaaacatgcgcatgggctgggcggactacgattgttcaatgtcggtgaacgtgacgacgtcatcagggaagaaccagtacgtgaacactgggcagttcgacgtgaacggctccgcacggcgcgcatcttacaagagcttgataccagccgggatcgtcaccatgcttgtgcatatgctcattttcggcactggctcacgtagatagcaggcgagccagctgacatcgtgatttgattattattgccacggcgtattcagaggtagagacgtcgccatccctgctgcgctagtcggttagtcgtatggacgaagagttggcatggcctgagcattcttactgtacatacagaaaatgaaaggtctattgttc

SEQ ID NO: 33685 - DNA, 590 bp, Zea mays
  Clone ID: UC-ZMFLMO17158H11_FLI
cagatcccaactgccttcgatcccttcgctgaggccaatgctggggactctggtgcagcagcagggtcaaaggactacgttcacgtgcgcatccagcagcgtaatggtcgcaagagcctgaccaccgtccagggattgaagaaggagttcagctacagcaagatcctcaaagatctcaagaaagagttctgctgcaatggtacagtggtccaggacccagaacttggacaggtcattcagctccagggtgatcagaggaagaacgtctcgaatttcctcgtccaggccggcattgtgaagaaggagcacatcaagattcatggtttctgagcaaccgccgggtccatatcaaaccaaccctgcatgcagggcatcttattatatataatatctgaggtggagcatatctatctggctgtgtactgcaagcaggcctagtacgccgcctgcgcgttcctcctattacacatataggcccctccctgcttgtatgcttgttaccgtcgtgtcgaaccttgtactacgaggctccatcgaacatcgatggcttgcttctttatcagaacatgtttgaataaacgctatttggt

SEQ ID NO: 33686 - DNA, 1325 bp, Zea mays
  Clone ID: UC-ZMFLMO17159A05_FLI
ggtttctgaaatcaggactgcaatccaagcacttgatgttgagactgtaattttagacgatgagttatcccctggacaactacgtaacttggaaaagtcatttggtgggagtgtccgagtctgtgatcgaactgctcttattcttgatatttttaatcaaagggcagcaacacatgaagcttctttacaggttactttggcacagatggaatatcaacttcctaggttgacgaaaatgtggagtcacctggaacggcaggctggaggtcaagttaagggtatgggtgagaagcaaattgaagttgacaagcgcatcttgagaactcaaataagtgccttgaggaaagaattggaatctgtacggaaacaccgaaagttgtaccgcaaccgtcgccaatcagttcctattcctgttgtttctctggtaggatatacaaatgctggaaaaagtacactcctgaaccgcttaactggagctgatgtgcttgcagaggataagttatttgccacattagatccaactactagaagggttttgatgaagaatgggactgagttccttctaactgataccgtcggattcattcagaaattacccactatgctggtagcagcatttagagcaacactagaagagatatcggaatcatcagttatagttcatcttgtggacattagccatcctttagctcaacaacagatagatgctgttgaaagagtactgaaggagttggatgtcgagtcaatccccaaattagtcgtgtggaataagattgacaatacggatgaaccattgagtgtaaaagaggaggctcagaaacaaggaataatctgcatatcagcgatgaatggtgatggtttggaagatttatctaatgcagttcaagcaaagttgaaagactcgatggttcctatagaagcttttgtcccatatgacaaaggagatctcctgaatgacatacataaggttggaatggttgaaaaaatggagtacaaggaaagtgggacatttgtaaaagctcatgtgcctctacctctggcaaggcttctcacacctctacggcagcaggtggcagccactgtgtgatgtgcatgtccccgatcccttgatgccattggcactcacaaaattaccacatcttgtagattcacaaaaggaatagctttgctgtagaaaacttaatcatagattatcttcattgtgtttctacggttctaccagagtaccgtatcaacaggtgcacaggactagatagctgtatgtacgcacaacagaaatgtaaatgttctcagcagaatttaagccccgtttggtttgggtagtc

SEQ ID NO: 33687 - DNA, 907 bp, Zea mays
  Clone ID: UC-ZMFLMO17159A07_FLI
ctcgcctccccgactccccgtcgcgctttctcctagtgaggctactgggtgaccgccgcctctgccgccctacgccaggttccaggtcttcgtcactccctttccttatcttcgtcgtctcattcgccggcgacgagcacccaccagaaatcatagctgctttgggtatggaggcgctgtttgggagcaataaccatggcggccacaaggccgctgatttggcatcgcttataattgcccaggttgccttggaggtgccaaggttacttgggctccttgccatgattctgcataatgaaatctttacatctggtggagaccagaatttgattactaggattctgggcaaaagcgaagatgaaactaatcctgagaacaaagatgatggagagtccgatgatgataatgatgatgaaggagacgatgatgatgctgaaaacgaggaggaagatgatggtggtgatgagggatcagatgacaatgagaatgaggaagatgacgatggagatgatgatgatcctgcagccaatggcgaagggggaagcgatgacgacgaagatgatggtggagaggatgaagaggatgacgacgacgacgacgatgatggggacgatggcaatgaggaagaggaggaagaatctgaagaggatgatgatgatgatgaagtcccccaaccacctactaaaaagaggaaatgatcaacggctgcgacgagtggttgcttacacgcaggaatgctgcctgttcgtccctgcgcagcagtttactgtttagtgggtagagttttttagcttggtcgtggacaattcatagcctagtttggaaacaaaaaagaaacatttaattgtgcatgtactattaaaccattccttcaatcatgtatctcagattgctatcatggtttctg

SEQ ID NO: 33688 - DNA, 2185 bp, Zea mays
  Clone ID: UC-ZMFLMO17159B03_FLI
aagaaaagcatgccaaagggaagtcaagatcaccatcgccctctactcgtagatcaaaatctcggtcgagatcacctatcaaataccgtaggagcaggcggtcccgctcctactctcccccagttagacgctcaagggagcagcgatcacgatcaccatcaaaatctcgccactcaaagtacggtagtgatcgatcgcatagggatgataaggacaggtatagcaggtccgggagaagggagagtgaacgatctcgtgatcatcattcatctagttcaaggaggaacagaagtaaaagtagaagtccaaggcataagaagccctccagagttgattctaggtcacccaagaaacaaagagaggaaagtttaagcccatcaaaatcaaggtcagcaagggctggttcaagatcaccacgccatcataagggaagcaaatcatcgccaactcgtgaccgtcattctcgccatagcaggcattcaaggtccagatctcctggcagaaagcaccgtcacagtgataaaagggacagcagaaagtctgagattcaggacgacaaaagaagatctcatagaggtagcagacacgacaaagatgaaagttcagtaaaggacgaaggggaaagatctcatagaagcaatagaggtgacaaagatgaaaggtctgtaaaggatccagtggaagataaagggatggatactaaagttgttgcacataagaggagctcaacagtatctgaagatgaaattctgaacaacaatagtagtaaccataagaaatatagacatgaagttggtttggaagttgatggaaatgatgtgtgctctgctgcagctgacattgataggaaacatgaaactggagtagatggctctttggggggcgctgcagaatcagctatgtgatggctgctgtatcattgagtttgctgtttacagatggattgatgatgatggagaatgctgaactggtgtttattatctccttttctgatttaggagttttatttgcagggcatgaagatcttcggagaacttgagtgctgttcggagtgctcatctgatatattaaaatgtattcctcattaacttgagattcgctccttggagcaaacttctaaatgtaaagctggtgttgtaaggcgatttcatacagtgaggtagaaaccaaccatgtatttgtcgtttcaggctcatgattccatgaagagttcttggagcacatttctgggatgtcggttgaagatacaagggagtatacacttcctcaagtaaagtacacatatacaagactaataaacaactcatcttctaggcacttgcatttgaatcggaatgctttggctagtaaaatggtccaaatatgcttgtctacatacttctgatgcacttaatttgcttgaagttctgtttttatatcttgtatcaggaatggttcaaaaagtttgacttgctataccaatacttgtactttatcttttgacagtcacaatgaattgtgatgtaggttttatccatcttgtctactgctttttgaccagtctacctaaagttggtgcccttggtagctccagagataagctgtgaatcttgaaagttgaaacaattgcattgttacaaatttttttttttttaaattttttgcttcactattgtttctgcttttgtctgcattgttcgctgcaccttaccatgctgtgacggttgttgtcatgctggaaaacctgtgcaggtttttcaagggggttgacattggagtatgttttgagggaagtcagtgcatacttcattttgtgaatgaggactatgttgcggatgctcaaccggtgaggattacatgttctatcaggagtgaagacttgtgcacgagagctgcaagtgaacctttctgcatgtggatgcttatttatatcaacatgtgtctcccggataatatagcttgccgcttgcgagttgggatatgagcgctaatctaagcttggagtgattcaccaaaccgctctaagattaaggaaatatagggatattcaaacaacaaatggagttaatccaggtcgtgcctgtgggaaaaacatccatagacttcaatttgttagggaaaaatattttctaaaataagggtgaaatacactgttttttctctttcttttttgctcagaaagaataaaattgagtaaggaggtgct

SEQ ID NO: 33689 - DNA, 2248 bp, Zea mays
  Clone ID: UC-ZMFLMO17159B08_FLI
gctgaggattccaagcagcagcacacaaaagcaccatctttttggaggcttgcagagcttagttttgcggaatatttttatgctctgttaggaagtgctggggctgcttgtttcggttcatttaatcctcttcttgcttatacaatatctcttatagtagtggcctactacaaaataggggtccgtgatgtacatgccgaagtgaataagtactgctcattcattgttggcatgggtataattactgtactagccaacttcttgcagcacttctactttggtataatgggagagaaaatgaccgagcgtgtcagaaggatgatgttttctgcaattctgcgcaatgaagttggttggtttgacgacgaagaaaatagcgcagacatattatcaatgagacttgcaaatgatgcaacatttgtccgcgctgctttcagtaacagactttctatattcattcaggatacatcggccattcttgttgcacttcttcttggtatgttactacaatggcgtgttgctcttgttgcattggcaacgttacccatccttatcatttctgcggttgcacagaaaatgtggctttctggcttttccagaggaattcaggagatgcacaggaaggcttctttggttcttgaagacgctgtgaggaatatctatactgtggtggctttttgtgctggtaacaagataatggaactttatagattgcagcttggcaatattctcaagaaaagctttatacatgggatgggcattggttttgcctttggcttctctcagttccttcttttcgcatgcaatgcacttctgttgtggtatacagccgctgctgtgaaggacggacatctcagtctcgtaacagctgtcaaggagtacattgtcttctcttttgcgactttcgcactggtggaaccatttggccttgccccttatatactgaaacgccggaaatccctgacctcagtatttgaaattattgatcgtgtacccaagattgatccagatgatgccagcggcctgaaaccacctaacgtgtatgggagcattgaattcaggagtgttgaattttgctaccctacacgccctgagatgatggttctgagtaattttagcctcagagtgagtggaggacagactgttgctgtagtaggtgtatcaggatccgggaagagcacaataatttctttgatcgagaggttctacgatccaactgctgggcaagttttgttggatgggcgtgatttgaagttgttcaacttgagatggctgcggagccacatggggttggttcctcaggatcctgttatattttcaacaaccataagagagaacataatatatgcaaggcacaatgcaactgaatctgagatgaaggaagctgccaggatcgcgaatgcccatcacttcatcagtagtctgcctcatggttatgatacacatgtgggaatgcgcggggtggatttgactcccgggcagaagcagcgcattgccattgctcgtgtggtgttgaagaatgcgcccattttgctgcttgatgaggccagctccgctatcgaatctgagtcgagtagggtggtccaggaagcccttgacacattgatcatgggaaacaaaacaacgattctgatcgcacacagggcagcgatgatgaagcatgtggatagcatcgttgtgctaaatggtggtaggatcgtcgagcagggaagtcatgattcgctggtgcagttgaatggtttgtacgtgaagctgatgcagcctcattttagcaaagggtttcgccagcgtagactaatatagcggctctggttgtagatggtgtacattagcccgcccgtggagctaagctaatcagctctgcttcactgaccagatgccctgtggccattcctttttttttctttcctttttggtaatcgctaattcttttttcagtgtgtgtttggtgatcacgaggctgggaagggtgttaccctgttcggtgtagtttttgttagcttattttttcttttgtggtagcctttagaatttggtcttgctgatgctgggtttgggtgtagtttggaactggaattgtaattgtaatcagagcagtggtgggaggaggaagcgcgcactattgtttcgccagtaactgtctagtctaagcaagcatgatgatgctaggagatggttttgtggtagtcagcatcattgtaacctcttgtgattgttatttgcagaaaattaaactacattttcagtc

SEQ ID NO: 33690 - DNA, 1132 bp, Zea mays
  Clone ID: UC-ZMFLMO17159B11_FLI
ccgaacagcgtggatgctcctgaaacagagctagcgcatttgactgggatgcctactgagacatttgaacagatcagccaggccgcaggagaatgccataaaatgggtgtgaaagaagtactagttaaacttggatcgcaaggatctgctgctttgtttgttgagggataggagccaatcagacagccgataattcctgccacagaaggtattgataccacgggggctggtgacactttcacctcagcttttgccgtaacgttggttgaggggaggcctaaggattgcatgggatttgcagttgctgccatgttcttcgatgaggctgagtaccacacaacccctacgaggtcaccctccaatcgcatgaacaggggtctcttctcagatgaagtggcgttaagtgttcatagggagcagtttatcccttctccgtgatctggtagagtggatgggttggacctcaactccagtggcgtggagttccagaaaattgcatttcatgaacttcgtcagtcccagtcagctgccaactactccgctactccggttcgtgatggtcataggggttgcagtcattctcgatcaattggtattggtcgtggtgttacgggcagaggatcccgagttccacggacgactagtgagggtcctagaggtggtcgtggagcatgaagcatcttctctcgtggacgtggtatgcctcgacctattggtgcttccttctctggtggccgtggtgccaccagtggtcgtggtgccaatatttcagcgccaaatgccgctcacagtcaagaggacaatgacgacgatcgctttgcacaggtaactcatttttctgacttggtcactccaatatggaagagcaaactgcgtcatagatgcaggcactactgtaatttttagcccaaagttttgaactgttttgtttgaaatatgtacataatctgtaatgtttgtgaactgtttgaatggagaggagagctggagagggcacggagaaatggaccgagacatggaccgtttttcttcagcacggcagcccccagccagtttttcatttgtgaatcctgtcgttggttgtttcttcttttgtacgctacacttaaattatcctagagagtgctttaac

SEQ ID NO: 33691 - DNA, 936 bp, Zea mays
  Clone ID: UC-ZMFLMO17159C09_FLI
tgacaaccagtccaggacagcttttccggccagcgtcgctaagcattccttcagctcagccagcccaaccatctcaatcaactagttctagttctttttctaattcgttctcaagtgggcttactggatttggacagcctgcacaaattggatctggccagcagtcagcttttgggaagcctgcacagattggagctggtcagcatgcaggatttgggcagactgcccaaattcgacctggttttggccagcctgcccaaattcaatctggttttggccagtcagcacaaatcggaactgggcaacagtcaggatttgggaagcctgcacaaattggggctgtccagtcaggatttgggcagcctgcacagtttgctgctcaacagacacttggatcagtgctgggttcttttggacaacctccccagttaggaggcataggttctggacgatttggtggattttcaagtgcttctacatctgctggttttagttctttatcttcaggtggtggttttgctgctgctgctactggtggaggttttgctgctcttgcttccaaaagtggaggttttgttggtgcagcttcatctggtggtggttttggaggtgcctcccagggaggtggctttggcagtggtggtggtggattcggatcctttggtggtaatcaaggagctgggttctcggcatttggagcaagtggggctggaagaccggcagctgatttcttgacgcagatgagaaggtgtcaacagcagcatcgacggttggtcttggattccctacgggtttctctccagggcgaccaacttgctaaggctttcatggctctctcttcaggttccatggctgcatgaaatgtagaaaaaaaaaaagaggtcgtgtaaaggtcattgcttggacgtgattcccctcctccagctttgtcaatac

SEQ ID NO: 33692 - DNA, 1391 bp, Zea mays
  Clone ID: UC-ZMFLMO17159C10_FLI
cattggccagctagagccaaccagaagagcttgcagttactgagagtgtgtgtgagagagaggatgggtggcagcggcagggctgctctgctgctggccctggtggtggtggccgtgagcctggccgtggagatccaggccgacgccgggtacggttacggcggcgggtacaccccgacgccgacgccggccaccccgaccccgaagcccgagaagccccccaccaaggggccgaagccggacaagccgcccaaggagcacaagccgcccaaggagcacgggcccaagccggagaagccgcccaaggagcacaagccgacgccgcccacgtacaccccgagccccaaacccacgccgccgacgtacactcccaccccgacgccccccaagccgacgccacccacatacactcccgcccctacgccccacaaacccacaccaaaacccactcccactcctccgacgtacaccccgacccccaagcctccgacacctaagccgaccccgccgacgtacactccaagccccaaacctccgacgcccaagccgaccccaccgacgtacaccccttcccccaagcctccgacacctaagccgaccccgcctacgtacactccaagccctaagccaccggctaccaagcctcccacgcccaagccgaccccgccaacgtacaccccttcgccaaagcctccgacacccaagccgaccccgccgacgtacaccccttctcccaagcctccgacgcccaagccgaccccgccgacgtacactccaagccccaagcctcccacacacccgacgcccaagccgaccccaccgacgtacaccccttccccaaagcctccgacgcccaagccgaccccaccgacgtacaccccttccccaaagcctccgacacccaagccgaccccaccgacgtacactcccacaccgaagccgccggccaccaagccgcccacctacactccgacgccgccggtgtctcacacccccagcccgccgccaccatactactagaaagcgatgcctaccataccacactgctgtcagtctctggagcatttaggtggtctggatcaatggaagggttgtgtcctagccagccggcaaagatgagctgctgatggtaatgatgatgataagaggccactgctaccctactacgtaccctcctctttgtgtgctgccatccgtccccgttagacgatcgaggagagaataacgcagagctctctgctcccggcctgtcttctgccgtcccggccgtttaatttactagtgtgttcgtcctatatgtttagcagcagcaggtgtattgtgcgggtatgtaatggtattgcaactatattgggtgtaaaaccataataaatgtgggcaaatatgcaagg

SEQ ID NO: 33693 - DNA, 1960 bp, Zea mays
  Clone ID: UC-ZMFLMO17159C11_FLI
agccgctccccccaacaaacaaccctaatccgtgaccgtggacacgccgcaagctccatcgcgcgaatagattggggggattcaatagaggctacgcggggattggtcgcgctcgagatctcagcaccctcgcgcctgaaatctttctattgttgtcgtggttcaggtgatgagatcttggggagcgcgactcgctcggtcctgagatgctggcgggctacggcggcggtggccgcagcgtccatctctcctcccacaaggacctcctcctcggccgctgcggccggagcttcctcttcggcaacacgtggtttctcctctccacttacccggcgcgcctcctgcacaccacggaccgtcgcgctccctccgctttcgtcgccgccatcaaccgggtcccctgcgtgcggtcgcactgcacggggcagggcctgctgcagagaggcagcattgtcatggctgcctgcggctatgttcttaggcgaactgagctgggtgctgccaagcgccagcagccggataaggacccatctggcggaacacgcgcctcccgtattgcagccatggggtcactgggcagtgctgcgcggccagaggtgtctttcaggtacagggggctggagcattgtaagaagattggtgcaagcttgaaatgccgtgagccatgggggaatagtgcgttctggacaaatgccactgggccgggttggaagttgagctttacagttgagccatggactaaggactttagtacggcgtgtgcagcgccgtattctgctggagccacagaggatcaattgccgctcaatgagaagatgaatagctccactgttggaatgtccccagtttctgaaaaattgaagttgctctctggttcatgttacttgcctcaccctgctaaggaggcaactggtggtgaggatgcacatttcattagcattgatgagcatgtgataggcgtagcagatggtgttggtggttgggcagatctcggtgtcgatgctggactatatgctaaggagctaatgagaaattcaatgagcgctatcaaagatgagccagaagggaccattgatccaaccagagttttggaaaaggcttatattagtacgaaagcaagggggtcatctaccgcgtgtatcatcactcttaaagatcagggtatccatgctgtaaatcttggggatagtggtttcgtagtagtccgagatggccgcactgttctcaggtcaccctcacagcagcatgatttcaattttacttatcagcttgagagtggaggtggcagtgatcttcctagttccgcacaagtatttcactttccggttgccccgggtgatgttatcgttgctggcacggatggactatttgacaatttatacaacaatgagataagtggtgttattgttgaagctctccgggttggacttgagcctcagattgcagcacaaaaaattgccgccctggctcgacaaagagctacggacaaaaataggcagtcaccttttgcatcagctgctcaagaagctgggtaccggtattatggtgggaagcttgatgacataacagtcgtggtctcatatgtgaaaagcgctggagccccatgatctgagcctttcttttattagatgtaatgtacataaatcattgtcccgaactggcggcgtatgtatgcaccagggcatagaagcttattctcaaggtgtggaatcccctgatcctagaagcacctgtgctgggttcagtatggttgtgctttagccctggaacatgttagcaaaccattgcaccattttacttgtttgccactgtgagaaatcattttctctaattatctgaactcctgaagccagggtgggtttgtttccccccttggagttggaggataatgaccagctggaaccaaattttgttgtaaacagcgttgattgccgaatgatagttatagacatcttggact

SEQ ID NO: 33694 - DNA, 2299 bp, Zea mays
  Clone ID: UC-ZMFLMO17159D05_FLI
gtcgtaaaatttattttgaaaatgcataaatcacgatggtctcatagggcacttgttttgttcacagtatatcaaaatataaagtacaatgatattttgccaatattgttgcaatcatacacgatttttttgacatgaaaaaaaacgaggagctagccctgtcttcggtacttcagacatttggaaccattagcctttagctaggccgtggtccgaaatggaagcatcgctgttcggctcttgtcaaaacaggtctgtgtaagtctgtataaagcataaagacacgccagaacaagcataagtaaatcaaacagaaacctaaaatgattcaccagttaaaagacatggattgagaggaatgatataatataagagtagagttatgcattcacttatatcatgctgctctacaacaacctgtcacatcatttattcaagcgtagaacaccttatcaagcgtggctttatgaccagcaacatttatacaccatactactacaaatacactgatatggttggcatgcaaagtattatgtagaaactgataaaacattatcttatatcgtagaggcataagtgactactcgtatataccatagactcactagaacatattcttgaaatagaccatatcggtgggaagccttcaaggtgaatcccatgctgttacttggagcttgaagcctagaagataaatatggcatacaaaaagagcaggaaaatactatatcatatatcaacaaataactaagggatgtaaatgctctcagaattattcaagaattatctaaactatgtataaaaaagaacacaagctgcccactagatttctacaaaataattgacagatactgatttgcttccctgatgaaagtgaaaagtagcagaacgtgttccccacttcttgactgaatccacaaaatacttcagctagaactcgccatggacaaaaccaaataatttcatcccatctactagtattgtatgaaataagttgcatagattaatattgatcaaaccagtcaggcatctatggaaggaaatttttcataagcttacttccctcagtcttatagatgaaactatcattactttttgccttgttgacactttgtatttccatcttctcaggcaacatctcgcgaggtgaagtgtctggatgccattaccaggtctcctgtgtatgctcagttttcagagactttgaatggcctgtccacaatctgtgcctaaaaatcctatgatagaatggcaaacatcaatgggagatcaatggacaacaacattaggttcacacttgtgaacatgggtgcaaataggtggctagctattcgtctggagacattgggtggcatcatgatatggtttacagcaacatttgttgttatgcaaaatcaacaagcagataatcagaaggcctttgcttctacaatgggtcttcttcttacttacactctcaatattaccaatttacttacagctgttcttctggaattttaattttttgaccagacgaggaactagtaagcaggatcgggatcagctcacctgaagctggagggtgtgaaggaggaagttgcggacgatctcggtctcaccgcgcatgaggaaggcgagcacggagggcacgaagtccctgatgaagacctggtcgtagttgagcatctccatgcactcggggttctccgccgccaccgtccccacgggctcgccgcagtagctgacgaccgccctccgcagcagtcgccacgcctccctctctgtctccgtctcctccctcaaggggacagccggtgccaccgcctcatcagtctgtcgcgctgccgcgtcctcctccagaaacagcagcgcgggggtcggaggggacggggactggtataagggtgggaggagtgcccgggccggcctgcgactgcgacgccgcggagacgaggaaggggaggcaccggccgtacggtgggtggtgcgggtggggcaatctgtggggcgtgggcggtgggggatccggaactaggctaccggggggcgctgccgcgccgagtcaacgccggagagcctcgagacggcgagcagcggagcaggagatccggacgccggtgcctaggcagctggccgactctgtgaatcaccaagtctggagagggcgaggggcgaacaaatctgggctaggaggcggtgtgccgaagggatcgcgtgcaacaggtggggactgggtgccgccaattgagggggattgacgtcgagtggttggggcgtggtggaggcaatggcgccgcgaatcgaggggggtcgacatcgg

SEQ ID NO: 33695 - DNA, 1345 bp, Zea mays
  Clone ID: UC-ZMFLMO17159E02_FLI
cctaaacatagatagtggcatatctctaaccatggtaccggtatagttttttgaacagtaatagtacgcttaaaatggaagaattataatgatacagaactaatagccctagtatcaaagaaagatgattttctattgttgataatgttatgttaattaagtagggacacgcacttgcaccaacacatctagcttgtcaatttcaaccgtgtgtgtcattttctgtacgatgcaactgggtttagaacgattgtcactaaactgacacaacatccatgcatggtcatgctatgtctaaaaaattctcttaaaacgatccatatgtgaaattgtaggtatcaacaattaatataaaactggcagcagaataaatgtcaaacccgggcgcgtgttgtcaatcggaaaaaagaaacaaaaatgtcctttctgtgaattgaatggacgcttgtacgtacgcccacacctccgtctcttaattttcttctttgaaactgtggtacatgctgcaccctgcaaatcgtcttgatggtcagtaagtacaacttgacgttcttgtttcgaaacgtggaattgggtgccgtgccatctcattagtttcgggaaaaaatactagtgcatgcctttctctatcggagatgaaaactgttacaagaaggtgtgtgctggtgaatatgtttacgaaattaccgtacactggcttgaaacgaaatgtgtgtgtccaggtaaagagatggggataacagacttcatcgaccctaacgacatctgtgacaaaccggtccatgaggtgatcagggagatgactgacggaggtgtcgactacagcttcgagtgtaccgggataaatgatgtgctgagagaggccttcttgtccacgcatgatggttggggcctgacggtggtgctagggatccattcaacgcccaagatggtgccgctgcacccgatggagctctacggccgtaggatcaccggctgcgtctttggcgacttcaagggcaagtcccagctgcccgacctcgtcgataaatgcgtcaacggggaggtcaatataaacttcgatggcttcataacacacaagatgccattctcggacatcaacaaggctttccggttactcgaggaaggcaagtcgctgcggtgcctgctcagtctctgatcgacaatacttcatcagcgaggacagttttggattgagtagcaaaataaatgtacaaggaaagtttttccctcgtatactcgcttcttataaaacgaatgcatgcaacttcttttgttctttgaagaagacaaaaggacacaattattctggagcaggtattgctaatcattttatcgctggttc

SEQ ID NO: 33696 - DNA, 1019 bp, Zea mays
  Clone ID: UC-ZMFLMO17159F01_FLI
gatggagttcatggatatgtttcgtcacttgaccatgctgttggtgacttggtactgtttcgtacatacagaattgtgcacagatataaatttcaagttgcagtttttttttcttgcagtattttctcaatctatttttgaagttccttcctgtgcagaaagaatttctggaggatgttgtattggaggaaaaccatggtttgccgtgcttcttatttgggcactccacaggtggagctattgttttgaaggccgcgctggatccttctgtagaacttcatgtagaaggtgtggtcttaacgtcgccagctattcatgttcaaccatctcatccaatcatcaaagttgttgcaccaatattctccatgttagctccaaaataccgtgtcagtgctttgcataagagaggacctcctgtttcccgcgatccagaggctctgaagatgaaatattcagatcccctggtgtatactggaccaattagagtcagaactggcaatgaaatcctccggatatcatcatttctgcaaagaaacttgagcagagttactgtcccttttcttgttctacatggtacagctgacacaataactgatccaagagcatccgagcgattataccaaacatcaatgtcaacaaataaatcaataaaattatatgatgggtatttacatgatctcctctttgaacctgaaagggatgatatcgcaaatgatatcatcaattggttgagcgcaagacttagtgttcttcagagatggtgagctgaatcaagtatgaactacaaggtgcttccccttatgtagttaccggcggttttactggaactgtatacatggcatagagtgcagaatagtgtaaatgtaaactaggatgttatcattatgtcttcacggtcacggtcatttcttgtcttcagctctgctgtataagtttgggaagagcctacatgagatgtaaataatattagagttaagctgaaaataatgtatctcctaatacacaggtagtttagtgtc

SEQ ID NO: 33697 - DNA, 1277 bp, Zea mays
  Clone ID: UC-ZMFLMO17159F12_FLI
cgcgaagcaccctacctttgctagtcctcctacgtctcctcttcgcttaatcttgcggggaggaggaagatgacggtgacgccacggatcacggtgagcgacgggcggctgacggtgcgcggccgtacggtgctcaccggcgtgccggacaacgtgtcggcggcgcacgcggccggggcggggctcgtcgacggggccttcgtcggcgcccacgccggcgaggccaagagccaccacgtcttcaccttcggcacgctccgggactgccggttcctgtgcctgttccggttcaagctgtggtggatgacgcagcggatgggcgtctccggccgcgacgtccctctggagacccagttcatgctcgtcgaggtccctgccagtgacggcgacggcgacggcgacgacgcccccgcgtacgtggtgatgcttccgctgctggaggggcagtttcgggcggcgctgcaggggaacgaccgcgacgagctgcagatctgcatcgagagcggggacaaggaggtgcagacggaccaggccgcgcacatggtgtacctccacgccggcgacaaccccttcgacaccgtcaccgccgccgtcaaggcggtggagaagcacctgcagacgttccaccaccgcgacaagaagaagctgccgtcgttcctcgactggttcggctggtgcacctgggacgccttctacaccgacgtcaccgccgacggcgtcaagcacggccttcagagcctgtccaagggcggcgcgccgccgcggttcctcatcatcgacgacggctggcagcagatcgcctccgagaacaagcccgaccccaacgtcgccgtccaggagggcgcgcaattcgccagccggctgaccgggatcaaggagaacaccaagttccagaccaagcccgacggcgacggcgacggagagcaggcggcgggcgggctgaagcgactggtggccgagaccaaggacgcgcacggcgtgaagcaggtgtacgtgtggcacgccatggccgggtactggggcggcgtgacgccgacggcggggacggcgatggagcgctacgagccggcgctggcgtaccccgtgcagtccccgggcgtgacgggcaaccagccggacatcgtcatggactcgctatccgtcctggggctgggcctggtgcacccgcgccgggtgcgagacttctacggcgagctccacgcgtacctcgcctcctgcggcgtcgacggcgtcaaggtggacgtgcagaacatcatcgagacgctgggcgccggcca

SEQ ID NO: 33698 - DNA, 397 bp, Zea mays
  Clone ID: UC-ZMFLMO17159G04_FLI
atgaatcttcagaagaatacggttgcttcgatatttcatacttcagatgcacaatcaagtgaatcagctggtgacacagttgtagctcgaacatacctgttccgattgaaaaatgtagaggaggctacaaaactatcgacagcaatcaaggagaatgcgccctcagactagttcttacggcatggattatcatctcgaatctctgcttttggcacgagctgtaagatctgaaggggacaccaccgatggccactgcggcaggctaaaagatgccttgcagagtttctttctttctttttttgttctcctagctgcatcaagatatcttgcttgtaacttgtaaggctgactggctggttatgtattagtactttcatgtaccatcttttgcattgac

SEQ ID NO: 33699 - DNA, 562 bp, Zea mays
  Clone ID: UC-ZMFLMO17160A05_FLI
gcgccggcagtcgccgtcatcgatcgatcgccggaaaactaacccctaacgatgtctggagccggcgaggaggacaagaagcccgcggagggcggcgcccacatcaaccttaaggtcaagggacaggatggcaatgaggtgttctttcgcataaagaggtccacccagctgaagaagctgatgaacgcttattgtgaccgccagtctgtggacatgaatgccattgcgttcctgtttgatggccgcaggcttcgcggcgagcagacccctgatgagctggagatggaggacggcgacgagatcgatgccatgcttcaccagaccggaggcagcgttcctagcaccacctaaaagcatcagtcgcggagcttcgttttgctctccgccctgcgtagtagtaaacaaaagggaaaaagtctttttaaggaacttgtgatgctctggctccttgtgccattgctgagggacatccttagcctttgtttagtagtatggtttggtactttgttctgtcatcactcgtttatctatccctaatacatgccgccatgattgtactccc

SEQ ID NO: 33700 - DNA, 1771 bp, Zea mays
  Clone ID: UC-ZMFLMO17160B03_FLI
cgcatccatactccactgcatctgccatcttggggaactctttggcctctggaaccggcctgcccagccgctcgatcgacgttcggcgaggaggctgatccggtctgttggatcggaggcgcggcgatgggggcgctgtcgcggccggaggaggtgctggcgctggtaaagctgcgggtggcggcggggcagatcaagcgccagatcccgcccgaggagcactgggccttcgcctactccatgctccagaaggtgtcccgtagcttcgctctcgtcatccagcagctcggacccgaactccgcaatgccgtcagtgtgcatcttctacctcgtgctccgtgccctcgacaccgttgaggacgacactagcatcccgaccgaggtgaaggtgcccatcctccaggaattctaccggcacatctacaaccgcgactggcattattcgtgtggaacaaatcactacaaaatgctaatggataagtttcaccacgtatccactgccttcctggagcttggtgaaggttatcaaaaggcaatagaagaagtcactaggcgaatgggtgcaggaatggcaaaatttatatgcaaagaggttgaaactgttgatgactatgatgagtattgtcactatgtagctgggctagttggctatggactttccaggctcttctatgctgctgggacggaagatctggctctagattcattgtcaaattcaatgggcctatttttacagaaaactaacataattagggactatttggaggacataaatgagataccaaagtcccgcatgttctggcctcgagagatatggagtaaatatgcagataaacttgaggacttcaaatatgaggagaactccaaaaaagcagtacaatgcttgaacaatatggtgactgatgcactgattcatgctgaagagtgccttcagtacatgtcagccttgaaggatcatgccattttccgtttttgtgcaataccccagataatggcaattggaacatgtgctctttgctacaataacgtgcatgtctttagaggagttgtgaagatgagacgtggtctcacggcacgaataattgacgagacaaactcaatgacagatgtctatactgctttctatgagttttcttcattgatagagtcaaagattgatgacagtgatccaaatgctgctctaacacagagacgtgtggattcaataaagcaaacttgcaaatcatctggtttggtaaatcaaagggggtaccatttggagaagtcaccttacaggcctatgctgatcatgattgtcctcctgctggtagctattcttttcggggtaatgttctagctggccctttttttttttccacgatggagacttgagagaaactatgccaatcagatcctttttgtactgtgtagtctccaaaggctgcagcaaattcggaagtactgaccgtagatcgatacggcagcatgctactgtttccatgactccgttgctgctctcaattcgtttgttcattttactttctcgcgctttgtgttgtttgaagctgttttaaggcagaaaatactatcgtgacatgtatgatgtatcctacgaacatgtgtctcagtttagttagcaatggctgcactgtagttattctatgtgttgtcttgttttctgatatgtttgtgtttatcataactgcgtactctcccatggcgctaattatatttaatattatatgtatgtttagctaaattttaaaacatctaatgataatagttatgtact

SEQ ID NO: 33701 - DNA, 986 bp, Zea mays
  Clone ID: UC-ZMFLMO17160B05_FLI
aactccccttcacctgcgccgccgagatccatggcggattcgtcctctccccaaacctacgattcaaggacctaggtgtcgtagatggcttcaacacgacgcccgatgccggtagcagcccggacgaagcgccagtgtccaagcatccggttcctcactgtcgcgccgccacccccataggaggaggcgaggatgtcgcactacaagttcaagcactcgaggcacggttctctcggcttcctccctaggaagcgatcctcccaccaccgcgacaaggggtctcggcctctcgggcgagctcgccgcctcctccctctaccgcgtgcggggcctggtcgcgctgagcctcgcgtccaacggcttcgagggccgggtgcccgtcggcctcgccgcgctcggcggcatcctccaggtgctcgacctcggggagaacatgctctccggcgtgctccacccggcgctgttcggcaacctcaccagccttttgaactgtggtcttttattctctatggggcttctaggatacatcttctccagaagcaccataagtcttgtcttgggcattacaccagggctagccactctgctacttggcactctcagtctgaagttctggaggagcggcagatccagcttcctgcttatcttggctcaggcagaggtgatgttgatgtgcaagcatcttcactttgagttctgccttgccagaatgaatcaagtttattttcccatcctgctccatttgagggatttgtttggcttccaaatggtttgttggtcctaaaatagtcagaatcacatgacatctgtgttatagatatggacctcggtggttttctccacattaggaaagccggaagagccttttgaactcatttttttgctaacagtggtgttattgtgaaacagagttttgtgtgtatgtaccaacaactaaaatgtaaacacgacattatcatagttgagtacaggaataattatctctt

SEQ ID NO: 33702 - DNA, 976 bp, Zea mays
  Clone ID: UC-ZMFLMO17160C10_FLI
atgctcccatgtccttcaaggatacgggctaacggaaacctgtgctgggtcctttgtttccctgccgaacaacatgtccatgctgggaactgtcggccctccagtcccgtatgtcgaagtacgcctggagtctgtccctgagatgggttatgatgcactgtcgagcgagacgcctcgtggggaaatttgcatcagaggggacaccttgttctcgggatactacaagcgagaggacctaaccaaagaagtcttggtcgatggctggttccacacaggagacattggtgagtggcagtctgacggaagcatgaagatcattgaccgcaagaagaacatcttcaagctctcacagggagagtacgttgcggttgagaatctggagaacatctttggtcaaactcctgctgttgattcgatttgggtctacggcaacagcttcgagtcgagcctggtagcagttgtgaaccccaacacacaagcactggagcgctgggcagagtcgaacggggtaactggagaatttgccacgatatgcgaagaccctagagcgagagagttcatcttgggagagcttacaaagatgggtaaagaaaagaagctcaaaggctttgagctcatcagggctgttcatctggaccccgcaccgttcgacatggagcgcgaccttatcaccccgacgtacaagaagaagcggccacagctgctgaaacactatcagaccatcattgacggtatgtacaatagcatgaagtaggctctgcacggctccacctgttgcctcacggcatggagaatcaaaatgctttgctagccgtcacctcggcaagcagactccaatgtgaattgagattatttcattagattgtgtcattaaaaagttatgctacatgatgttagctaggttttttttatccctcctggctcctgaaattggcgtacaagctgcgtgaatgcacccgtgtcagtgttgccatct

SEQ ID NO: 33703 - DNA, 1581 bp, Zea mays
  Clone ID: UC-ZMFLMO17160D03_FLI
gcacaatcccgtcccgatctcggggcacgcgagcgacgataaacttcctcgtggcggtgaggggcttggagtcggcgcagagctggacgagttgcaccttgcacgcggcagccacgcactagcctgcagctgcagggcagggcaggggcggagaccatggggagcccgcaccaaggacacggcgttgacggcggcgggcgcagcagcgacgaggagggcgacgccgggtcgtggcggctgcgcatggacagcggcttcagcgtcccggaccggttccaccgccagccgcccttctacgccaggatcttcggcggctcgcacgggaagcagaggaagatcgcgaagtactacaagaaacaagagaatctactcaaggatttcagcgaaatggagaccatgaacgaaatgggtggcctagatcagaatgctcctaccgaggaagagcagaagcagttggcgaagagcgagaggtttgccatcaacctgtcgaatgcagtcaacctggtcctcttcgtaacaaaagtcgttgcttcagtcgaaagcgcgtccatggcggttatagcgtcgacgctggactctctgttggacttgctgtcagggttcatactttggttcactgcgtacaagatgaaaaagccgaacaagtacaactatccaattgggaagaggcgcatgcagccagtgggaataatagttttcgcatcagtgatgggcacacttggcttccaagtgctgatcgaatcagggcgccagctcataactcaggagcacgcggatttcaagttcaagcaagagctctggatggtcattagcatgtcctctgttgcggtcgtgaagttcttcctcatgctctactgccgaacgttcaagaatgagatcgtgagggcctacgcccaggaccatttcttcgatgtaatcacaaactctgtcggcctggtctcggcgctgctcgctgtccggtacaaatggtggatggaccctgttggcgccatactgatcgcgttgtacacgatcacgacgtgggcgcgaacagtgctggagaacgtaggcacactgataggcaagtcggcgccggcagagtacctgacgaagctcacgtacttgatctggaaccaccatgaggagatccagcacatcgacacggtgcgagcctacaccttcggcacgcactacttcgtcgaggtggacatcgttctctcgggcgacatgccgctgagtcaggcacatgacatcggcgagtcgctgcaggagaagctggagcagctgcccgaggtcgagcgcgccttcgtccatgtggacttcgagttcacgcaccggcccgagcacaaggccgaggtctgagtgcgtggttagtggttactgcagagttcagaccagctgtagcgctactgcagatttgacttcatatgctattagttcgtaagacgaatgctatattcatttcccacaactcttcaaaaagaatctagatatttttttgtcatgtacgtgcagactggaatacaattttgtatagtcgttcatgaaccggtgaaaaatatattttttaatacatttggctaataaagaattattcatatt

SEQ ID NO: 33704 - DNA, 2416 bp, Zea mays
  Clone ID: UC-ZMFLMO17160D11_FLI
gatgaatggacatcttgagatcaacagtgcaaatcttgctcgcgtcttaagagagttttcacctgaggaagttacagcaaatatctatacagtggttgatgtgcttctgcatcatatccaatgcgaggtgcaaagggggcatctagcacaggatttactatccaaagcaatcacaaatctttctttttttatatggacacatgaactccttccgctggatattctattgctagctcttattgacagggatgatgatccttatgctttacgccttgtgataagtctgcttgaaaaaccagaacttcagcaaagagtcaagaatttctgtaatactcgttctccagagcattggctgaaaaatcaacatccaaaaagagctgagctccagaaagctcttggcagccatctttcatggaaggaccgctatccacccttcttcgatgacattgctgcacgtctgcttcctgttattccactgattatttataggcttattgagaatgatgcaactgacattgcagacagagttcttgcattctattcttccttgcttgccttccacccgctaagatttacatttgtacgtgatattcttgcgtatttctatggtcatcttccaatcaaactaattggtaggatcctcaacctgctgggtgttagcactaagacccccttttcagaatcttttgctaaatatttagtgtcatcaaattcttcaatatgtccaccaccagaatactttgccaacctgttgctaaacctcgttaataatgttatacctcctttaagtagcaaatcgaaatcaaacccagcagacacaacacgctcgactttcaacaaacatcatgcatcttcacaacctggtggagttggtaacaccgatggccagagggcattttatcagaatcaggatcctgggtcgtatacacagcttgttttggaaacagcagctattgagattctctcacttcctgtgcctgctgctcaaatagtgtcctctttggtccaaataatagcacatgtacaagcaatacttatacagtcaaatagtggccaaggaatgtcaggtggtttggggcaaagttctgggctgccaacttctccttcaggggctgctgaatcctcaggtcccaaccaagcgaacagtgctgcaactggcatcaatgccactaactttgtttctaggagtggttactcctgccaacaattgtctgttttgatgattcaagcatgtggtcttctgttggcacaactcccaccagaattccacatgcaactatactcagaagcagctcgagtcataaaagactgctggtggcttgctgatggttccaggcctgttaaagagcttgactctgctgttggatatgcactgttggatcctacatgggcttcccaagacaatacatcaacagccataggtaacattgttgcccttctgcattccttttttagcaatcttccacaagagtggctggaatctactcatactgtcatcaaacaccttcggccagtcaattcagttgccatgttaagaatcgccttccgcatattgggtcccttgttacctcgtctagcctttgctcgacctttgttcatgaagaccttggctttactcttcaatgttttgggtgacgtgtttggtaagaaccctcaggtctcaaatccaaatcctgtggaggcgtcagaaattgcagacataattgacttcttgcatcatgcggtgatgtatgagggccaaggcggtcctgttcagagcacgagcaaacccaagctggagatactgacattatgcgggaaagtaatagagattttgaggccagacgtgcaacatcttctctcccacctcaagattgaccccacctcttcaatctatgctgcaacgcatccaaagctcgttcaaaacccatcctaataatgttatattttacaagtgtattctaatgatgcaagatgcttcgaaccactgcagaagtctcaacatgtgatgctgttggatgagtagaattgcagtaactgtaacatgtgattcaggggcgtatctgcttagtgattcgccgttgtcagttgtatcctttagttagaatgttgtaaatgctatctgcttagtgcatattaggacataactacatagtgtaagcagtaaccatggaggttatcttgccaggctaagaattttggcttccttgcctgtgagccatgcgacatatgtatcctgtcgcattaggatgagcgacaaccgacacggtcgcatgatgcaagatttgtgccggttggccgattgtcaccgtgcagacctcttcgtaacagtgcttcacgtggaaggtttgaccgagtgacggcatcaccagttaacagtgtaaactgtatcaaattcttgatcatcttgcttattatgaaatgcctactttgtgtc

SEQ ID NO: 33705 - DNA, 1604 bp, Zea mays
  Clone ID: UC-ZMFLMO17160E02_FLI
gactctttcagcatcagttcctatgctcatgcctccatcttgtgaaggatccttttgcccagcagcaagcccttttcagtatactgtcttttttcttggtctttatctgattgccctgggtactggtggaattaagccgtgtgtctcgtcatttggagcggatcaatttgatgatacagatccagctgagcgagtccagaagggttctttctttaattggttctatttttcaataaacattggtgctctcatatcaagcagctttctggtttgggtgcaagacaatgtaggatggggactggggtttggcattccgactgtattcatggggctggcagttataagcttcttctctggtacatcactttataggttccaaaaaccaggaggtagtccaattacacgagtatgtcaggtgattgttgcctctttccgcaagtggaatgtgcctgtcccagaggatagctctctgttgtatgagctacctaatggggtatcaacaattgaggggagtcggcaaatagagcacacagatgaactcagatgtttagacaaggctgctacagttaccgaagttgatgtgaaaacggctgacttcaacaacccatggcggatatgcactgtcacccaggtggaagaactgaagatactagtaaggatgttccctgtctgggcaacaacaatagtgttttctgctgtatatgctcagatgtcaacaatgtttgtggaacaagggatggtgcttgacccatccttgggctctttcaagatccctccagcttcactatctactttcgacaccctaagtgtcatcatatgtgtcccgatgtatgattacatcgtggttccgatagccaggagattcactggcaacgagaggggctttacagagttgcagaggatgggtattggcctggtaatttccatcatagctatgtcagtcgccgcagtcctcgaaatcaagcggctagcagttgccagggaagcacacctggtggatcagaatgtcccggtcccactgagcatattctggcaaatccctcagtatttcctgattggtctagcggagattttcacattcattggagcgctcgagttcttctatgaccagtcaccagacgccatgaggagcctctgcagcgcgcttaatcttctcactactgcgtttgggaactatctcagcgcgttcattttgacaatggttgcgtactttactacgaggggaggtaaccctgggtggattcctgacaacttgaacgaaggccatcttgattacttcttcttgctcatcgctggcatcagttttctgaacctgattgtttatgtcctctgtgctggcaaatacaagagcaagaaggcagcttgagttgtgaaggccaggggctggatggcgtgctgcgcgccatgttatggtggacacttcagttcaacatctgtatatatgtttcccgcattaaccaccctagctgaagcaaccatctgcaattgttgcaaagtttatattcttcattgtgctggactaagttgattatacattcgtgcttctactttgtgtatgtatatatctgacctaaagttgctgaacatagacaatttcacttgcc

SEQ ID NO: 33706 - DNA, 1524 bp, Zea mays
  Clone ID: UC-ZMFLMO17160E05_FLI
ctcctagcgaatccttgcgggggaaaggaatgggcgtcagcgctcgagctcaccatccgaagcaccggtgccaccaggagacgtgcgtgcccgacggcgcgtcgctcgcggcgatgtacctctacggcgacgtgctcgagtccgtggtggagcgggtgccggtggccgacctcgccgccgcggcgcgggtctcgcgggagtggctccgcgcggtgcgcgccgcgctgcgccgccgcccgctgcggctgccctggctcgtcgtgcacctccagggccgcgggggcctccggtgcgccgcggcgtacgacccgtgctcgggcgcctggctcgccgtgccggcgccgcgccacgccacgccgtcgcacgtccgcctcctgcgcggcgcgcgcggggaccgcgtctgcgcgctctcgctctcggggctcgccgtcgcggccgatccgctcggcacggccggatgcgtcgcgttggatgcccccggcgtgtggcgcatcgacccggtgttggccgcggtgggcgaccgcgtcgtcgcgctcggcggcgcgtgccggctggcgctggccgagggcggcaacgccgccgcggtcgaggtccacgaggatggcgggtggaccgcctgcgatccgatgccggacgcgctcagggactcagccgccgcgacgtggctctccacggccgccacggaccagcgggtgtacctcgtggagaggaccaccgggtgggcgagctggttcgacccggcgaaccggcggtggggccccacccgtcgtctcggccccgacgccgccgttaccacgtggggcgtcgcgcccggccgcgccggcgccgaggaccgcctccttctgttcggggctaagcgggcagacaaggaggcagagtgcacggtcgtcgtccaggcatgggaggtggacggcgacactctggaacagagcccctccgcatccagcgatgcgatgccgccggagctgtccgagaggctgtttcgtcgtgacgacactgatgacgacgacgacgaagaggaactggacgacatgacgttgtcgatcggggtgtgcggcaacgccgcgggcgggtacgtgtacaatgcggccgagccggcgaacggcgcggtgctctacgagctgtgggaggaggggaacgccatcgccgtggcccggtgggactgggtgccctgcgcaccagctgtgcaggcccagccgctgggccgtgccatcctgggctgctcgccggtggggctggatgagctggcgttggccgttgctgcaaggggcccacgctgaactcacggcggcgacacaccaaatcaagtggagcaaccgctgtttgccacttgcaagtcaagtcgtgaaagacaaaaagatattcttgtatggtgtgccactcttgctgtttggttagctttaatccgaaacgtttctattccagtagcattttatctttataaattacagcttcagcggtcgcaacagctagattttgtaaatcatcatttgatagcgaggaccgctctttcctcaaagttgc

SEQ ID NO: 33707 - DNA, 1794 bp, Zea mays
  Clone ID: UC-ZMFLMO17160E11_FLI
ccaggttctaaatggcgatggcgatgatggctatgcgacgcgcggtggcgctcggcgctcgccacatccccgccgccgcagcctcttcgttccgagtcgtctccctccgccacatgagcgcggacgcgggcgccgcgatggagaagatccgcgccgccgggctgctcaggacgcaggggcttatcgctgggcagtgggtggacgcctacgacggaaagaccattgaggtgcaaaatccagcaactggtgaggtcctggcaaacgtgtcctgtatgggcagcagagaaacatctgatgctattgcttctgctcacagtacattctattcttggagtaaattcactgcaagtgagaggagcaaggcactaagaaaatggtacgatctaattatttcacacaaggaagagcttgcacttctcatgacactggagcaggggaaacctatgaaagaagcccttggtgaggtcaattatggtgcaagtttcatagaatattttgcagaggaagcaaagcgtatatatggtgacatcattcccccaactttatctgatcgcagattgttggttttgaagcagcctgttggggtagttggagctattacaccatggaattttccattagcaatgataacccggaaggttggaccagctttggcctgtggctgtactgttgttgtcaagccatcggagttcacacctctgacagcattagctgcagcagatcttgctcttcaagcgggaataccagcgggtgcattgaatgttgtgatgggtaatgctgctgagataggtgatgcgttgctgcagagtacacaggtcagaaagattacattcactggatcaacagctgttggcaaaaaactgatggctggatctgcaaatactgtgaaaaaggtctccttggaacttggtgggaatgcaccttgcattgttttcgatgatgcggacattgatgttgctgttaaaggcagtcttgctgccaagttccgtaacagtggacagacatgtgtttgtgcaaacaggatattggtgcaagaaggtatctacgaaaagtttgcaaaagcattcatccaggctgttcagagtttgaaggtcggtaacggtctagaagagagtacatctcagggtcctctgattaacgaagctgctgttcaaaaggtggagaagttcataaatgacgcaacttcaaagggagcaaatgtcatgctaggtggtaaaagacacagcctgggaatgtcattttatgagccaactgtagtagggaatgtcagcaacgatatgcttcttttcagagaagaagtttttggtccagttgcaccccttataccgttcaaaactgaggaagaagcagtccatatggccaacgatacaaacacaggcttagctgcatacatttttaccaagagcatacctcgttcatggcgtgtatctgaatctcttgagtacggcttagttggggtaaacgaggggattatttcaacggaggtggcgccatttggcggagtaaagcagtctggtctagggagagaaggatcgaagtacggcattgacgagtacttggagctcaagtacatctgcatgggcaacttgggttgagtcctgaagtcggcctctagctcgaaacactcggcagatgatgaacggagaaaccaggcgtgcttagaagggcgtgagttgcgtttagctgcaagatcggtcatgatggctgtgggagagcagttttagaataaatcgaataagccgcggagcattaaataaaagaagtggaaatgagatgtaaatggcgtggaactat

SEQ ID NO: 33708 - DNA, 1025 bp, Zea mays
  Clone ID: UC-ZMFLMO17160F05_FLI
gcatcctcgacctctccggcaacgccttctccggcgccataccggcgtctctgttcaccgcctcctccgcgctgcaggagctctacctctcccgcaacgccctctccggagggataccgccgcagctggcgctcctgggcgccctgacgcggctcgacttgcagcacaacgcgctcacggggaccctgccgagcctgggcgcgatgcgctcgctggtccacctcgacgtgagcggcaacgtgctgtcggggtcgccgctccgcgtgccagggacgctgccgccgtcgctctggtccgtcgcggcccggaacaactccttctcagggccgctcagcgccgcggcgctggctgcgctccccgcactgcgggtgctggacctcactggcaacgcggtgtccggcgcggtcccgggcgccgcgttcgcgcacccggcgctgcagcagctgcgcctgggttccaaccagctcgacgcggtccaggaggctcccgacggtggatcctcgagccagctcgtggagctggatctgagcggcaacaggctcgctgggcggctgccagcctgccttggcgcaatgccgcggctcgcggcggtcgcgctcgacaggaaccggttcaccggcggcattcccgaacggtacgccgtccgtgccgcggccgaggaatccacggaacagtgggtgccgttcgtcaggctgatgctgcaaggcaactatctgtgcggagccctgccgaggcagttgaggcagatccaggagggcagcgcagtggtgagcttggcggacaactgcctgccgaggtgtccacacaagttcttcttctgccaaggggccccgcagaaggaccacgccacgtgtcccaagtgcgatacttcgatccgtcgtcaggacattctgctgcggatgccctgattgtacattctgagctagtactaaaatctttgacaaaaataaaactacgtagtatgcattcttgtacgggtgtaccaaaacagcaaagtagaagctgcctatcaattgaatgtgttc

SEQ ID NO: 33709 - DNA, 1597 bp, Zea mays
  Clone ID: UC-ZMFLMO17160F08_FLI
cttttttgtgactgcttctgacgactcgagtgtcaaaatctgggatacaagaaagttggaaaaagacattgctttcagatcgaggttaacatatagcgtgggtaatagccgagctttatgtacggcaatggttcatggtacttcacaggttattgtcggtggtagcaatggaacattacacttgttttctgtggattgtgcacgaagcgttgggagtgtcgtggaaaggtatgctggaattgttggtgtaaaaaggaatgatatcaaagaaggcgcaattctcagcgttgtaaattgttcacccgacagctttagcccaactgttcttttcagcactgaacattgtggtatccataaatgggatacaagaaccaactcagaattttggtattttaaatcctctccagaggagggctatatatcagcacttgttgtgggccagtgtgggaattggttcatctcaggttcttcaagaggtgtccttacattgtgggataataggtttttactacctgttaactcgtggaactattcaatagtaagcccaatagagaaattgtgcttgcttatacctccaccaagttcaatatcttctgctggaaggccactagttttcgttgctgccggatgcaatgaagtctctctgtggaatgctgagaatggaagctgccaccaggtattgattagtatattacgaggtttgttggtagaacatcatcgttttaaagtgaatgttttgattcttttagtatttttcataagaagtgtttttcatgttccttatgccattttataagaagtgtttgcacctttttgcatctaaattggcatctggtatatttaacaaactgcgcagatgtttagaacagcgagcactgataatgaagctgtgatgtcaaaggcaccatcaaggcctgttaacaagccaatcattaaagatataataagagcacgtaattataagtacagaatcgatgagttgaatgacccacctgtgcgtcgtccaggcattcgttctttgctacccttaccaggtggtgatctgttaactggaggaacagatttgaagattcgttactgggatcaagccaggcctgagcaaagcttctgtattgctggtccctcggcgaaaaaagtccgttcagctaaagctgacattttagagaaagcagctggaaacgatgagtgttacgatataagatccagttttggagtacaagtcgtgcaggaaatgtacaaacagaataccacggtgtccggtttgacgcccaagactcagttcgcggaggcagctgcagattctgccgggtgccatcgtgacgcaatactcgcgctggcatccttcaacttgtctagccagagattgatatcagccagcagagacggtgctgtcaaagtgtggaaatagctgctccagcatgggtaagatgacaagtcctttggcgtgtacatatttgcctggttagtgcttacacagtacacatatgccactagttattgttgtacagaagattgatccacacaagagtcgaaattgacacgtaagctttcatcctgtgtgacctgacctgtgtatataaataccaatggcttacct

SEQ ID NO: 33710 - DNA, 650 bp, Zea mays
  Clone ID: UC-ZMFLMO17160G08_FLI
gtcggcgtagtctgctcttttattgggacaagggacttgattcaagaacatattgccttcagggtgtggccacttgcaggaaagtgggagatgccgaaggagaccatcaaagagtccgacgaaggcggactggtcaggctgaaatacacattcaaatacggggataaatttgttgaacccgatgacgactggttgaaaaacattgaaacattaagtgacgaactgcttggggcatattcgaaggccgagaacactgcgttatcagcagccttcggatgccgaaagaagaaaagactgaaccgggtatttgacgcagtcgggtttgtctaccctgattatcactatccgatactgggtcgcaaaagaaagaatacttctcttgcaacagaagctaccacaagtgccactagtgagccagcgccgcaaaggaaaaagatgaaggtgctcacccaccgagcgcgttttattgagccggccacagtgccagaatttattgatgaagtctctttggcctctgaagctacagaaccagctccagtgccgaagatagaagagaaatctgaagcgccttcagcagagaaggcagaaaaaccgagaattgaaggacaaaaaatattggaaatcttaagtccttcagcaaatgtcgaaac

SEQ ID NO: 33711 - DNA, 600 bp, Zea mays
  Clone ID: UC-ZMFLMO17160H09_FLI
ctggatcctccgcctccatcgcctctcgcgcctccatcgacctcggcgcctcgtccgtcctgctccacctcttcttacgccgggttaacatttgaggcatggcgaaacaccacccggacctgatcatgtgccggaagcagcccggcatcgccatcgggcggctgtgcgagaagtgcgacggcaagtgcgtcgtctgcgactcgtacgtgcggccgtgcacgctggtccgcgtctgcgacgagtgcaactacgggtcgttccaggggcggtgcgtcatctgcggcggcgtgggcatctcggacgcctactactgcaaggagtgcacccagcaggagaaggaccgggacgggtgccccaagatcgtcaacctcggtagcgccaagaccgacctcttctacgagcgcaagaagtacgggttcaagaagaggtgacggatcagtcagttgagcatccgtgatgtgcttctcgtggttctgtgtctgagcagcgtagcgtgactgatcatatgggcacacaatgcagttgtgtaccatgtgcatgtatgtgttcagaaatttttctgttgacagattgaagcaggagagtacgctcaagtttgac

SEQ ID NO: 33712 - DNA, 1572 bp, Zea mays
  Clone ID: UC-ZMFLMO17161A12_FLI
tgaagatacagatgttcataaagagcctccacactttacaaatatatctcaatcagagatgtataattgcacaagttcaggcagaatgtcatctgatgaagatcatggttcaggcacagtaaatggtgatttattcatactgaagcgcataatggtggagaggggaaatgcagcttacttgagtggattgcgggagaaatactttggggaattattttcaaatgcttccaggactcttgaaggtttgtcgaggatagaatcatcgactatctcagtggacatgctatatgatcctgatatccatctagaaaagaacttgtcagctactgaagaaccacttaagcatgtggctaggtttatagaatcttttgaatcagaatcaagggaaatttggctggtgtatcacaatgaaggccactcattatcaaaattgatatatacagctgaagaaacgaagttagtcactggcaacaataatgagagggtcagacatatccaagttttgcacccatcgaagtggtggcattggctaaggacaacaaaagctgggctaaagcagatgcaaaacctcttatggcagctgttgatgggactgaaggcttgtcatgatcgtaatatcacccaccgggatatcaaacctgagaacatgatcatttgctttgaggacatggagactggaaagtgtctaagagaggttccatctgaagcaaaacaaaataagatgaacatgcgtctgattgacttcggcagtgccattgatgattacacgttgaagaatctttatggtccaggacctactcgatctgaacagacatttgagtacactcctccagaggcactccttaattcaaactggtttcaaggatcaagaagtgcaaggcttaagtatgacatctggagcgttggagttgtcatgctagagttgatgatgggttctccccatgtttttcagataagtgaccgtacacgcattttaatggatcagcatctcggagggtggagtgaacaaacaaaggagcttgcatacaagttgaggtcatacatggagttgtgcattttagtcccagggatttcctcgcaacatcatggcagtggtagcccagaacagggtcaatttgggttagcttcctggaaatgctctgaagaatcatttgcacatcaagtgaagatcagagatcctctcaagattggttttcctaatttatgggcgttgcggcttgcacgccagctacttgtgtggcatcctgaggatcggctaagtgtcgatgaagcactaaatcatccttacttccaggagccaatgtaatgtaaggagaggagattagtgataactaaccgacgaatcttcagctcggtcctttcaagttcaagccgcgtgtatttggttagaggaattcatgaatcgtttgtaatttaccatcctagctgtgtcataagatgttgtgaatataacatgaagtaaaagatagtagcatatgtgaaattacatgtgtaacgactttgcccttacaagccacagcattaggccagactgcctttggttgcaatcactaatgaggaagaacgttatct

SEQ ID NO: 33713 - DNA, 1312 bp, Zea mays
  Clone ID: UC-ZMFLMO17161B07_FLI
ttcctgtacagtttattggagctataatgggtgcaagggatctgaatattcaaacggaaaacggccacattggcatgccaactaatatctgctgtgtcgttgtggagtaccttcctggtggtgcactaaaatcatttctgataaagaacaggagaaagaagctagcttttaaggtcgttgttcaaatcgctcttgacctcgccagggggttagtattttactggatcatcctcggtctccctaaatctttatcgtaccgtttcttgttggataattattgtctgcattgactcttcaatcttcgttagattaagctatctccattccaagaagattgtgcaccgtgatgtgaagactgaaaatatgcttcttgacaaaacgagaactgtgaagatcgctgattttggtgttgctcgccttgaagcttcaaatcccagtgacatgacgggcgaaactggaacgcttggttacatggcacctgaggtaccttttcctgggcagtgacagacactcaacccctcctccactcctagctgctcttttatctcgtggtgtcatcacttttagctagctctggcacaataatagtaataaaaagacatccttgcatgaagcacttgtattagtctatgttatgtgccttgcaggttctcaatggaaatccctacaacaggaaatgcgatgtttacagcttcgggatctgtttgtgggagatatactgctgtgatatgccatatcctgacttaagcttctctgaggtcacgtctgcggttgtccgtcaggtaaagatctgattttccgccttgcatgcttgccgcttgcaagttgtaactctctagccgctgagttctgagcaagtggatgatactacaatactacctggtttacagaacctgaggccggagataccacgctgctgcccgagctctctatcgaacgtgatgaagcgctgctgggacgccaaccccgacaagcgacctgagatggccgaggcggtgtccatgctggaggcgatcgacacgtcgaagggtggaggcatgatccctgtggaccagcggccaggatgccttgcgtgcttccggcagtacagaggtccatgacagataggtggaaacctgttggagctgcggcctctagatctcgtgggtgccgatcgatcgcgtgttgttttctggggaaacaaactggttaatggagctagcccgccttaccggctcgtgtaaatcctctgtccatcaattctgtaactgtaactctgttttatcgattaatgaaaagaaccgggcttgctcgactgattcctggccgatgc

SEQ ID NO: 33714 - DNA, 1332 bp, Zea mays
  Clone ID: UC-ZMFLMO17161C02_FLI
tgaagagatggcatacaaccagggtagaggcaaaagttcagttattattgaggaaattgaagaggatgacaaggctgctattgctgaagtgcagagggcaacgaagaagaagcaatgccctgaaaatggtgatgagtctcaacttcaacttgctgtaagaaattcacctactgaatccttggaaagtgaagatgaagatggtttccctgtatcattttctgaatcaaagaagagttctgagattatttcaaacaagaatgtgggaaaagacaaggagactagcaacaaagacctgaaaagaaaaagtggagccattagcgaccgtggtgattcttcagggggggtaaaagctgagattgatggggcatcaaagaaaaagaaaaagggcaaggacaaaagcactgttatggacacaggaaaagtaaacaaggaagaaaaggaggttaagcaacatgattctccagctgatcctgccagtacaaaacataagaaaaagaaaaacaagaacaaaagtgcttctgggggtgataccagtgagcaatctgctaagaacaacaatattgataaagataatgaggaggcaagtgcgcaggaggccaataaaaagaacaagaaaaagaaggcacatgatataagcagaagtgaaagtcaggcaggaactggacttggtgagtcagatagcaaggaaccactccaaacacgaacgtttgccaatggtatgatgattcaggaggtagagatgggcaaacctgatggtaaaaaggccagccgtgggaagaaggtttctgttagatatattggcaagctaaagaatggcactattttcgactccaacgtcaatggaagaccttttgagtttagactaggtgttgggcaggttatcagtggctgggacgtcggcgtcaatggtatgcgggttggggacaaaaggagactcaccattccaccttccatggggtatgggagcaaaagagtggggcagataccacagaactcaactctcatcttcgatgtggagctggtgaacgtaaaatgaagtgagaagatccacgagaaactgcggcagtttcacaaattttgctacgcatcattttccttgggcaatgctgtttcgtaggcataggggcatgttaagtggattcatctctgtcgctatcatactttcgaactgagtttcagaaggaaaaaaactgtggactgttgccatctgggataattcctgggctgcagcattcgccatccttctcccggttccttcagggtcattttgacattcttgtgataccctcagaaccttttgaactgatgaaatggttaaggtggagtacgtgt

SEQ ID NO: 33715 - DNA, 1186 bp, Zea mays
  Clone ID: UC-ZMFLMO17161C10_FLI
catagatgaaatagataaaataacaaagaaggcagagagtgcaaatgttagtagagatgtatctggagaaggtgttcaacaagcattgttgaaaatcctagaaggaactgttgtcagtattcctgagaaaggatcacgcaagaattctcgcaatgacagtatacagatagacacgacagatattctttttatatgtggtggtgcttttgtggacttggaaaagactatttctgaaaggcgccaagattcatccataggatttggggcacccattcgtacgaacatgagaagttctggagctagctgtccaatggttacctcatctttattagaatctgttgaaagtggtgatcttgtaagatatggtctaattccggagttcattggtcgtttgcccattctagtaagtttggcagctctgaatgaaggtcagctcgttcaggttctgacagaaccaaagaattcactttccaaacaatacaggaaaatgtttaacctgaacaaagttaagctgcactttactgatggtgcacttagattgttagctaagaaggcgatagctaaaagcactggtgctcgtggtttaagagccatcttggaaactgttcttttggaggccatgtatgaggttccagacgaaaaaacaggaaatgagcgagttgacgctgttgtggtggatgaggaggcgattggttccgttgataggccaggttgtggggctaaaattctccgaggggatggtgcattggaccagtacataacaagaaccaatgtgatgaatttacaggaaactaacgatggtttggccggggagctcgaggaagcgtacatgctgtctagaattgttagcttgtaatttgaaaggctggggaggaagcgtatatgctgagttctgaccaacttcgtacatcgtgtaacatgtctaccccaacacaggccggctactttttgctcacaaaatcacctgtactctgtctccattcctgttaagctctaacgagcagatagatccggggcaccttttccatgtaaacaggagttgccttttgattgagcaaccgtcctgcggagtaaattgttgcccatttttccccgctgcccccaactgggcagctcgattgtggttgacagagttgtaaagatcatcaatttactgatatgatatgataagaaggagcactttcac

SEQ ID NO: 33716 - DNA, 1106 bp, Zea mays
  Clone ID: UC-ZMFLMO17161D06_FLI
acttgctgttgatgacgagcgtcaaacattaggtgaaccctggaaaccttctgttacaaagccaacagaggtgggcatgcagtccaagaacaataagctcgctaatgtcgtgagcctgcttcagaagctccagcagcttagcgtgagcaaggatgaggacgcacctccggtcgaccatatggctttcctgtgcgagacagaaagcccggaccaccgttacgtgtctgagatactgctggcctcgggtcttctgatgaaagagctaggttcaggacaggcaggcctccagctccagctccactcctctggctacccgatcaaccctgacttgttccacgtgctggagcaaagaaaggcaggatgggccagcatacctgacggcatccaccagagcagcaggagcggcgccaagtctgatcccaagagagcgcaccggaagctggtgtttgacaccgcgaacgagcttctcctccagaagtttgagaaggaaaccacagtttacgcggtcagttcctccaccggagcgaaggatcatccacctgcaaaggctcttagcgggcagcaactgctgaagtttgtatcttcagaaatcgaaggcatgggtacggagcgatcgtccacctgccagatggaaggaggcgtgatacctgacgcagagatcctgcagaggctgcagggatggacgagcttcagcagggagctccctgggatggtgctggagatcgagaggtcggtattcaaggagctggtggacgaggtggtgcatggggagtctgccgacggcccggagatgaaggcggcaggcaggcggagaaggcggcggctctttgcttgatatggtttgtgtgaccatcaccatgcaccgggcgggttgtccaagtggatgggcctgatcatgctgtaactttgattgccgtatgaactttttttctctctctctcaagagagaggtgcacaagttgtactgttgtagtataggcagcgcagatttgcagaggcatgaaaaatgggcattcgtttgtgctgtatagatactctgtataccattgctttttttattcctcgcgtttcattggggatgatgctatttcagtaaagaagtgtcc

SEQ ID NO: 33717 - DNA, 1173 bp, Zea mays
  Clone ID: UC-ZMFLMO17161E04_FLI
caagacgctagtcgaacacgaggataagctcctgcagccagtggttggttggttggtttcctcgcccgtgccgtgcgcagctgaagccgatggaatgaggctcgccgcagccaagcctgccgccatcaccgtcgcccagcggcagccgatccccatccccacatgcagctccagccgcaatcaggccaagaagagccgccgtagcgcatggagggtcgcagtggcaagccgcgacgccgccgacggcgacgcagaggcgggcgcgggccagggccagggccaggcaccgacgggacggcgggcccggctgtcggcgaggcggcggcagcgcgtgccgctgccggacggcgtctccggcgccggcgtcggcgagttcctgcgccacccggacgccgtcgagtccatcctcaacaccggcgcgctcgagagcttcgcgcccgcggggcccggcaccttcacctgcgcgctgcgccgcgtcgggctcctcggcttcgaggtcgccccggtgctggacctccgcgtcgccccgaccagcaccgactgcaccatcgagatgctgtcgtgcaggttcgagggatcagaggtgcttgagcagcagaatgaactcttctcagcattcatgagtaaccatataacgtggagcgacgacgccgaggagccctgcctagacatccatgtcaaactggaggtcactctggaggtctacaccaagccattcagcatgcttccgttgtcagcagtggagaagccaggttgatgcaaggcctgctggacaggctcgttcccgtgctgggagagcagttgctgagggactaccattcctgggctcaggctcagcagcagcatgaatcgtcttgatgagattggaggtcaagggaaggaggagagattggtcgctcatgtatctacgccactacaagtatccaaggatttagcgaatccagatatacaaggactcgtaaatcaagacgcttgtttttttttggggtgcaccaactggccatcgtcagtctgtgcttttgtcctgtgtccaatactccatcagtaaacaaaaattctactgtttttacttcgtcaataccgcatcctgtagataaaagctctgttgtttcttcatcagcaagtgaaaaggtacagaggaacaggaataaaaatgattgaagttacagcagc

SEQ ID NO: 33718 - DNA, 923 bp, Zea mays
  Clone ID: UC-ZMFLMO17161F07_FLI
gcgcgccaccagcaatctgacgtgtgtccggacctgacctactttttcttcaatccaacatagccatgcgcgacgtccgtccctcactctcttcgattctggactgctcgcgcctctcgcctccgtgttcacatcgccctacccgccgtaccacatgccagacgctggccaccggctccgccgccgcagcgactacatcgggggtgtgcagcctcccatcagactcccgccagcgccaaacccttcgactcggcgatggccacaccggagaagaagtcatacccacctgccatggtcgcggaggaggtgagggtgtgaggctgactggcgattggacccgtccccccattccacccgccgtcgccgacgtgtctgtccaaggtgagtccgccaacgagtacatataaaattcatcagggaaggttgttcgcccaaagccttaccagactcgtgactatccacaaaagaattatttttatataactgaattttgtgttgtattttgtactttgtagtaatgacagagggaaaacaatactaggattagagatcctaagctactaactgatcttataaaatcagtccgtgtacatttgtctcagtgttgctgaattttgcttagcttggcatctggaaactggttcgtcccttcttatatgaggccagctattttcaactcaactctgaatgaagtttcagaggcaggaacacaagcacaaactactgtccagattgacgaggagccaggttctgatgaagacgacgatcttccaccacttgaagcaaacaccaacatgaatagaccatatgaactaatttctcaacggaacaactaattgaattttttgtccagtgcaaggtattagttgtgtaacaaattgttaaattctcacatgtcagatagtggtgcattccatggcttg

SEQ ID NO: 33719 - DNA, 2181 bp, Zea mays
  Clone ID: UC-ZMFLMO17161F09_FLI
cgcgtcgtccttgtttgtactatacagctgctctcaacctttcgttccgtggcccctctcgtttattcgcccctgccacgaccaggaccgcgtcgcgcgctcgcgcccttcacgccctgcgctgtgcttgcctcgtcgcggccacgtccacctacctatacctctctgtccgacgacctcatcccctttcccaagatccgagccgcggcgtctccaagtacctcgctcgcaggagcaggttgcaaggagccagccactcctgcgagtttctggcgatggtggccgttgcggcgggaaggcgggccggcggcgttggtggccgccggcgctcgggctgcggcgcggggcaggcacagcagaagctactagcgatcgccgtcgccgcgcgcttcgctgaggccgtggcgccgccgtctgcggaggcctcccgtgccggctccggcggctgttgcgtagagctcctcgagtgccttctcggggctctgagcgtcaacgcggccccgccgcccgcgcagcacaggcgggccgtgcactcgatccgccgccgccgcccccgtggcggggggtccgccgacgaccgccacgccgacgctccctcgggccgcatcgcgggcaacggcgcatccgcatccgcagccgcgtcgctctacaccatgcagggcaggaagggtgtcaatcaggacgccatggtggtctgggagaattttggttcaaaggatgataccattttttgtggagtttttgatggccatggaccaaacggccatttggttgccaagagggtcagagatcttctccctgtaaagttgagtgcaaatttagggaagggtgaatgcaaagagatttctactagcgatgtcaagagtgggactactaaaggagttgcaaccgaacacagggttgaagatactgatgcttcccctggaaatgaagagaatggcgagtacccagaatttttcacagcactgagggcttcattcttgcaggcgttttatgtcatggacagggatctgaaggcacatagaaatattgattgtgaattcagtggtacaacagcagtcacagtaatcaagcagggacaaaatcttataattggcaacttgggagattctagagctgtcttgggcacaagaggtgaacataatcagctagttgctcttcagctgacagtggacctcaaacctagtatcccgagtgaagcagaacgaattaggcaacaaagtggcagagtattttctcttccagatgaaccagacgttgttcgtgtgtggcttccaactttcaactcgccagggttggccatggcaagatcatttggagacttctgtctgaagaaatatggaataatttctatgcctgatgttttctaccatcgcatcacggataaggatgaattcgttgtgctggcaactgacggggtgtgggatgtgctttccaatgctgaagctgttagcatcatcagcaatgctccttcacaggcctcagcagctcgatttctggttgaaaaggctcacagggcatggaggacacggtaccccacatcaaaaactgatgattgtgctgttgtctgcctctttctgaaaacagtagcagcaagtacatcctccagtgctgtaacaaaagattcggtgaagaacagagaaatgagcaatggtaagcattcattggctgttaaaacaagcaccaaggttcctgcaaatcttgttactgcaaaagatgagtggtcttttgttgatggttcctctgggtgtgtcgcgctgccaactttaccagagcccacttcagttgtgaaggatagctcaaaagattgagcttgcctgccaattgagatggcataatttttgctggaaatttgttcgccttcgtttgcaagcttgtgtgcatcagatttgttgtgacgtgaagaccagtgccagtttcattggcgagttgaggaagttattgcatagtggaatggataagtgtgcatattttgttctttttgtacagtattcaatcagtttagtgggatcagttggtagtaatgataactataataataccgtgcctattattgatggatgggggtgatcagatccatgcataggatgaagtttctcccttcttttgtaatataaatataaataattgtgtcggtttcagcagctctaataaattttcttttaggtgttgctttgtttt

SEQ ID NO: 33720 - DNA, 1936 bp, Zea mays
  Clone ID: UC-ZMFLMO17161G04_FLI
ccactaccgagacaagagcccccctatcaattatgttgtaaatatttcttctaacatgcagatttttccaccaaaagattggttgattgcgtcatctgtgccatcaaagttttcaccagatgctattcagaatgttttaaatgaactgactcctgagactgtaagaatattctgggaatcgaaaaagtttgaagggaaaacaaaattagcagagccatggtatggtacatcatattctgtcgaagttgtccctccatcaatcatacagaaatgggtagggaaagcccctgaggaagatctacacctgccaaagcgtaacatcttcattccaagtgatctttcactgagaagtgtagaggaaaaggtaagttttcctgccatgctgaggaagacacaattttcgagactctggtacaagcccgatacaatgtttttcacacccaaggcttatatcaagatggattttcactgtccactatctcaaagctcacctgagtcggcagttcttactgatgtattcacaaggttgcttatggattatttgaatgattatgcttatgacgcgcaagttgctggcctctattatgttgttaagccaaatgacactggttttcaggtaactatggttggcttcaatgacaaaatgagaacccttttggagactgttattggaaaaattgcagaatttgaagttaaggctgaccgtttttctgtgataaaggaagctatgacaaaggagtatgagaatttcaagtttcggcagccataccaacaagtcctatattattgttcgctaatactggaggaccaaacatggccatgggatgaggaattttctgcactttctcaccttgaagctagtgatctgggaatttttttgccccatttcctatcaaaaaccttcatcgagtgttattttgcaggtaatattgaacccaatgaagcaaacaatatcgttcaacatgttgaagatgtcttattcaatgcaccaattagtgcttgcaagccactatccccatcgcagcatcttgccaagaggattgtaaagcttgagaagggtttgagatactattatccagcaatgtgctcaaatcaccaagatgaaaattctgctcttctgcactatattcagactcatcaggataatgttaagcaaaatgttctacttcaactacttgctcttgttggcaagcagccagcttttcatcaattgcgatcagttgagcaacttggctacatagcgcttcttaggcaaagaaatgattcaggtgtccgtgggttgcaatttataatccagtcaacggtgaaggatcctgctaatctggatgccagagttgaaaattttctcaacatgtttgaaagcaatgtctacaatatgtctgatgcagagttcaagagtaatgtaagtgctcttattgatatgaaactggagaaatacaaaaacatacgcgaagaatcagctttcttctatggagagatttctgaaggaaccctcaaatttgatagaaaagaagcagaggttgctgcactgagggagctcaagaaggaagagttggtaggcttcttcaatgatcatgtcaaggtcaatgcaccacaaaagaagattcttagtatacaagtgtacggtggtctccattctgccgagtacgaaaccatagtgcaaaatgctccgccaccgccgtcgtgtgagataactgatatttatggcttcaggaggtcgaggcctttatatggatcattcaggggaggcgttggtcagatgaagctatagttcaacattttctcatcattctgtaaaattctgaaaaagagtcatctttctgttcaactgcatctacgttgattgttttttcattgcgaacactctagtaggccatttatctacggttttttcactatatttattaagatattatgagatttcacattgcctggt

SEQ ID NO: 33721 - DNA, 1608 bp, Zea mays
  Clone ID: UC-ZMFLMO17161G09_FLI
tgccacgaggtacggcccagctcttcctcaaagcgggcgaaatccacgccgcgcggcggcggcggcagaggaggaggggggatgatggggtgcctcttcgcctgcttccgcgcgtccggcggcgatggcgaggtgaagggcaccggcggccagctcgcgcatccgtcccagccccccgcgacgacgacgacgaccagccgccaggtccaggatggcgcgggcaggagggccaggccgccgtcgaggaacgcgctctccgccgtgttccagcgagaagatgagggatcaaggacggcgcaagtggcgagctcgtgggcggacgagagtggcgagaggaaggagatggatcaggagcttgtgcatcaggccattatccaaagaagctgtggtgcgttgctgcaaactacaaataacattcaaggagcgctcatcaaatatgctgattcagttcatcagaaggaaacacattcaggatgtcttcctgttgtgtctgatgatctacatttcatggaagcgccgaaggttgagaaatgtgaaactccttcaaggtctcatcagagtttcactgttccagatgcaacgagttcttcaaaaacaaacgatgagttgcagacttccgctacttcccttgcaaataatgtgaaagattcgatgaatgagaacaacatggaggcacttgtgcaggatgaagagcaacaccaagctctggatcttgaagaatgtggggtctcaaaagaagaatcctttcaccctgaaaaaacagaggaaccaaagtgcgcaaagaatcaccatgtggtctccatggaaatttcaatatctgatgaatgctcccttttccagagctctgagggttctgtaccatcttcttacaagataagagagagcatgaacacaacatctgtggagaagtccccgaaaactgaggcaactatccatgccaccagaaagaagttaccgaagagcgataattcagaactggagctcccaagcttagcccaatggttgaagcccccaaatcctaagaagacattcagagatgaggccatggcaggagacaggtctcattcgggtaagagttcagatgaggataggcctattattggaatggttgcagcacattggaaagataaggtgccactgccagcaaattttacctctaaattgcgggatggaaatggcattcccaattcaacaaataagtacaaagaagaccaaaaggtgagttggcatgcaacgccatttgaggagaggctcgagaaggctttatccgaagagaagttgctctctgaaaggagctgttcgagtggaaagacgtctcagtttttaggagtggaaggcgaggagagtgacatggccgaatctaaccgtctgtacgccactgcttatgcatgacagattcagttctgctagccatgagccacagaagctttcagtataatggttctctggccatcaccttcctgattgatggcatttgcacagccctgtttcccctctgtccttttagtaggtagtatccggatgtgatgttttagcttgcgtttaactcaatcagttaagatataatattactgctgccactagtccacagatattgttgttagcttc

SEQ ID NO: 33722 - DNA, 1387 bp, Zea mays
  Clone ID: UC-ZMFLMO17161H03_FLI
ggtacctcaccatggacggaacgtggtggacaagcggtcttcctgccggccgacgcatcgaggtcgggttacaagttccaaccagcccaaaccactcccgtcgtcggccgtttccccgtgctccaccacctgacctgtgccggcccatcctccccgcctggcccaagccaacgctgcccttgccgtgccgagtaccagccggatgcccggatccccctcaaagcacgaccgacaaccccacgccgccggcaccgccgcaccaccgaaactaaccctacccaaaccagatcggatccgatccccttctccttcaccaacgctcccctcgcccaattcgcttcgatccgccgggaccgagatggacgacgacgacatgccgcactcctcctccccgtcgccgccctcctcctcggcgctccctgtggacggccccgtcaccatcgccgctgcaccgccgggcgctgccatggtggtcgcgctcccgatccataggaccgcggcgtccttgtacgccagcgccgccgccgccggcggcgggggcggcgggagggaggacgcctggagcgacggcgccacctccgcgctcatcgacgcctggggtgagcggttcgtcgcgctgggccgcggcagcctccggcacccgcagtggcaggaggtcgccgacgccgtctcctcccgtgacggctactccaaggggcccaggtccgatgtccagtgcaagaaccgcatcgacacgctcaagaagaagtacaaggtcgagagggccaagccggtctccgcctggcagttcttcgaccgtctcgattttctcctcgcgcccacatacggcaacgaccgcgcgcgcgggctccgggagctggcgcatgcgatacggcgcctcggcgaggcgtatgagcgcgtggaggccgcgaagctggagcaggccgccgagatggagcgccagcgcatggacttcgcgcaggagctggagtcgcagcgcgtgcagttcttcctcaaccacgcgtctcctgccacggtcgcgcgccccgccgctggtggctcgtccaggaggacgtctgtggttaccgacgccggcggcagcagcaatcaccatagctgttaccggatcagccatggcgacaggcaccgtcacgctccacgctcccattaccagccagccgcagtaccatgacaacaatcacgcgggggcgggggctgcaagtgagggtgagcagtctagtgaggaggaggatgattacgtagaagagagccattaattgtagccgagattcgccataatttaggccatgtttggtttcaattagtcctagactaaactttagtcttaaggctaaactttagtctctacatgtttgattatatggactaaacagattataaagtcatt

SEQ ID NO: 33723 - DNA, 1368 bp, Zea mays
  Clone ID: UC-ZMFLMO17161H12_FLI
cgtttactcaacaatgacaccacctagacagcaacatatgcagtgtcatgtttcagtcccacaatcgccttcggtgtcacatgggagtcacccttctcttaccatccaaagtcctcttcttaatgaagggagccaaaaccaacaaagacatccctcagtgagagtctcactgagtgtaggggcaacagtcagttctccaagagctggaagaggtactggcaatgctcacattgctcaaagtactcattcacatgcaatattcaagagagcaggggctgttgctccagtctttgcaacaagaaatgctagccaattctgtccttctgctccagatgatctccttttgcagcaggcattgtctcacgcttctcagcctgttcaagttgcgcctacaaccaatgctttcactggcgcttctcaaaataaccattttcagagatctttcagtgcgccgatagcacctcaggtgcaacaaggtcaacctgcggcacgttaccaggtcgccataaatggaatgcacgccgtagggccgcaacttgcacggtccacctcacttacaactcagagaacacaatgcctcccagaaccagcaataatagatgtcagcacaacaagctggcaagacatacttgctactgtggcatctaatctgggggtagcagattacaacacgagcacccctgagtctcagcatgtaacggttgactctctagccatgcatcccactgcaaaccatgggttggatcttcagcatgagcccattgcagaatcagagaacctgacatattcgcttctgcatgattcatccaatggcgcagcaggtggcagtgttcaggcagatggtcctatgcaaacaccagagaatttggaccatctgattggccagagcaatcctgttccaaatgaagctcacctggatgactttgcgggtgcccccgctaatcaattaccaatagaagaagaagaagctcatcagcctgagatgtcaaggctggagcctacaaacattctgttcgagttcgattgggtttaagcggtgacctgcctggctgcctcatcagcatatccctaacccatgaataataaatcagtgccattgacgtgcccctttctaggtctcctgcataggagacatgtctggtgtccccttgtacagtaattaggctatgtactagaagagtttcgccgtcatgttgtttgttatcatagtggtcagatgttgtggctcttcgggctttagatgttaacaggtctgaagtagaagggtgttgggtgggtgccaagatgcttgtctaaccactggtctacaatttgacaatgtaaggtattgagatacagatgcttgggttggataccaaatttcttttt

SEQ ID NO: 33724 - DNA, 1333 bp, Zea mays
  Clone ID: UC-ZMFLMO17163A08_FLI
tggttgcgttgcgttgcgttgcttcgagttggaggttggagttggagtgggccgcgtgcgagaggatctgagcggagaggccatggagtggagtgattagcggttgctgggtcaggagaaggcggcgtgtgttttgatcctactcgcgtttgaggggccccgatttcgagcgggtgttcaattttggtgccggatttttaaggaggatccaatttaggaagaattttggttttggggacaatggttttggactgcctgatattcgattcataggttggtcaaacgctttggagtagagaattttttttcccggaaaacaagaaccatttttctagttgtgctactcgtcaatcaatccatggaagctgaactctggaagaagaaactttcctaattagacccggtatttcgtggttggccgttggcgtctaaagcgcgttttagtttaaatatatgaacactatttcctgtttactccgcccaaaatctttccgctggatctacttgtgaatcgggtttgtttgttttttacctgagctattcttgttgatttaggacttcgagtcggcagatccaagggaacgccgaattttgcctgatttcttcgcgatttttggtccgatcaaagaggttcctagccttttttttcctcgcgagaagcaaggggtctcccttttcttctttcgctatgtccatggcgttgagccgcttcacgcaatggctgtggccggggggcgccgcggcgcgggtggacacccacgagcaccccagcggggggctaacgagctcctccttccctgacttcccctccgggttccgggagcccgacaccgtcacgttctacaccggccgccagcgcgcgcgcccgaggagggtcaggaatcgccgccgcagccgcggggaggcccgtgtcgaccgggagtacgacatggtcatcgtcccgtccgacggcggtggctgcctgtctggctccgactccgacgactccgactggtccatcggctggctcgagccacaggcgccggagcttcagacggacggcgaccccgagaactgcttcgccgtcctcgtgccgtgttaccgccacggccgccaagagcagcagccccggaggcaggagggcaggtttcttggcgccggcgccctcaccgatggtggtccctctgatggaaagaattttgtagagctgtggctttcttctttccagaactaatatcgtcagacctcgcctaagctaccctgtaaatagtatcactctgttttagttctactacgtttgtcctagtcgcacaacgtatcgatgaaggaagacatgaaaaagaaatctaaaaag

SEQ ID NO: 33725 - DNA, 2007 bp, Zea mays
  Clone ID: UC-ZMFLMO17163A09_FLI
aaacccttcatcatttacatacgagaggcgcttctttaggccttttgagtatgctctgcagcctccaccttggtacagagatgaacatatagctttggataagcctgagcttcctcctggtgtatcaaagatgactgaatatgatggaccacagtgtttcataattcctggaaatcatgactggtttgatgggcttcatacttttatgagatatatatgtcataaaagctggttaggtggatggtttctgcctcagaagaagagttattttgcattgcatcttcccaagggttggtggatatttggtcttgatttatctctccatggcgatgttgatgtgtaccaattcaagttctttgctgatgtttgtcagaataaggttggagagaatgattctgtgattgtagtaacacatgagccaaactggcttcttgattggtactggaatgagactacaggcaagaatgtatcacatttaattcaggaatacctgaaaggaagatgtaaacttcgcatggcaggggatttacaccattttatgaggcactctgccactcgatcagaaaaaaataattttgtgcaacacttgcttgttaatggatgtggtggtgcctttttgcacccaacacatgttttcagaaactttgagaggttctctggaaccacctatgaatgcaaggcagcttatccatcctatgatgagtctactgggattgcattgggtaacatattgaagttccgcaaaaagaattggcagtttgacatcattggcggttttatatacttcattttggtgttttcaatgttcccacagtgtaatcttgttcgtatcttaaatgaagaaacttggtctgggcgtctgaaaagcttctcaggcacaatatggagtgctttgctttatatttttgagcactcttatgtctcttcagtaggaagtcttactttattgacggcgtcatattcattcgtaccatccaaactatcaaggaggagaagagctattataggcggcctccatgttttggcccatttaactgcagcactacttttaatgttgctgctggagttgggcattgaaatttgtattcgtaaccatttattggcaacttcaggttatcacactctgtatgaatggtatcgatccatggaaagtgagcattttccagatcctactggtcttcgtgctcgtttggagcaatggactctgggactgtatccagcatgtataaaatatcttatggcagcctttgacgtccctgaggtcatggctgtgacaagaataaatatatgcaagaacggaatgatgtctctttcgcggagtgttctgatcatgtactacacttctgtgtttatctatttctggattttctcgactccagttgtttctctcatatttggtagttacctatacatctgcgtcaattggttccacatacactttgatgaagccttctcgtcgctgcgcatcgcaaactacaaatccttcacaaggttccatgttaagaaggatggtgatctagaaatatttactcttgcagttgacaaggtcccaaaggactggaagttggatccgaggtgggaatcagagggacgagggcctcatcagctcagccatgaccggaagcatccaagcaagtggaggtcagcctcatcaactgaccctgtgagatctgtacgggttgttgatcatttcaccatcgaaagaacaagaaccccagatatggagccctcttcttgattgtgcagcccttactattacaaggagttgctactgctgctagaaaaattaacaataactagcttcaacacacagtattgtttttgtttccacatccagccaacttaggtggaccgaggtgatctgcccttgtcggcgtccccgctttactgacctcacctgcagcattgtaatctgtatagaaagaaaattcacctgctgcctattgcttgtattcaatcaaaggaactctaaaaaaagagtgttacagaagaatgttttgagaaagc

SEQ ID NO: 33726 - DNA, 2196 bp, Zea mays
  Clone ID: UC-ZMFLMO17163B01_FLI
tttatcagctgcggcagcgagattcaccgggggaagtatttgcagcgaccgcgccggtccccgccacaaaatcagctacccaccaccgtccgtcagcggcggcggggagagcatggcggccatcgtggcggcgcgggcgtcggccccaggcagggcggccgtcagcaccatcgccgcgttccacagccacgcgtccccttcccgcgcgctcccgctcgcctcctcctccatcggcggcgccaggcggtaccaccacgcccccgcgtgctgcttcgccaccaagcccaccgcgccggccgctgccgagctcgtcgaccaggacttcgccacggccacgcaggaggccgccaagccacgccggaaacgccggtctcggaaggcgaagaagtccgccaccgccgccaaggaggaggatgggacggacgacaagccggtggcggcggcagaggacgaggcgaaaaggaagaaggaggcggccggcgccgaggacagcgcccgggcattggtggccggcctcgacgacgtgatcgtcaaccccgtgggtctgggtcggcggtcgcggcaggtgttcgacgaggtgtggcgcaagttctcgcggctgggccagatttcgagcgcctcgtccaccgcgctggcggaggaggagcaggccgtgcttatccgtggaggacctatgtgcgagttcactgtgccaggggcgcaggacaccaccgtcctcgtcgtcggtgccaccagccgcatcggccgcatcgtcgtgcgcaagctcatgctccgcggatacaatgtcaaggctttagtaagaagaaacgaccctgaagtgatagatatgctcccaaggtcggtggatattgttgttggtgatgttgtgatcctgcaactgtcaaagcagctgtatcaggctgcagcaagataatctattgtgcaactgcacgctcaactattacaggagacctaaatagggttgataaccaaggagtaaggaatgctagcaaggctttccaggattactacaacgaattggcccagctcagggctggtaaaagcagcaagagcaaactcctgatagcaaaattcaagtctgcaaagtccttgaagggttgggaggtgcggcagggttcttacttcccaaatacttttgtttctagatttgatgaaggtatcgatgcatcactggatttttcagaagatcagcaggctgttttctcaggatttgtattcacaagaggtggatatgttgagatatcaaaaaggctttctcttcctctaggttctaccctagacaggtacgatggtttactcttttcagtgggaggaaatggaagatcatacgttgttattcttgaaactggtccattggcggacacgacccagagcaagaagtattttgctcggatgactacaaaagtaggtttttgtagggtaagagtgccgttttcatcttttcggccagtaaacccacaagaccctcccctagacccttttcttgtgcatacactaaccattaggtttgaaccaaaaaggcagagacctggtgaggcatctcaaaattctagtgatcctcgaaactttgagctaaaactggaatacatcaaggctttacctactggtcaagaaacagacttcatattggtgtcatgttcaggttctggaattgaatctaacagaagagaacaagttctcaaagccaagaaggctggagaagatgcactgcggaggtcaggccttggatatacaatcgtgcgcccgggtcctctgcaggaagaacctggtggccagcgcgcgctgatcttcgatcaagggaacagaatctcccagggtatcagctgtgctgatgtggctgatatctgtgtcaaggcactgcatgattccactgcgagaaacaaaagtttcgatgtatgctacgagtacgtcagtgaccaagggaacgagctttacgaacttgtggctcatctgccagacaaggctaacaactatctcgcaccagcactgtccgttctagagaagaacacctgattgatgcgcaccatcagactcggacatgtaatatacgagtcatacgacgtgtatattttctcctcctgtaaagccatacgtttttcctatacaagccttgtgtctttcacatggtatgccgtttggcccttctgtaaagatcattgcacagaccgactccaggaaacaaaattttatttttgc

SEQ ID NO: 33727 - DNA, 625 bp, Zea mays
  Clone ID: UC-ZMFLMO17163D07_FLI
gagaggattcacgaacccgccgtcggactggagaggtgatccatgcttgccccaggggaactcgtggactggtgtcacctgcaaccaagatccactggcaagagtaactgggctcaacctcacaaatttcagagttggaggatcgatatctaacaacattgccaatctgactgcaatttccagcatttggcttgtcgggaacaatttgaccggcccgattccagatctgaaccacctcctgcatgtagtctctttgcacctggaggacaacggactgacaggcccgctccctgaatcgctcggaaaccttacaagacttgaggaactgtccgtgcagaacaacagcctacaaggaacaattccaagcagcatcaggaacagagcggcggtggacccaaggtttaggttccagtacacacctgggaacaaccttagctaacaagtgcattacaggaaggcaaaaatatctgactgctgttccttacccaatttcgggtgcttcggaccattttccttcccttttttgaatcacgattttttgttgtacttcggaatgtatacttatctcttcccctgtaaagatgcatttttgtcatagaaaaaaaacgaggactatattttattg

SEQ ID NO: 33728 - DNA, 1324 bp, Zea mays
  Clone ID: UC-ZMFLMO17163E07_FLI
gccgctgcttcaagaaaccaccgagagcccaaccgcacaggcaggagagagagcagggagccagggacagtagcgtggggccggggagcaaagatggaggggaaggaggaggacgtgcgcctgggcgccaacaagttctcggagcggcagcccatcggcacggcggcgcagggcgccggggccggggacgacgacaaggactacaaggagcccccgccggcgccgctgttcgagcccggggagctcaagtcctggtccttctaccgcgcgggcatcgccgagttcgtcgccaccttcctcttcctctacatcaccgtcctcaccgtcatgggcgtctccaagtccacctccaagtgcgccaccgtcggcatccagggcatcgcctggtccttcggagggatgatcttcgcgctcgtctactgcaccgccggcatctccggaggacacatcaacccagctgtgaccttcgggctgttcttggccaggaagctgtccctgactagggccatcttctacattatcatgcaatgcctgggtgccatctgtggagctggagtggtgaagggcttccagcaggggctttacatgggcaacggcggtggcgccaatgttgtcgcccccgggtacaccaagggggatggccttggcgctgagattgttggcaccttcatcctggtgtacaccgtcttctcggccaccgatgccaagaggaacgccagggactcccatgtccccatccttgccccactgccaattgggttcgcggtgttcctggtccaccttgccaccatccccatcaccggcaccggcatcaacccggctaggagccttggcgccgccatcatctacaaccgggatcatgcctggagcgaccattggatcttctgggtcggccccttcatcggcgccgccctggctgccatctaccaccaggtgatcatcagggccatcccgttcaagagcaggtcttaagctgccgcggcagtgccgagacatgcctgccagtccggaaggacgagcgtcttcctgtgggggggaatgccttgtctgcccacgcctagtttctctgctgaatcttccatctctcttcccttcaagactgctcactgctgcactgctctgttatctgaacccagaactttgtgtactcctgtaccgagctgtgtgtatgttttttttttcttccatcgtgtttgttgcaagggttcccgtctccttttatgcgttgggatcgtggcaagaaagggcagatatcatgtgaaaacgtgggtttataactatcagctggatttcatccaagtggaatcgattcagaattttcttt

SEQ ID NO: 33729 - DNA, 919 bp, Zea mays
  Clone ID: UC-ZMFLMO17163F09_FLI
gcgaaaccgcgcgtgtcgccagcccatagatcagagcctagccagagccagagccagagctgagagccgaggagggaaacgaagaagcggccatggcgatgaagcggccggcgcgcagcgacccacacctgccacccgaggaggcggcacgggtggaggccgaggttcggagctacttcgacagcgtcgcgccgaggcgcccggccaagccgccgcgcagcgacccgtcggtggacaccttcgcggaacccgccgccgtcgacgccggggaccacgacttgccggagctccgcaagctgcgcgacctcgaggcgaagccccagaagctggtgttggacggagggggaggggacgtggatggcggggaggattacgtggagacgcgatactacgatggcctcataggcatcgacaagcagcatcacacgactgggacaggctttatcaaagtggagagatccaatggcagcagcttcagtgtgatgactaacggctacccacctgccagctctgtccgctgcacgagcaatcctgcgacaaatgattggataccatcttctgaatcgatcatccctgcatcgaacaagcccagcaggagcgactcctgaccagccttgccttgccttgaagtgccgtgaattgcttacctgcaaagataataaaatgcattgcttctgtgtggtagtaccgtacgcgccagagatcgtgcctcgacactcgagagagagagaagggaagcatactgccggagtgccgggcgcgtgggtgggggacacgagatgtgactacttcaacgaagaatgtgtacgggtacgggtgcgtcagcacatgttacttgttgctgcacctgcatactactgttcgagtgttgataatgaactacagaccctgaatgaatgtgcctatgtgatggtttggt

SEQ ID NO: 33730 - DNA, 1263 bp, Zea mays
  Clone ID: UC-ZMFLMO17163G08_FLI
agaagccgcagcctccgcgagggcgagacagctcggcggcgtggttcggggatgggcaagggcgccgaactgtgggacgactccgcgctggtggacgccttcgaccgcgccatgttcagcatgaaagaaatgcattgcaagagcaagcgagcaacgccaagcgaggatgggaagaccgaacttgctgctgctactgcagaagaggagccaattactgctggagcagcggatgtgtgcggagaggaagatgccaactgtgacagcacacactgtgatctgtcagagttacaacaacagccctatgaagacagacagacaattgagcatgctcctcttcaagaaactgatccaggcaaagagacacatgtttcagaggctaagacgctctccaccgatgcttctactaatgctggtggaaattggagctcaagccagcaaactgggcagtacaatgaattgctgagacaatactatgaacttgaggagaagagtcggaacattcttgagcaactccaacaaacaaactattcaaattatcaagcatcaggatatgcttctacggcccaacagcagcaagttcctgtctatagtgccacagtaccagatccttactcttccaccactcaatcctcatgctgcaattggaacgttcccctggtatctgtctcctgctgttcagcaggccaaccaagtggaggctctgcttgtacgccacctactgctggctgcagcgtatcattgacttgtgatcaatgcccaggtgcaactactgcataccctagtgtttcaaacttcatgcaggtcccaacgatggtatctaccaatgatgatcaagttgataaggctgcaatgatgactgctgaagctgcctttaattttatgagaagtacgatatctggacagcctagcacacaaggaagcaaatctgatactggaaaggaggaaagcacaaatatgggcatgaacccaaatcttgacagtgatcttgctgctctcttaaattcatggtatgctgctgggttctacacttgcaggtacctcatgctgcaatctacaaagaattccagaccgtagtgtagtaggccatggccgtcttgagatagatgtccgagaagaagcaggttgaagcatcgctgggtgccttcatgtatgtgaatctgctggagttgtgtctgtgctgtgccttgcttgtcactgctatttctagctagactttcggtacgctcgtatgtgaatctgttgatgtcaggcagaaaattgggt

SEQ ID NO: 33731 - DNA, 2982 bp, Zea mays
  Clone ID: UC-ZMFLMO17163G09_FLI
agaagctcgctgtctgtagcagatgcaatgacggcgcagagcacacgtattgcatgcgggtaatgatggaagaggttccagatagtgagtggttgtgtgaagactgccaaactgctgtagaatctgaaaaggagaatagactagaaaagtctcaggtgaaggttggcacttcaaaagagctttccttagaaggggagattaacaaacctgccattgctgcaaagggaagaagttcatctgactgtgaattgaaggctgggaatatagaaaacaaagagtcaaataccacaaatgagaggaatggcacagtcaaaaccaggacggaagaagatgctgtgacgacatcctcaactagagatattttttctgaaactggtggcttgtacatgggggctgactctagaaagagaatggaaccatcacacgagacattcgtgtctgatgctgacaaaggaaagcaacctagccatcaagtatcaacttcattggtggttaatgctctgaagaatcaggcaccacagtctcgtggtaaattgtcaactttccaaatccacttctttcaataactcaaaggtccccaaagtgaaacagctattgaatgaagttcctcagaagccaaaatttttgaaggaatcttggtcctctattatcaataaaaaggaaggaccaatcagcatgactactaagtcagcgaccttcaaaaagcctaagccttgtgagccaacaaacaaggcaaagtcttccgtcttgtcacctgccgaggagccaagggtgccgaatcagttggcgagccacaatgtaacaaatggtcagtgttctatattggggcctccctctgccacatcatcaatggttgctcctgttctaagaactgatagcacaactcagctgctctctacaagaaataacacagttgactcaaataatttaggttctgttcatctacaaggaaacagtgagctaaagaagcctcgtttagcaaaagtgccgggaagtatgatgctatctaatgctgaaagatccgcaggtgggattcttggttccggtgctcatcgagaagtgattcaaaattcagacccttcacatagggatgctaaaataaaggaccaaactggcttcagacagggtgcttctagcagtaatcggacaatccgttgccaaagatgtaatgaatatggccattctacacatttttgcgaagttgaaaaacttcgtttgtcttcaggaaaacctttgagtgagcgaaacttgaaggatgcatctgccaaaagaaataagacatccgaagttagtacattggcttctagtgaaaaaactccttccagagaaccagagcatgtcgtaaagtgtgctattaatcagaatctgataaatgggcctaatgatggtatacctgccccatccagccatgtaaagaagcactcattatcacctcgagctaatgtgtccatccctgggagcggagtagattgtagcaagcctaagttcaaaaataatgatccatctctatctggcacagcaggaatctttgttcataatggtcgcattatgccaaatgatcatagggatgaacctgctcaagggttttcagctggtgatgaaccaacgtcttcaactgtccctgagctgggctggatatggcaaggtggttttgagctgcagaggactggaagttcaccggagctgtgtgatggtttccaagcccatttatcatgttctgcttcacagttagtgctggacgcagttaagaaattcccttctaaagtccagcttgaggaagttcctcggaagaattcatggccaacacagtttcagaaaaacggtccaacttatgacaacataggtctttttttctttgctagagatgttcaaagctatgaaaatcactacagtaaattagttgagaatatgctgaagaatgatttagttctcagaggaagtgttggtactgttgagttgcttatattcccttccaatatcctatcaaagaacttccaaaggtggaatatgttgtactttctatggggtctattcagagttagcaaaaaagattcctctaacctcccatcttatctatccacaagtagagtagaacaaaattttaatgatgatctccaggccatggattggatgccatctacccattcattctcacagaacaggagtgatttagccgaactggaccctggtttgttaaagtcaactaattttgaaccgagtttggaagccagtcgtgaggtgtgtttggatggagagaactctttgaatcaacttgtacgcagaagagctctagataatcacctagattcagatgcaaaagcatgttcaacgattagcaatggtgccatgggttcctctgccatgtctatgcaaagaaaacatcagaaacctgattatccagaacatcaagataaaacgagggacacttttggtggtaatgttagtgaaagagatttcgatgtgaacacggtgccagttacttgttctgtctccttaactcaccttcaggaagaacctggtaagctgagcacagccatcgacctcatggatatagaccatggggttagcgcaggtgcactggatcgttcacatgcatcaggtggtgcaggtaaaagaagttttgagacggccgaagtagctgatgaagtacccgagcataagaaaactaagctggataataatgcctgtacgaatgatggcaatagcgataaactaatgcctggaagctcaagcagtgatggcaagcgcgtgtttccacttgatctaaatgcagtgggggatgaggacatcgtaaatattccagccttcaggtgatgaagagttcgctgttccattacaaaccaaccgtggtggtttggttcagaatgagagatctgcattgtaaatcgcatgtgcagtttttggcctaatgttttcagacaacacttacagatgtgatgttcccctctttggcagtgaataattctgctccagaatatgctt

SEQ ID NO: 33732 - DNA, 1537 bp, Zea mays
  Clone ID: UC-ZMFLMO17163G11_FLI
aagaagtcaggcgcacgaagcaaaaagcgacaagagctgggaggcgatgaccatctccacttcctcgacctcgagtccttgacccgtgtataaaagccggagccggccggcgtcccccctacccacccggagccccgcctccgcctcccgctcctccactccacccccacccatggccaacctcccagacgccgacgccgcggggttcaagctcttcggcaaggtcatccagccccccgacgcgcagcgcgccgcgggcgatggcgatggcgctggcgcccctccgccgtcgccgccggtccttcctcctcctcctcctcctcccccgcccccgccgcagcctctgcccctgcagcaggcggccggggccgggggcaccggcggcgagccgctgccgtgcccgcggtgcggcagccgggagactagggatgaaaacggtcggaaacggtatttattcggtaatcagttttttagtcgtttgcgaataaatagaatatataatatacaatacaaatttgtattcttgtttttaacatccagcttgttaagattcataaaaggtaaacctcaaattcattctatattttctcaaataatagatataaacttcggtatggattcggaaacaaattcggtaaatttttcaactttttgtgttgtagggagcaaataatacataaaacaatttatgtaatattttattcatatttttactaatgtgcttgataacataagaaaagatcaacatcaaattttatacatatctattttaaaatattaaatttgttctaacagtttggattaccactttcatccctacgggagaccaagttctgctacttcaacaactacaacgtgcggcagccgcgccacctctgccgcgcctgccgccgctactggacggccggcggcgcgctccgccgcgtggcctccgcgtccccgggccgccgcaggccgcgcccgaacgcccgatcggccgccgccgccgcggcgccgtccgcctccgcagccgccagggaggtgggcggggagcgttgactcgtcggcggtcgtaggggcggcgggtggccaggtgtgctccgcacgcttcgcttcgcttcgcacggggccgggggcttccttcccgcgtgacgccgtgacgtgatgccgcgcgcccgggccccaagcctcagtgacgggccggccggttcgcggtggggaccccgcgcctcgtcgcccttttcacacctactggtcctctccttttggtttgttagattctgttttctatataccattttaggattcttttggtggccaaaaaagatgctgccggcctgctgcgcttgcgagcgagagttcagttcggtaggccagtcaaaaagtggtagtcgtactagagcagtagtagtagactggtagtgctgctgctgaatgctgatgcaaaattcggcagcggtgaattggtgcctggggtcggtcaggtcaggtggcagatttcagccatggtttgttggaaaggaaggaaatcaatcatcctcttggttcacgtgatctc

SEQ ID NO: 33733 - DNA, 1143 bp, Zea mays
  Clone ID: UC-ZMFLMO17163H05_FLI
gcaaatagatgtcctgatcaaacgcaatgaggtggagaatgtttaccattgggcatgtggccgcccaacatctctacatgatcgtgggagggatagcgatgacgacgacttccgagatagagattacgatgtggcagcactcactaataatatgagccaggcatttcgatttgggatatacaggaatgatgacattgaagaggcacaaggatcccacgaacgagatgatgaggatgtctactttgatgaggagtcagctgaagtagtaatatcttcattgtgtttgggggatgatcaggacagcagttcactcttcacgaattcaaactggtttacgtttgatggtgatagaggaatcaatgaccgcctagctgcctctgttcctccatcatccccggattctgaagcgatttccttaaacactgagaatactgatgaagcgctaactggtgaaaccactggcggcactgagtcactgcgggaaagtgcatcccttgaaaatggtcctgttgaggatgccaatgaactagcagaagtcgctgacgacaatgatgctgatgccacggacggtgagaaaattttgtgtacagaagaggacagtcaagcctccgaggggcctgtggatgctgaagaggacaagactggaggagcgtctaaagcagcgaatgaatctgtgcctgacaatgccttgcctgaatcccaccacactgattgtcggtgcgctgactcatctgaatcaggaacggaagaagatgtggagattgatgatgagaagaagtctgagactgctatgacaaatgaatgagcgttatgggctggaatgattggatggcggatcagattcttttgctggtgagcaatgccactcaagcaggggcgccgtacaattttaacagcgctgctttgctattgaggagtctggttgttactgcacgcacgctcttttatcatctcacctcatcaccatcccacatgtcagtctggcggctcctgattttggtctcttcgaactgtaatatctgcagtgagttttttccatcagtttttattttttttttccgggtttctgcatctgtaatagctatttcttcaagcgcaaaacctgtcttctctttgttgctataaaaagcatatagtttcacc

SEQ ID NO: 33734 - DNA, 3038 bp, Zea mays
  Clone ID: UC-ZMFLMO17164B02_FLI
attcaaatttaaaattccttgcagtttcgaaacttcttatgtcactacaacaaaggtttattcatccaagctgtataatttcatcattagcttcaagcacctgttaacttagagtgctccaatacgcttaggcccaattacaaagttacatataccaaaataaaactcgacaaggaaaattatctagtaccctagagtaaattttgaatagttggcgccaagcaggtaacatagagtgctccaatactcttaggccctttcacttgaaacatcgagggggaaatagctatgaagtatggccctttgacctatgtctcttccatggaggacaccactggagcctccaacgccgtgcagatttggcgacacagggtgtggaggcacactgtgactcaccatgccatgccgaggacgaagacgccgatggagacggcgatgcccaaggcagagaagatgaagggcgatatctgcaccacgggtgagcggcctctgtcggggtggggcgagaaacacgtatggggacgctggggacgcctgctccggcctcggctatatactgctccatcacaggtgtctgcctgctgtgcaacgacatccgctgagttgttgccttgccttcgtaagcttctccatgcggcaaaggggttgtctccctccgtgaaacttagtccttgattcctctcacctcaatcccaaagtgcaaggcgacgggctcgtcccacgacgcctccatgaagtccaagctgcctatctcggatcctacagttatctaagaaccttgttacatgcagctaattgtaaagctccctataggcatcagcctaatgaattaaaataccaccatcaaattttggaactaatgaaaatgtgtagcagactggttaattgtacgatcccatatgaaatgagttagaaaactgtgtaagaaatatatagggaacaccagagcatgctagcacaacactacatcaagcagatgtggtgttatagtatcgtaatcttgcaattcttgttcatgggccttgtacaagtcttcaactctttttcttactccagcaaaaccagtggggttaacgtacatgaaggatagatattccagctcagactacaaagacaagagctgctggtcaaaaggaagaaagaactaagagtaaatgaaacatagattgatatactgatatatgcctacatgaaaagagaagtatccaaaacaaaagttcttttacacggaaaaagtagcagtacaataaaacctattataacaaaaaaaataaaataaagggcacaagtatttctttactctttacttctttagtccctcaattttgagagataggccattccctacctcagttttgagagatagtccattccctacctcaattttgtcatcttgcttctctttatatgttctttgtcatctgaattttatgcaaaagatcaatggtacctggtctttaggccactgaattaaccaaaattctgtcgagtctgttggtgatatatcaagcatggcttattctttgacctcctcaaaagccggtccaggctcatagctacaacagttcacacaaagttcagatgacaaagaacacagcatacaagtattcaaggtgcgctgtcgaaagtatactgtaactcaattttaggcaagaaggcaagccgaacttgttaagctttatggtaggaagaagatatgcaaatgtgatactcctactcacattgaattaaatgggcagcaaaatgtaggaaaatgcaatgaaaacaatgaattccaattcagagtactgagcagtttatcaaactgttgcaaattattcagaatactgagcactcgaagcgtccccattcacaccatcgcagtaacgcaaaggaactaagggaatgtcaatatcataccagacccttgcttttgccttgaccatctctagcgcgagtccagcctctagtgatccctcacccgcacgggcgcagttgacgcagtttttgctgaacacccccaaatatagtttgggaaattaactgcacccagcaccttagtggattgatatcgtgcactgaagaacgagaaccaattggggaggtggatgggggcgaggcgaaggggccagctccgcctgatgtgcagcttcgggggccggatcgtcccgcgcccgaccgataagtcgctctgctacttgggcggggagacccggatcgtggccgtggacaggcacgcgtcgctcaccgaaagcaaatatggcgggtcggtcttaatgttcaatgatttaacatgtccctagcatcagaacatcaagataacacatgcttaaaccagtatccagcagttttggacaatgaacaagaagaaattggagaaaatggagcagaaatcacaacagtattgcatacctcatcacattacagcagttttggacaatgcacgtaaaacatcacattagtacaaccgtcgcatattcaaaatttgtataggtgtataacagatatgatttgagccaaaatatttctcatagaccatttatcacatttgagttcccctagtggtacattgaaccgaattttctccattattttgatgcagtaaatggataaataatggttgcagagcttaacttcaatctttctcagtcatgtggtcttattatgttgtcaatactaaaagattatggatgtgtttggtatgaagtcaaagtatggcatgcctgaggtgttaatcttaatacaaaaaacattcggtggtgttacactgcccaaattatctctcatatatgctggtataaaggtaatactatcaatgcacaaaaaatacttaaatggttagcagtgctttcattgtgtatccaaaatgtaatccatttatggacagtaatgctcaagcagtcctgcttcttgtttttacttataatttgaatagcttccctgttattagcatacttctgaaatctatcaacctggttataattttggtattctacatgtcatgcagttggtctaggtggaagtccagatgagaactgccaaaatacaacctattatta

SEQ ID NO: 33735 - DNA, 1875 bp, Zea mays
  Clone ID: UC-ZMFLMO17164B04_FLI
tgaatctggggaggaactgctaatggactctgaattgaagaacttgaagttgcatgataacttggggaatgaaattccccataacattattgctatttcagatatgaatggtgaagctcccaagagaatggagtttgattgttctaccggagggccatcaggagaaagcacttcatatcaatttaatgaaaataactggatttctagtgagcaaactgcaaataattatttctcaagaacttccagtagtgttgttgttcctactgagtggggaaggcccaatgcaccactttggggtggcagggtcgttggacggcggcaaattagatacattagaggaagctcttgtctatctactgatgaatataatgcttttatgaatatatttgagagaggttctcttctctactgcaatatgtcctttgatgcactgctaagtgttcgaaagcaactcgaagaatttggattcccttgtaaagctgtcaatgatagtctatggctacagatgcttctgtgtcacagggtgcaagcgattgttgctgatacttgcaggaattgttgccttatgaatagttcttgtgcttgcaagcaagcatatgtgagctcgcatacacattacaggcaggagcatgacaggagcagtgcctccgacaacataggtaatgtctaccttgcggatggccagggtgatgggaatggtgtacttgggcctgtccgtgttaatgtaagaggagcagtcgatggacttgctggtattgggagagggaactcaaatgtgcctggtgcagcttgggctcctacacgatatgtcttctcccgtgtcccttatgggcttggttcaagaaatggccagcaatttgccattgatgaatcagaacctagaattgaccgcaatggagatatttcagcagatggtctgactgcattggttaaccttagccaagaaaacaatgctgctcatctgcaggatcaaagtctatttgagacagggatgcagacaagatatcgcagtgttccatctgtttccactccaggtggttcttctgtccagatgcaggagtcaaaggagcatgaacttggatcagattgggaaaccacaaaggatgcaactatatcattagacatgaaaacacctcttagccattttccacctttccgctttggggttgagttcgaggatgtgcacaggcttgctgatggtcaagtgaaacattcgactgaagtgttttatgcaggctctctatggaaggtgagtgtccagccattcaatgatgaggatcctcatgggcgacgcacccttggactatttctccaccgacgcaaggctgagttgttagatcccttgaggaaggctcacttgtacgttgacccccgggaaaaggtcactgctcggtatcagctcatctgtccatcaaagagagaggtcatgatatttggaagcctgaagcaggctgggacgctgctaccaaaagcgccgaagggctggggctggcgcactgctatactatttgatgagcttgcagatcttctccagggtggtgccctgcgaattgctgcagtggtccagcttgtctagattagttgcagaaaacaactgcttgcaaggatggtgatagcacagcagtttgtgtaattgatatactccctccgtcctgaaatagttctttctggtccttttttccgtccacattcgaacaaatgataatgaatagacatacatacaaactacattcataaattaagttaagtagtcaatgcttgtttagtgtaaaatgaattatattttaggacggggtgagtatgtaagaactcaatctgtcatgtactcgtactctgaaatagtgtataataatgtatagcggtttgctgtttggt

SEQ ID NO: 33736 - DNA, 1153 bp, Zea mays
  Clone ID: UC-ZMFLMO17164C07_FLI
aattacaaaaggcaaacagagcaaagaaattaattgagaaaaggaccgctgcaaatgaagagttaaaacatgattatctgccaagaacaaagcaagttcctcctgttcctggtctactgacaaatgtggagcatcatcagcttgtgttaaatctttgtcgaacattagctttgctgcagcgatattgggatgcactgcagattatcaaccgaaccctcaaacttggaaatgacgcactcactggtgacaaaaaagaggaactcagatccttgggtgctcaaatagcttatagagctccagatcccagtcatggctttaagtatgtccgttacgttgttcagcagcacccatattctcttgccgcatggaattcctactataaggtggtatcaagaatagaggacaggtttccacatcatttcaaatatcttcttcggacaagagaagcgaatcctgactgtgtgcctccaataatcatatccgggcatcgatttactgctataagtcagcatcagtcagctgcccgggattaccttgaagcttataagctggacccagaaaaccctcttattaatctatgtgtaggcactgccttgattagtttggcccttggcttcaggcttcagaataagaaccagtgcatcgtccaagcttttgctttcctgtacagataccttcgcctttgtgataacagtcaggaagccttgtacaacattgctcgagcgtatcaccacattggcctgaataccttggcagctgtttactacgacaagactttgtcaaccgaggagaaggatcatcccatccccaagcttccgtacgaggctggttcacgtgcgccagaggatctgaggccagggtattgtgatgtgcgaagagaggcagcgttcaatctgcatctaatctatatgaagagtggagctaccgatcttgcgagacggatcctaaaaacttactgcactgtctaaaagctggtatcgggcaatgttgttgggatcggatatcagatccttcaaggctccttgcattagcttaggatcaagctagtctataaagctagaacattggtgtaatatgtcactagtgactttagatgtgtagctgaagagttaacaacgtgcttgatccagatttaaacgtatattctggtttc

SEQ ID NO: 33737 - DNA, 1601 bp, Zea mays
  Clone ID: UC-ZMFLMO17164F02_FLI
ttgatggatactgcatttgggcagacattagttgagcccaatatgatagtaataaatgtggaaaaatttgcatctactccttcagaaaataactggttcagcattgaggagagacctcctattgcatatgtgaagcttgagattctagaaggaactgacatgaagccatctgatataaatggactagcggacccatatgtgaaaggtcaccttggtcctttcaaattccaaacacagatacagaggaaaacattgtcccctaagtggtttgaagaatttaaaataccaatcacatcatgggaggcaacgaatgaacttatcatggaagttcgtgataaggaccccatgtttgatgactcacttgggcaatgtaccattagtttacatgatctgagaggtggacaaagacatgacaaatggatatcactgaataatgtgaagaaaggaaggattcacttggcagtaacaattgatgatatatccgaggaccaaaatacatcaagtttggaccaatcattgaagcaagcggatactgaactaccagtatcaacatctgtttgtagcgaagtggatgctagtgaacctcctgaagaaaagaaagtcttaatggatgaagtggagcacataaacattgatggacaagaacagcctggaggtttatatgtacatcgccctggcactggggttccaaggacatgggaatcccggaaaggacgagcacgaaacccagacacacagattcaccaagaggttgacaagcaaaaggaagtcccaacaccaaaagggagtgggcaagggggtctatttaacgtaggctcctttttccggtggaactcgaggaaggggagctccagaaatctcgatgccagccctcctgcaactccgggttctcagagcgtgacagagcttgatccaaagctccctcaaactccacgtcccaacctgaaggagctaggcgagaagcggacgtcgataaagatcgtagtggacgaagaagcaagcccggcagacaaggtgggaggtgcggagaactcaggagaagatgtggcgaaggtgatagagaaaaatgcaggtgaaccgggcaggtcactgacaagcacattgagcaggaagatttgcagaaggagagcagatgataggctatcagatatccccgagaagattgaagctcgtggatctaagccggtgagtgaagggcctattcttgttagaggtgagccaatgataacagtggaccatccgacgacggaacatagcgatggaggtggcactgagcaagatgcggtgggagcaaaggttgctactcagacctcataaggattgctacttaaggtcagcagttcttgttcttgtaatctttgctggtcgatttggttcgggcatgggaccttgctttctgtttatagatcagtgtccatagttgcgaagggtatccatttagaaatggctgaaaaatatagtaacaaagagcagcgtgttgtgcagtgatatacgctcatgttgataagatggctctgttagatcttgtttacttatgtaaagaaacatgaattgcatatatttcttgacataaataatgtaaaacgtatttttttggttgc

SEQ ID NO: 33738 - DNA, 2942 bp, Zea mays
  Clone ID: UC-ZMFLMO17164G02_FLI
gctttggttaatgctggaatgcgtgtgtatttacaagaaactgaacgaaattggataatatctgatgtttcaattgtctttggtggggtagcagcagttccacttagtgcttcaagaactgaaaacttccttactggaaagaaatgggactctgggttgctggatgatactttcaatttattgaaagaagacatctctctttcagagaatgcacctggtggaatgattgaatttcgcagatcgcttactttgagtttctttttcaaatttttcctgtctgttacccatgaaatgaaaataaaagggttgttagcagatggattgcatgcagatcatctgtcagctgtacagccttacagtaggcctgttactgttggaactcaaagttatgaattagtaaggcaaggagcttctgtaggtcagccaatggttcatatgtcagctatgcttcaggtcactggtgaggctgaatacactgatgacacaccgacacctcccaatactttgcatgctgctttggtgctgagtaagaaggctcacgctcgcatattgtctattgatgattcacttgccaaatcttcccctggctttgctgggctgttcctttcaaaagacattcccggtgttaaccatactggaccaattatccatgatgaggagttttttgcatctaacattgttacttgtgttggtcagatcattggaattgttgttgctgatactcatgataatgcaaaaactgctgccaacaaagtacatatcgagtattgtgagctcccagcaattttatctgtagaggaagctgtcaagattggaagctttcatccaaataccaagaaatgccttgtgaaaggcgatgtagaacaatgttttctgtctggtgcatgcgatagaattgtatcaggacaagttcatgtcggaggtcaagagcatttttacatggaacctcagtgcactcttgtctggccagtggattctggaaatgaaattcatatggtttcatctactcaagctccgcagaagcatcagaagtatgttgcaagtgttcttggtcttccacaatcaaaagtcgtttgcaagactaagcgtattggtggtggatttggtggaaaagaaaccagatcagcaatatttgctgctgcagcatctgtaccctctttctgtctgagaaggccagtaaagcttgttttggacagggacgttgacatgatatcaactggacagaggcacagtttccttgggaaatataaggtgggatttaccaatgaagggaagatactggccctagacctggaaatttataacaacggtggccattcacttgatctatcccttgcagtactggaacgtgctatgtttcattcagaaaatgtctatgacatagaaaacatcagaatcaatgggcaagtatgctttacaaacttcccaagtaatactgctttccgaggttttggtggtccacaaggcttgttgattgcagagaattggattcaccatatagctacagaactccaacgaagtcctgaagagataaaagaacttaattttcacaatgatggagttgtgctacattatggccagttgctccagaattgtacaataagttcagtttgggatgaactaaaagcatcttgtaattttgtggaagctcgcaaagccataaataattttaacagtaataaccgctggaggaagcgaggaattgccatgattccgacaaaatttggcatatccttcactgcaaaattcatgaatcaggctggcgctcttgtgcaagtttacactgatggcactgtcctggtaacacatggcggggtcgagatgggacagggtttgcacacaaaggtagcccaagttgctgcctcgtcattcaatatccctcttagctctgtatttatatcagagacaagtactgataaggttcctaatgcatcaccaacagcagcctctgctagttcagatctgtatggagctgcagttttggatgcttgtcaacaaatcaaggttcgaatggaacccattgctagcaaaggaacccacaactcgtttgcagagttggctcaagcatgctacatggaacgtgtggatctctctgctcatgggttttatgctacacctaatattgggtttgactggacgattggcaagggaactccattcaattatttcacatatggagctgcatttgcagaagttgagatcgacaccctaactggggatttttacacaaggacagctgatattgttatggatctcggattttcaattaatccagcaattgacattggccagattgaaggagcttttatccaaggattgggctgggcagccatagaagagctaaaatggggggatgataaccataagtggattcgacctggacacctcttcacctgcggtcctggttcttacaaaataccctctgtaaatgatatacctctcaatttcaaggtttctctattaaagggtgttccaaatccaaaggctattcattcttccaaagccgtgggagagccaccatttttcctaggttccgccgtcttatttgcgataaaggatgcgatctctgcggcaagggctgaggaggggcacttggactggtttccactcgacaacccggcgacaccggaaagaataagaatggcatgtgtggattccattacaaagaaatttgccggtatagattatcggtccaagcttagtgtatagcggctgctgggctggtcacgggagaataaattggaaacagaagcccgcatttgtaaagtttcatgccctttgtgctaaaaagaatgggagggacggtttagtgttacttgtgggaaactttaaccctaacaaaggattgggtgatgtattaatagattgagttagttgggtctgacatacacatggatgagaagataattacacggtaaactctaaggccctgttcggttttt

SEQ ID NO: 33739 - DNA, 2325 bp, Zea mays
  Clone ID: UC-ZMFLMO17164G09_FLI
atccatcccgttcttgggttcttctccccctctttctctgctcgttcctgaacgcgaattcgggcgacggatttgaggttctgatccacagctctcgattccggaaggagttggtcaagaactggggatcctgagttgaatatgatatcaaatccggtggactggtatagtttcggacccggatagaattggtagggatgccagattggagggtgcgtgagtttgaaggtaaattcactgatgagtttgcccacagtaacaacaacaaacatgaaagtggagttgaggctcctggtgtcactagtagtaagaagttgaagcatacagttgccggtgagaaaattcaaggtgtcatccctggaataaatagctcagatccacagaaatgtaattcagagaacatccaacatgagaacaggatagtatcccagaatataaacagtgctggtgactgcattggagactgcaaagacagctccaacgccttctcttcaagggaagaaaatacaatcgctgaaaccagatgtccaacggatgactggaactcctgtcagtttgcactgagcaatggttcatccattctcaataaccacagtgctccacaggatagcctcacttatggagataatgatctaaactacattgattggcctggcattgacaattttgaggatgttgacacattattcaggagatctgatttcacatatgatccgcagcagctggagaatacagatgggttatcttggcttccttcttcagatgctgtttactcttctgatgttgctttgcagcaagggtttgactcgtcttattccgattatgatattctggatgatctctcagcattccaatgtgcagaagataaatcactaccctcagttggtccttcatcggatttatgtgataatcaattcaatgatacctatctgttcagtgagcagaagaatgcgaatgcatatggtgaacagatataccaagaggatgtgatggagttgttgcccactgaccagatatgcagtggacatgaaaacattgatatgttgcagggtggaaaccagtattcatctgaacatacaattcaaggtattgaagacaagaaattttctatagcatcaacttctcagctgagctcctctcagaatttactgaagcaaaggcaccacttagattccaattcaccaagcaacattacttatgaggcctatgaagaaaagttcggtccatctagtggttcttttgcacaaaggaatttaaaagtgcagaagaaaactatgaacatgcaaccaacacagccgataaatgataatgtcatgaacagacatcctcaaacattgacaagaagtgcttcttatccttgtgagaacaatgaatctgaaagaagaggattagggaaaagaactctgggggatcctcaagttacaatgggtacttcaatggtagtggatggctcatttgtatcatccatgtcctctgatatctctgttgaagaaagcagctttcgacaactgcagaatgctgttagtcagctggatgtgcaaaccaaattgtgcattagagatggtttataccgattggcacgaagtgcgcagcacaggcaagttattccaaatatgatgagcagcaatgaagacaacccggatataaaggatctgcagaatgcagaaactttgcgcaaattcgtcgatcctcggagcatcgagacacagacaaacccgatcgaccggtctatcgctctgctacttttccaccagtcatcggaccatgcggctgtggctgtcgacgatgcctcatcacttaaaccccctgctggtagcaaacaccaccagggccctgctgctaaccaaaaccaaggcctgataccagattcatcggtgtattcccctggagatggggcccccaaggatgtacagtccctggacaagttctgaatttatgtccctgctctccatgggcacgttcggttcccggggaatggtcgtctggaacgaatcctggtcggattgcttctctaattgatataagctttgatcggttggaacgattcttggtggaatttcgggataaatgaacaggccctaatgcgtctccgtgacctggttaaggcggcataatacggctttcacatgatgtttctaggcagatgtaaaaaacaagtatattgtgtacccaatagtctgtagcctgttccaatcacattggttttgacatgcgtgtatcctatgggtaggcggccgttgtgctctttagtggcgttgactcacatctgtgtaatctaaaaaaaattctttctttccgtggatctctaactatacctttgaactg

SEQ ID NO: 33740 - DNA, 1446 bp, Zea mays
  Clone ID: UC-ZMFLMO17164H04_FLI
cttgccaagcgcagtgctgaaaatcgtgcttgtattggagatgctggtgctattcctattcttgttagtctgctatcaaccactgatgttagcacccaggaacatgtggttactgctctcttgaatctttccatctacgaagagaacaaggcaagaataatatcttctggagctgttcctggaattgtgcatgtgttaaagaggggcagcatggaggctcgggagaattcagctgccacacttttcagcctatctattgtagatgagaacaaggtgactattgggtgttcaggggcaattcctgcacttgtgcagctattgagtaatggaagccaacggggtaaaaaggatgcggcaacagcactatttaacttgtgtatttaccagggcaacaaggggaaagctgtaagagctggattggtacctatactactagaactgctcatggagactgaaagtgggatggtagatgaggcccttgcaatattggcaatcctctcaggccatcctgaggggaagacagctatcggcgctgcttctgcaatacctgtacttgttggagttatcagaaatggatctccaaggaacaaggaaaatgctgctgctgttatggtgcatctatgcagtggtgagcagcagcaacagcatcttgctgaagcacaggagcagggcatcgtgtctttgctggaggagctagcagaaagtggcacggacagaggaaagaggaaagctgtgcagctgctcgaacgaatgaatcggttcctaaagcagcagagtcaagccgaagccgaagcagaggccatggcacaggctcatgcacaagcacaagcacaagcacaagcacaagcgcagcctcagatcctggttcaagctcaagcacatgcagatatgcaagctgaacgatcactacttcccacatcatctgacatttcggatagatgaggtttttgatcagcagcttgttttgtctagtaactggcttgttttttttaagctcaggctgtcaggtggaagattgcctgcaactgttattgtggaggtttctggtttctgttgaacactgcaaattaggaggtctgggcagcgtgatttaggtccatgagcatgttgacaggtgggttctgagtcagtttttaacctgcgtgtgttcgtaaaatgtaccggtgattgaaggtagtaagtatatcctcgagttttaggaggtatcgttgaacttgtacccggtacgagcccagtacaggactaattctggcgccctaggctaagtgcctgacaaagttgcaggaaagctttagttcagaaaaatgtttgttcatcgagtccggtgcagttggttcagctgtcttctgtgagttgtttgcgttgaaaaaaagcggttggttcagctgtcttgtgtgggttgtttgttgtgaaaaaactgccgcaagctgtatgctgtgaaaagtt

SEQ ID NO: 33741 - DNA, 732 bp, Zea mays
  Clone ID: UC-ZMFLMO17164H05_FLI
gtccccagacaaccctcttaaccaggtttggcttctatctcctagcgattttgtaccatgtcttctgttgatttatctacagtacatggtttgtatgaatctgccatatttgccatcttcagctttaatacatgtaattgaaattatacggaaacttgtttccaccaattttcactagtgatatggtgagccatttatcattgttggtcttagaaatatcaagtggttttggccgtaggcatgttaatgtttttattatcaagtggttttggccgtagacagtctaacatcaaacaaatatttatctgcaggctgctgactgaattttgcaaccctactgaatcttatgtgtaattaaaggccaaccttcaaacagcactggattggtgaattgtgttggtacctttttcttggagtggatgcacactaaaccttgaatcagaaaggtgttccagtctcgaccaataatttccaaatcgctggagtgtatactgtgggaggtgctcttgtttagactcgactagtcgaggttccttttttgtgttaagtatgatggttgggcacgtgctggtaccgagcgtgcttcactcattatagtattttgattcttgaacaaatcgtgtgttgggctaaaccatgacattttgattctacttatgccggatttcgtgataacttgtgttttgattcttgaacaaattgagttacgaaggctgcctcattatttggctc

SEQ ID NO: 33742 - DNA, 2552 bp, Zea mays
  Clone ID: UC-ZMFLMO17164H10_FLI
ggcagcctctgcactgcaggatctcatcccctccggctgcccgtgcccagccgtcgtggcgcgacggcggcggtcggtctggtagggctcccctcctttccaccagatcagaacagatagtcatagatcactagatcagtgtcacaccacgacccgccagccggaccgccacttgccaaccaacgcctttccctcctcctccgcctccgggcgctagcgggaatggacgccgccgagctgcccctcgtctaccacatcggtctggtgctggccgcgctctgggccgccgccgccgtcggcttccgcggctccctcctctacctcctcgccttcctctacctctacatggtaaatgctcgctgtgcagtgagactgcggaagaggatacaacatgaagagatgaaatctgcctaccaacgaaggctcctctctgatgcagaatcagcacgctggttaaaccatgcaatcgacaagatgtggcctgtctgtatggagaagatcgtttcaaaacttctacggcccatcataccatggttcttggataagttcaaaccttggacagtcagcaaagcaagtattcaggaactttacatgggcaggaatccaccaatctttacctccatgagagttctaccagagacatcagatgatgaccatttggttcttgagctgggattgaattttctttctgctgaagatatgagtgctgtacttgctatgcagctgcacaagagtgtgggacttggaatgactgcaaagatgcatttaacaagcatgcatgtcgagggaaagatattagttggtgtgaaatttgttcggagttggccatttcttggccgtgtaagactatgttttgtggagccaccttattttcagatggctgtgaaaccactcattaatcacgggctcgatgtcactgagtttccaggaatttcaggatggctggataagttgatggatactgcatttgggcagacattagttgagcccaatatgatagtaataaatgtggaaaaatttgcatctactccttcagaaaataactggttcagcattgaggagagacctcctattgcatatgtgaagcttgagattctagaaggaactgacatgaagccatctgatataaatggactagcggacccatatgtgaaaggtcaccttggtcctttcaaattccaaacacagatacagaggaaaacattgtcccctaagtggtttgaagaatttaaaataccaatcacatcatgggaggcaacgaatgaacttatcatggaagttcgtgataaggaccccatgtttgatgactcacttgggcaatgtaccattagtttacatgatctgagaggtggacaaagacatgacaaatggatatcactgaataatgtgaagaaaggaaggattcacttggcagtaacaattgatgatatatccgaggaccaaaatacatcaagtttggaccaatcattgaagcaagcggatactgaactaccagtatcaacatctgtttgtagcgaagtggatgctagtgaacctcctgaagaaaagaaagtcttaatggatgaagtggagcacataaacattgatggacaagaacagcctggaggtttatatgtacatcgccctggcactggggttccaaggacatgggaatcccggaaaggacgagcacgaaacccagacacacagattcaccaagaggttgacaagcaaaaggaagtcccaacaccaaaagggagtgggcaagggggtctatttaacgtaggctcctttttccggtggaactcgaggaaggggagctccagaaatctcgatgccagccctcctgcaactccgggttctcagagcgtgacagagcttgatccaaagctccctcaaactccacgtcccaacctgaaggagctaggcgagaagcggacgtcgataaagatcgtagtggacgaagaagcaagcccggcagacaaggtgggaggtgcggagaactcaggagaagatgtggcgaaggtgatagagaaaaatgcaggtgaaccgggcaggtcactgacaagcacattgagcaggaagatttgcagaaggagagcagatgataggctatcagatatccccgagaagattgaagctcgtggatctaagccggtgagtgaagggcctattcttgttagaggtgagccaatgataacagtggaccatccgacgacggaacatagcgatggaggtggcactgagcaagatgcggtgggagcaaaggttgctactcagacctcataaggattgctacttaaggtcagcagttcttgttcttgtaatctttgctggtcgatttggttcgggcatgggaccttgctttctgtttatagatcagtgtccatagttgcgaagggtatccatttagaaatggctgaaaaatatagtaacaaagagcagcgtgttgtgcagtgatatacgctcatgttgataagatggctctgttagatcttgtttacttatgtaaagaaacatgaattgcatatatttcttgacataaataatgtaaaacgtatttttttggttgc

SEQ ID NO: 33743 - DNA, 636 bp, Zea mays
  Clone ID: UC-ZMFLMO17165A04_FLI
tccgacgctgcaccggcacccaaggctcgtgtggtgggctggccgccggtgaggtcgtaccggaagaacgcgctcgccgacgccgcgggctccagcaagcccgccaagttcgtcaaggtggccgtcgacggcgcgccctatctgcggaaggtggacctccaggcgtacgccggctacgaccagctgctccgcgcgctccaggacaagttcttctcccacttcaccatcaggaagttcgccgacgacgagaggaagctggtggacgcggtgaacgggacggagtacgtgcccacgtacgaggacaaggatggcgactggatgctcgtcggcgacgtcccctggaagatgttcgtggaaacctgccagcgccttcgtctgatgaaaggttcagaggccgtgaacttggcaccgagagccgcccgatgaggcacactagctccgttgggcgttggcacgcacgcacgcactggcgtcttgaaggaaagcgggaactctgctggtcttgatgaggatcttcacgtgagataggaacgtgtgtacagttgtcgccttatggtattgagttgaggaaacttggaagttccattacttgtctgtagtctctactttatatagatgcgaagaagcttgagatac

SEQ ID NO: 33744 - DNA, 946 bp, Zea mays
  Clone ID: UC-ZMFLMO17165A05_FLI
caagctcagaataagctatctcacatcaagagcaaatagtgaatttgggcctttgaattgggtttcttctggcttcataaagacttgtggtgatttcaggattggtaaatatgaaagctgtgatatagtcaacatgttctctcaccagatgaaatgggataaagggccgcgcgggcttatcaaaatttatccacagaaaggtgatatctgggctgtttatcggaattggtcctctgactgggatgaagatactccagataatgtgctccatgcctacaatgtggttgaggtactggacgcctatgatgaagaccatggcatctccataattcccttagttaaggttactggatttcgaacagtatttcagcgccatcaggatccaaatgctaccatgaagattcctaaagaagagatgtttcggttttcacacctagtgcctttttacaggatgtcaggcgaagaagctgcaaatgtccccaaagatagttatgagcttgatccagctgctatttctaaagaactgcttcaggggatcacggaagcagtggagccaaatggaacctaaggcagttgatgatgcctgccttggttaacctgccattttgaagtaatccagcaaaaaaatattaacgcttgctagttttatagatttccttctgcttttgactatcacctttgcatagaagagatacaatggggccagtcattcaggagtcagctgcttagcagcttctggtgtaattagcaggctctgatatgaattttgctgtgatatgttacttagggcttgtttggatgtacgtggattggaggggatcgaagcggcatataatcccttactagtccattcccctcaatcccatgcatccaaaccagcccttagcaactctagatgtgggtgtactaacgcgaagctcaagcagtttttatggtcagtgttgac

SEQ ID NO: 33745 - DNA, 1585 bp, Zea mays
  Clone ID: UC-ZMFLMO17165A07_FLI
gcggcgccgcgcgtcgagaagctctccgcagcggctgagaaagcaagagctaagagtaatgggctcaccaaagaggcttcagtgccaaaggatgccaacggcaatgccatctcagcgcagactttcaccttccgtgagctcgccactgccaccaggaacttcaggcctgaatgcttcctgggagaaggaggttttggacgtgtttacaagggtcgcctcgagagcacaggccaggttgttgctataaagcagcttaacagggatgggcttcaaggaaacagagaatttctagtagaagttctcatgctcagcttactacatcatcaaaacttggttaatttgattggctattgtgctgatggagaccagcgacttcttgtttatgaatatatgccctctggatcacttgaagatcatttgcacgatatacctcttgataaagaggccttggactggaacaccaggatgaaaattgcagcaggtgctgccaaaggactggagtacctacacgacaaagctaatccaccagttatttatagggatttcaagtcgtcgaacattctgttggatgaaagtttccacccgaagctgtctgactttggacttgccaagttgggtccagttggcgacaaatcacatgtctcaacacgtgtaatgggtacatatggttattgtgcaccagaatatgctatgacagggcagctgacagtgaagtccgatgtgtatagctttggggtcgtcttgctagagttgattactggtcgtagggctatcgacagcaccagaccacatggagaacaaaatcttgtctcatgggcacgtcctcttttcaacgacagaaggaagctccccaagatggccgacccaaggctggaagggcggtaccccatgcgcgggctgtaccaagccctggcggtggcttccatgtgcactcagtcggaggccgcttcgcggccactgatcgcggacgtcgtgaccgctctgtcctacctggcgtcccagccgtatgaccccagcacagctttcgcttcaaggaggcttggtggaagcaagcctggcgagaatggcggcagggtggtttccaggaacgacgagaccggaacctcaaggtcgccggggaaggaccgggaggactcgcccagggacctcccggctatcctcctgaacaaggacctcgaacgcgagcgcatggtggcggaggccaagatgtggggcgaccgggagcgcatggtggcggaggccaagatgtggggcgaccgggagcgcatggtggccgaggccaagatgtggggcgagaattggcgcgacaagcggcgcgcagagaatgggcagggcagcctggactcgccgcctactaggaacagctaggggacaggggagagcctttcacacattccatccatgcttatcggttgtttatttccaggtcgattttcgtcgccgcggcggcgagcagggccatggggcatggagggttagatgtacatttctagggcagcgtcgtactggatagtgaatgcatttggttgtacttgtaaattctcagaaaaattttgtgagaatgaaaggacgcattttgagttcc

SEQ ID NO: 33746 - DNA, 1267 bp, Zea mays
  Clone ID: UC-ZMFLMO17165C11_FLI
agcacaagcgcactctagcaatggcttctgaggttgtccgccctagcgacgccgagctactaaaggcacaagccgacatatggcggctcagcctctcctacctcacgcccctgtcactgaggtgcgccgtggagcttggcatccctacggcgatctaccgccatggcggggctgcctcagccgctgagctggtcacggcgctgtctctcccctccactaagctgccgttcctccgccgcctgctgcggctcctcgccgcgtcgggcgtgttcaccgtcgacaagcagagctcggaggaggagcggtaccgcatcagccccgtgtcctacctcctggtggacggcatccctcacgaggaccacatgaaccacaccgctctggtgctcacctgcacctcgacgcgctacatcgaggcggggatagggctggcggagtggttcaagagggacgtggtcacgtcaccgttcgaggagctgcacggggcgactctgttccacgagagcatggggagcctcgacgcagatttccacgacatggcgagcgaggccttggacgcccacgacaacttcggcatcgagatagctatgcgggagttcagggacttgttcgaggggatccagtccatgacctactgctgcggtaacttcggtgatgacaagggtgccagggccattgtcaaagccttcccacacataaaatgcactgtgctggcccctcccaagatcattgccaccaaaccggccgatggagcgatgataaactatgtcgaaggtgacatgttcagtttcattccacctgctcaaactgtcgtgctaaagcttgtgctgcaccacctgaccgatgaggagtgcgtcaagctcctggctcaatgccggaaggcgattccttcacggaaggatggcgggaaagttataatcggtgatattatgattgaccactctgggcctatgctggaaactcacctcctgatggacatcggcatgatgaccatgacaaaaggacggcagagagatgaaaaagaatggagcgagctcttcaccaaagcagggttcagcgaatacaagatcctgaaggaatttggagctcgtgttgccttcgaagtctatccgtgagattgcacctggactatacatatatatttacatacatatatgtatgtgtgtgggtgccttgcgtggcttggcgtgatgatgtcataaataaagagggtgggtgtgcttgcggtattcatggatggccatggatctgagcacatgacgttggatgc

SEQ ID NO: 33747 - DNA, 2189 bp, Zea mays
  Clone ID: UC-ZMFLMO17165F02_FLI
tttgttttattggagcatacatttacataaaattagaatggcaattccatacacaactcacgagctacttgcaacaattgttcagttcttaattatattaatattatccgatcatatttcagagcgttagttctgcaggtgaggtgcttgagacaaggaaaagtagggagtcaaaatcatgatgaatgttgtcatcttgaaacatccctaagttaaaaacattgtcaggggttagccttttttgccgtgatagaaaccatcaaatgaatgaaattctttcagttgattgaaaaactcttgtctaaacttatgccagtgattttcttttaaatcataagcatgaagtgcatcattttacattttactgtccttacaaagcaaaacactagcactggtctgtcatcatccaagcacgccatacaattactatttctaactctggttatctgtacacttatggttggaagcggtgcatttttaaaattgttttttatctctatatttctttacctgagtagtacacatgtatttgtagttctttcatgtgaatttttactactgtgtgataaaccttcatacacgacagaccttacaagtttgagagttttagatttcagttagctaatttaggcttagttccataggactgtacgagtgagtgcaacggcgccattataatcattgaagtgatgttttgtggaacaaccagatatgtaaactttaattggatctaagtgaccattataagaaaaatcattgattattacttggttcatctttatgactttatccaacttattataggttttcacgtatttttgttatgagtgcaaggtgcagtttctgtatctaactacccctttcttaacatcatgtggctattctattactttgttttgtgtatataattaccaaacacatgtttgctactagatttatcggcatgaataattgatgagacaaactcaatgttaaacgtctttctttgagttttcttcattgatagagtcaaaggcataaagataggtgtgtgtttcgtttcttcattgagtagtcctagatcttatttcaactatttcttcattgattagttctagatctgtgaaaagtactacctttatgttgcatggacctcctacaagttccctcattaaccaaaagaaatgagaagtctccaaatttcttaaggtagtcagattttgatattgttgctatcaaagtagacaaactatatttttaacgatattcactaaagttataaagttgagcagggcgtagctgctgccaaggttccctgttcaacgcttgcagccgcatccctttgccagccaggcggtggtggggagggagactgggatggagcatgtgccgatgtggctgcgtgcgttcccggatctgcacagctatgtcagcatgtaggtgtgggttgagccgttggtgactaatgacatgatggacaaggtggagcaggtgcggcaacggaggaaggtcgagaagtccctgctcagcttgcaatgaaggttggctatggcaagcgcggaagatttaaagaataatggttgtcagaagacatatgagagccctggaaaagtggtaaggcatcagttgctaatgcatccatgatggatatgcaacagattattacaaaattaacaactcagtgcagtgagaaggcttttgagttagagttaaagtcaactgataatcgtgtcctctaggagcagctactacagaagaatgtggaaatcaacgatttacaagaaaaagtttttcgcgttgagcaacaactctcagcaaaagtggatatatcctgtgagaaggaagctgattgtacacaacatgagactattgatttgaaatctaaacttcagtccaaggaagctaaaattgaaaagatgaaatatgagcatctgacgagggaggctgctttggcagagaaggagcttcttgaagaggagtacaagaaaaagtttgatgaggcaaagaaggaactatctctggagaatgatatagcatgcatgtgggttcttattactaagttgaaaagaggggctttagacatatctgatttgaatgttgatgatcgaactaaagtgtaagggcgtatcgatcaccacattgttgtctcataattggtgttaatgaaaaataacatggtgttgcacgaaatctctactttcttttgtaag

SEQ ID NO: 33748 - DNA, 1513 bp, Zea mays
  Clone ID: UC-ZMFLMO17165F10_FLI
gcttgcggagacaaaaacaaggagcatggaagaggaagtaatcaagctgcagaaatgcttacaggacaaggatgggcaactgtgttcatccacaagtagcacggaacagtaccatcatgagttggatgatcttagaacacatctgtcatttactcaagctacaggagaagcaggtgttgcatcagctaagttagctcggatgtagtgcatgtcattgctgaaagagctgaatgagaaggacaactcactcaaagaccatagacttcgagtgaacaatctaggtgagcagcttgatcttctccagaaggatgtacaagcaagggaggtcacacaaatgcaacttaaagatatagttataaggatcgagaccaacatcatggatgaagttgccaaagcttttgaaattgcgatgttgagaggggaaatcagaatattgtctactcactggacgaacaaaaccaagaaccttgaatcacaggtatgctacatttcttttatttgttcataagaggccccaataacttggttacaaatgctttgtttcctataacgttgaactgaagtatatttacatgagatttattgatatttgatcagttaaaaaagcaccagagaactgatcaggagctgaagaagagggttctgaagcttgaattttgtctctggtcctgtcatccactggtgcgttcgccaccgcacctaccgctgttactagctcccttgctcttctcttgctgcgactgggatatagcatcgtggatcttgaacctaggccagaatttaggcaggtctagaaccaccatgatgcctggaacatactcctattttatccatgtatgagccttatgggaactctgcaattactatggatcctcttatacattatgttcgacatggagacaaggtagtatattgagttggaccaataatccttcatatttatttatgtgaattatgttgtactggtgtcctgtccttttgtttgtgctttataatttgtaattcttagctattgatatggtatgatggatgggaggtggctgaaatcgttcagataagtgccaatttgttgttttcttttttaatgaatggttttctatttcagctgatgaaccttttatagttcttttattatatgctgccactgattgctaatagggtgcatgtcttctatttctaggtatggtgcataaaaaagtaggaaccacaatgagattgtaatgctgcacatggcacatcaaggtgcgcaagatatgtaccgtagaaattatcgtaaagtgcacacagctgtatgtatagatgtttagaagtggtcgaagttaggcttgctcaaccggggcaatgatttacttagcctgctgaaatgtactataggtagcattcaagtttgtgaccatcatgcaagtacatgtgggtttgttgaaattgagtggtcatcggagaagtagcaaaatgttccctatcgagagctcgtgtactatatttgttttatgaacttaatttttattacaac

SEQ ID NO: 33749 - DNA, 1000 bp, Zea mays
  Clone ID: UC-ZMFLMO17165H03_FLI
cggagccctggacagcagcagcgaactcgaggccgctccgccacctcgccactcgcctcttctcgctctcgccaccgggccagggaagggaccatccgatcggctccgtcatggctggagctgctgctctcaatgagggtatcctttcttccgtgtccgagaaaaatgttgctgctcacccatggcatgatttggagataggaccagaggctcctgaagtgttcaattgtgtggttgagattcctagaggcagcaaggttaagtatgagttggacaagatatctggtctgatcaaggtggatcgtgtcctttactcctctgttgtttacccacataactatggtttcattccacgcacactctgtgaggatagcgaccccatggacgtcctcgtactgatgcaggaacaagttgtccctgggtgtttcctgcgagctcgtgctattgggctcatgcctatgatcgatcagggtgagaaagatgataagatcatagctgtctgtgctgatgaccctgaattccgtcactacaaggacatctcggacctccccccgcatcgccttcaagagatccgccgcttttttgaagattataaaaagaatgaaaacaaagaagttgcagtgaatgatttcctcccagccgaagatgccatcaaagcaatcgagcactcgatggacctgtatggctcgtacgtcatggaaagcctgaggaggtgatctgctgctgcttgattgtggatgctacgtaattttctcaacagctcatcgagagtaccgtagtccgtagtacggcaaatgttaacacgcacgaactggaatcatgaccaagggatattaccttctgttcatgctgaaacgatcagcagtttctttctttgcatcatatgccacgtcaaatcaaggcacttgcctctgaaatctttgtggtcaagtcaaaccagcacttcgacagaacgattgatggatgcatgtattactgctacataaatgtccatttgctc

SEQ ID NO: 33750 - DNA, 1073 bp, Zea mays
  Clone ID: UC-ZMFLMO17165H04_FLI
tcgcctgaacttgtcaaactgccactgatatgattggctcaatgaaaccagaggagcttcagaaaatgttcgaagttgcttcttcattgaatagcactagctccgctggtccaaatctgggacccaatatgccagaaatgtctcctgatatgcttaagatggcatctgacatgattgctagtatgcctcctgatgacgtacagaaaatgatgagttttgcttctcagatgggtgggcctggtggtgcccccaggagttcagagaatattaactttggaccttcagtgagagctacaacgagtaattctgcccgtggatcatcatctcaacctgttttggagaaccctgatgaactatcagatgaccaaaggatgagccagtcatcctctagtcttccaccttctacagctgatatgcaagaaaccatgaggaattctatgaaagaccctgcaatgcggcagatgcttacatccatgatgaagaacatgagccccgagatgatggcaaatatgagcgagcagtttggaatgaaactgtcaaaggaggatgccgcaaaagctcaacaagccatgtcgtcattatctccagaggatttggatagaatgatgagatggatggagcgagcacagaaaggggtagaagtcgcgaagaagacaaagaactggctcttgggccggcaaggcttgatccttgctattgtcatgctgatcctagctttcatccttcatcagtttgggtttatcggcagatgatgggggtgacttgggtggctgcatcagcatggaaatagattattcgatggcgatgcagagttccctcttgctaacaactgcttaaaagcgctttgggggaaggccggattacgagaattctttgtatccgtatcttatgaaagtgtaactctgtccataaagctatttcatcctatttttaccagcaaaggtagtagaaaggaatcgagccgaaactgttgtgataacaagacgacatgtaatatgataatatccttgtggtgctttcagttttaagtagcagttttgtttaataaagcatatgcaaaggtgaagtggaac

SEQ ID NO: 33751 - DNA, 522 bp, Zea mays
  Clone ID: UC-ZMFLMO17165H12_FLI
gggggcccgggatgatcagcatcaacctcgacctgaagaagggcggcaacaggttcatcaagaccgccgcttacggccatttcggccgtgacgacgccgacttcacctgggaggtggtgaagcccctcaagttcgacaaggcatcggcttaaggttgggagtgttcactgtggacatgaggactaccttcctctggctctgctgttacctgcaagcattgctgctgctggatgtgtgtgtttgatcagtgactggctgctgctccatagaagatgaacggagagaaggatgatgaagggctttggcaatcgccgctgcaactgcaacccatgccatgccggcttagtgattgggtataatttggcttggcagcagccagcattattatgtgctgatctgttatcttttactagtttggtcgtccgatatctttctttctttctttttccccccttttcgactctgtactgaaactgctgagagattcgcagtattgttgtatcgtattcatatgctactgtt

SEQ ID NO: 33752 - DNA, 2049 bp, Zea mays
  Clone ID: UC-ZMFLMO17166C04_FLI
aacgcacctgcgccctacgcctccatccgccctccatcgcctccaccgcaggccatagagcccgtcgtccgccgcacctagcgccttcggctccggtcacaggccccgccggaccgcccgcaggctgcagcgccgcgccgccggccgccgcagcagtcccgcgcggtcgcgcagttctggtcgtctggtctggcctgatgcccgtagcgctgcgtgcccgcctgagaccctgagtaggactgtaggagactaggaggtagtagcaagcagcagcgtgctccgcggctccgcactccgctggtctgcttgagatttgaagagttatttcggtcaaggttctagtggaagtggaccaaacactcgtgctagtggagtttgcaatgaacccgaaatacaagttcaagttcaagagaataatagtgaagaaattccaattgttcaagaagagaatgcacatattccagatgccaatggtgaagatgttgatggtataaatcatttaaacctggatcacattatttctaatctgggacttcatattccaattaattcctttgctcctaatattagagatgaagttagaagggctttcatagctaaaggtccgactcaacaattggtcataattttcttgtcacatgataaaaggagctttcaaaaacattggtttagacaacatagttgtttggaatatagtgtggagtagaataaggcttattgcttctattgttacctttttaagcatgatcgaatggatgataaattttgacaagatgcatttacaaaagttagcttctcacagtggagaaatgtttatacggtattttcaaaacatgtcggtgggcctaatagcatacacaatgttgcagcaacaacatttcatgatttttgtaaccaaaggtccagtgttagtcataaggtttcaaattatagcaaagatgcattggtcaaatatgagacacggttggaaacattcttaagtattgtctgtcttcttacattgcaaactatcatttcggggacatgatgagactagtacttccttgaacaaagggaatttcttagaatttcttgattggtacaaaaaaggaatgaagaggtgagaagagctttagatgagttgtgtcccaaaaatgccaagatgacttcggggacgattcaaaaagaacttgcaaactgttgtgcagaagaagtcacacatgcaattaaagaagaaatggaggattgatattccatgttcttgttgatgaatctcgtgatatatcaattaaagaacaaaataagaaaacttgatggtgtgctacattaaaagaggaatttttaaaagactcgatcttcagaaaattaagaaggcatttcaaaataaggaaactagacaaatacaattgcctaggttttctagaactcgactcaactagagattttattcgatatatgacatttggttgtaaatggattatgatcacgatgacttttaaataagcctttcctggatgatgcaattggacaggaagtagatgatcatggtgaggatgcccacgtccttggcctccgacgccatctctccttcaactccgcatagtcgccagatgcggttgcctgcgtcgtcgatggccagttctttgtactccctcgagaggttgcaccaaggcttcgtttgcgagcatgccgcacggacggacaacgacaagcgcgcgggcggcaatggcggaggaggactcaacaacccaggtctacgtccccgtccctgccccgacgctgtttcgtggggtcggctcactctgcgacgacgtgccgctcgcggagtaggatgcctaccacgcgccgcgcattggcgctgccaccactccagccacctgggctgagtacgacgacatagtcttcaccgcggacgcaggctgccgtatgttggttgtgatcgtgaaaaaagatatatgcggacctaatcaaacatacttcactaactccattaaatcttttgaagctgtagctgtccatgttgaataattagacaaattccaatctaaattccgaatataaatcatgacc

SEQ ID NO: 33753 - DNA, 1482 bp, Zea mays
  Clone ID: UC-ZMFLMO17166D08_FLI
gctgagatcagcggggatacgagagcatggaacagcttttatatgcgtcaagatactgttgttgaaaacatagcaaggaagaatggtatcagtaagagtgagttacttgatagagaagcagatgatcttgctgttcgtattgctcttggtgagacacacgtcattgcagagactaagaaatttctatcaaggtctggagttaatgttgctgcattggaagaacatgcttctaaacgaaatgagaagttcaaaagaagcaattatgtgatattagtaaagaacttgccatttaattctactgaggaagaactcgcgacactgtttcagaaacatggtagtttggataaaatcattctacctccaacgagagtgtttgccttggtagtctttgttgaagcaactgaagcccaatacgcattcaaaaaactactatatacacgatataaggatactcctctgtatttggagtgggcacctgaaaacatattgtctcctacctcagcaccggtggatgaggaagtaaaaaacgaagttggcgagcgtattcttactaaagctaatatagatcaaactgtagaaggagtaagcgctgaagagattgatccagatagagtggagtcacgatctgtgtttgtcaagaacttaaatttcaagacaacagatgaatcattgaagcagcatttcagtacaaagctaaagagtggcagtcttaaaagtgcaacggtgaagaagcatgttaagaagggcaagaatgtttcaatgggatttggttttgttgagtttgactctgttgaaactgctaccggtgtgtgcaaggatctacagggaacggttctggatggacatgctttgatcttgcaactgtgtcatgtgaagaaagatggtcaagcggcaaagaagaatggcaaggataaaagttcaacaaaactgcttgtgcgaaatgtagcatttgaagcaactgagaaggacttgaggcagttatttagtccgtttggccagatcaaaagcctcaggttgcctatgaagtttggtagccacagaggttttgcgtttgtggaatacgtcacaaaacaagaggcccagaacgctctacaagccctcgcaagcactcatctctatggtcgacacctggtgattgagcgagcaaaggaaggagagacactcgaagaactgcgggagagaactgccgcacagtttgtggacgaaagcagcggtttccagagcttgtccagtaagaggaaacggagcagtctcgtggacgaaggctccgttaaagtttcaagaatagcagagtgattatcttgagcgagcacctgaaaattttgatcatgttgtgcaatttgtaccggttcgttagggaaaaaaatgggttatcttaggttgtttaatgtttgtgtgctgttttagagctgaggaaaagaaatgctgaaaaggatctcacatcttaatgcaagagctgtctaaatgcaagcatatttctac

SEQ ID NO: 33754 - DNA, 1973 bp, Zea mays
  Clone ID: UC-ZMFLMO17166D10_FLI
gaaccctgtgcttagtccatcagcaccctagcctcccattcacagttcctccctgacctcccttacgctattgcagcagcagcacttgactccagtgccctcaacacccagccatagtctacctctgcgctcgtcacgaagccgcttgccctacagtcctgtcatgtcaccgtcctacaagcactgagctccgtccatctcgttgaacgccatcgtccccttcttcactgtaggctcgacatctgccttctggtgcacaccgacgctgcgctctggccctcgccctccatcgcgcgctcggacactttgtcacctccagacttcgccgtcactgagcttctccctcgctctcagatcgaggtcgcccgaccccagcgcgctcgccctggtgcccagcacctcttcaatcccgatgcatccccaactgaactcgtcggactcgccttggtttggacttcgccaagttggtgagcagccgtgaactgcaccatgctcaggccctgcccgcttcctttccatctgggttgatcctacttcgtcagaacagcagcagcgccagcgtcctctcctagcttgtgttcgtgaattttctcgtcgaaccggcatcgtgtcatcatccgaacacgtagaagaagtgatgtttgaagaaggagttcacttcagtgcatgttgatccagcggtggagtttcatctaactacttaccagagtagaataaggttttgaatcttctctgcaacaaggcaagccccggtgcatttgccacctcccttgtgtttacaaaattttatcacttatatgctgcattaggtgataggagttgattgattaaacaattgatgcattaccatccttgaaagattgattaccataccttatcacctgttttataaaagctagagatgcttagtcatgctgatagactaagaaaaatgtttttcatctatgactcatgtttttacaaaaagaaaatgggcttgggataatgaaggcatcaagacgttgataaattcattatccaggcatggcccctctgtcaggcgccaaaattttaaaatagtttaaaatgggaccagacgctgagcaggaaaggtcgcccgtctgtgtcgattaaggaccgtaccgattgttggcctgatgatctaggaccttttaactggccacatacctcgtcatgggtaagcctgaacccggctattccatacgtgaaaagacaaccgcgcactgggcgtgggagatggtgggagtagcagttaccctcctggcaagaggctggatggtagggtaatgtgctcccgggtagcgcggaccagttcatgtggtggaggatccgtgggaatggttgacatatgcaagggttaagtgctacatatgtcgtgtggttagagatccccagctgggtattaatcgattcggatcgccgttacttctcggatatgaagactggatcgctgcccttcatcgtagataacaagtgaaacaaaaattggattttaaaagcaacctagtgtaggtcaagtgaatgatctagattagaaaaatgctagattcaggctagaagattcaggtaataaactaacttgtgaaataaaacttggcttaaggacccacttctagtaagcttttctgcaaaatgagtccttgaactttgatgagctttaccttgattcccaaaagccagcatacccttgaaagtcttttctttagtcgggtaagtcttgctgagtaattgcgtactcagggttttatcccttgttgtttttgtaggagaagttttattcccttatccttgggttagttacttcatgtggaggacttgaagcttagaaggtttttatatttctcttatggaaaggcttcacccttccaattattgtaataagttatgtcctttgagtactatcaagacttgtaataaatacatctctttctaccatgtaaaacttgagttctggaatgtaaagtgtactttgt

SEQ ID NO: 33755 - DNA, 1926 bp, Zea mays
  Clone ID: UC-ZMFLMO17166E12_FLI
ggccaggttgtctacatcttggatcaagtgcgcgctatggagaacgaaatgctgctgaggatcaagcagtgtggtcttgacatcacgccgaagatccttattgtcaccaggttgctccctgatgcaactggcaccacctgtggccagcgccttgagaaggtccttggcaccgagcactgccatatccttcgcgtgccattcagaacagaaaacggaatcgttcgcaagtggatctcgcgatttgaagtctggccgtacctggagacttacactgatgacgtggcgcatgagattgctggagagcttcaggccaatcctgacctgatcatcggaaactacagtgacggaaaccttgttgcgtgtttgctcgcccacaagatgggtgttactcactgtaccattgcccatgcgcttgagaaaactaagtaccctaactccgacctctactggaagaagtttgaggatcactaccacttctcgtgccagttcaccactgacttgattgcaatgaaccatgccgacttcatcatcaccagtaccttccaagagatcgccggaaacaaggacaccgtcggccagtacgagtcacacatggcgttcacaatgcctggcctgtaccgcgttgtccacggcattgatgtgttcgaccccaagttcaacatcgtgtctcctggcgcggacctgtccatctacttcccgtacaccgagtcgcacaagaggctgacctcccttcacccggagattgaggagctcctgtacagccaaaccgagaacacggagcacaagttcgttctgaacgacaggaacaagccaatcatcttctccatggctcgtctcgaccgtgtgaagaacttgactgggctggtggagctgtacggccggaacaagcggctgcaggagctggtgaacctcgtggtcgtctgcggcgaccatggcaacccttccaaggacaaggaggagcaggccgagttcaagaagatgtttgacctcatcgagcagtacaacctgaacgggcacatccgctggatctccgcccagatgaaccgcgtccgcaacggcgagctgtaccgctacatctgcgacaccaagggcgccttcgtgcagcctgctttctacgaggctttcgggctgacggtggttgaggccatgacctgcggcctgcccacgttcgccaccgcctacggcggtccggccgagatcatcgtgcacggcgtgtctggctaccacatcgacccttaccagggcgacaaggcgtcggccctgctcgtggacttcttcgacaagtgccaggcggagccgagccactggagcaagatctcccagggcgggctccagcgtatcgaggagaagtacacctggaagctgtactcggagaggctgatgaccctcaccggcgtgtacgggttctggaagtacgtgtccaacctggagaggcgcgagacccggcggtacctggagatgctgtacgcgctcaagtaccgcaccatggcgagcaccgtgccgctggccgtggagggagagccctccagcaagtgatgcgtgacggcggccacagacctgatcgatcgatgagcgagagggagcactcggagtgtcgtgtcttttcccttgccatttctttctttcttctttttccttcccggaggcgaaaaaaaaagagtctgcttttgctaggcggcgggcgttcgttgctgctctttgcttcaagagttaaatttacctaccttgtcaaggtcttgttccatcattgatccgggtgtcgcttttagtagtctgatggactgttagtagtttgcgttgcgtcggttgagagggaacggtggtggtggtggtgtgtgtgcagtcgggtgtggtgctccctttgtttcctggatgggatgttgctccttgaataataatcgtagtggccttggagcccttttcctg

SEQ ID NO: 33756 - DNA, 1542 bp, Zea mays
  Clone ID: UC-ZMFLMO17166G09_FLI
ttgaaatcggtaactatagcagcgggtcgccgcaatgcgcacggcagccctcttcctcgggaagatttcaaatccccgcggcctcttccatctactgctcggcacggcactccggctgcccgaaaaatttcgcacatcccagattcccgcccgctctggttcgcgccctcgtctggttcccttgccaacccggtcattcaacgtcgcagccaccccgcgcggctagggctgggactcgaggcctagggtttggctgtaagtttggtaacacgatggcgggggccgcgggggagagcagcggcgagcggcaggggacgttggagcggcggatgctgcggtcgcggtaccacgccgtgaagaacatcatcagcgatgagcgggatgagatgtcgagggcggattcggacaggttcacagccatcatccagcaggtggattgcctacacgagctcgtgcagaggcctagggagcaaatagcggatgcagaagctctgcttggcattacaaacactttggtaacttcggtgaggtcccactcaagtgaaggaatcagcccttctgatttcataacagctttactcaagaagtttgggcagcaagggaatcatgatgatgagtctgtctcattacgatggggtgatcttgggctttctgtttcacatatcttcaggcctgtgcctggatgctgtaccatgcttggtcctatgaatactgaagtaaagcaacggaaagttgtagctgttggtaggaaacggactgcacggccaacagaaaatacctgtcctgaagagcttgctgagtcttcagaggaagtaaagacagacactgacaggaatgtcttagttatgtttgatatcctcaggcgaaagaagagcgcaaaattggaaaaccttgtgttgaataggctttcatttgcccaaacagttgaaaatgtttttgcactatctttcttagtgaaagatggtagggtggaaataactgtagatgatagcgggcatatagtacggccaaggaatgcacctgctgctagcgctatagcctcaggagaagtctcatacagtcattttgtttttagatttgacttcaaggactggaagcttatgaaagaagttgttacagagggagaagagctgttgccacataggacttcacagagcaatctttgcaacgaagaaaacgaccaaccaaatctggaggcacgtgcgcaaataacgcctatcaggaaactcacccggaaccgaggattggtcttgcaggatcatgtagtcgaggaaactcctgaagagaaccaagcgtctaagcgcaggcgccttttcaggaatcaagattgacctagcaattacttggcatgagtagtgtaggcaggcaacctggcttgtgttgtatgcaaaaaattgcctgagtaacgtgtctttcactaggtctgttgtgccatgctgtcttgttcttggcacagctcgtgcttatctgaacttccagttgtgccagcggagtagggctgtaattataaattgtttgaagttctggtcacatcttgcaact

SEQ ID NO: 33757 - DNA, 285 bp, Zea mays
  Clone ID: UC-ZMFLMO17166H06_FLI
caaaaagggtgtcgagggtgcaaccaagtttctccttagcaagctgaaggacctccaattttttgttggtgagtccatgaaggatgatgcgtctgtggtattcgcctattacaaggatggtgccactaatccgacattcctctatttctctcatggtcttaaggagatcaagtgctaggcgtgcggcgaaattagttacccatgttgggtactatctatgtactattattatatccaaaactatagttgtcctggctgaattgaactcaaaagggtttgtttgag

SEQ ID NO: 33758 - DNA, 2486 bp, Zea mays
  Clone ID: UC-ZMFLMO17168A03_FLI
agaggtttcaggctatggcctattcagcagctatgaaagttcctgttgccgctattgagttatacctggatgtgaggagccaaattgaagatcaaattcggggatttagcgaaccagtatcagacaaacttcttccagatcttgctcctcaagagcagcatgtattgactctagttctggatctgaacgagactcttgtatactcagattggaagcgtgagagaggatggaggacctttaagaggccaggagtggatgcttttcttgaacatctcgggaggttttatgaaattgttgtgtattctgatcagcttagtatgtatgttgatccggttgttgataggctggatccaaagggcaatattcgacataggctatcaagagttgcaactaagtatgaaaatggaaaacattatcgggatttgtcgaagctgaacagaaatcctgctcaagttctttatatcagcgctcatgctaaagagtcaagtctgcagcctgaaaattctgtggaaattaaaccttggaagcttgaaaatgatgacactcaattgcttgatcttattccatttctagaatatgttgctatggcaagaccttctgacatcagggctgttcttgcatcctatcaaagtggtgatattgctgccgagtttattgagcgctctaaggagcaccagaggtctgtggatattttcctatgttctatcacctttttatacttaattgatggcaatctgaatgttgatgtacccaactccacttctgtgaaattataagttatcatcagtcatgattatgaacaccatgagttcatcagtgtctacaataatcaataatgtttctgttcatctttaatatggacagttggtgatttggcatgccttgggaaattaagtctcagctgagagaaatagtgtattggtcgtcgaactaaactggatatagtttatataatatactgatgtattagtgaatcccactgtattacaagacaataattgattacttggaacaaaaaacacgaacaatcttgctccatgtctggtgataacaatcttgctccatgtctggtgatttatcctttgtttctcccttttttgctataacaaaaagtagggtttcctgattcatattgctctcgtgacaaaaacagtaatagatttaactgggtaaaagtcattgctatttctataatctaataggagaataaactttgatctcgatatgatggggatatgcagttgtaactttgtatcttctttccttgttagcttacacagtataattggtgcacattaagataaggggttttccatttggccattaaatactccgaattaacaaagctgcccctcaaataaagtaatttgtggaaactatgccacttcatccagtctctcctgatgctttcttttgtgcaaatttttctacgttggcgtgtagaacaatctcattcatttaagtatcttgattattctattcagcaatctgttttgtgttgagtggggctaaaaactgttgtctcactcctcaaactgtgcttgatctaccaatttccgtacctctgggatcttgtcgcataaacttcataatctagcacattttagttgccagttattatgtttgatggcaacctttctgtcatctgcaaacatgatgggggcctatttctggttatatttatagccattttttttcggttcaaccattcattgcttgctactaagctgccctttcttaaacaatttgattggtgttagagcaagacattttttttgccttttgtgtgggctgtgttgatttctttaagtacttctgcttgcaatagctgtacgactatatgcttcctggccactatatgcgtaggaaaaaagtcaaacggtcttatttttgacaggaggtagtaacatactaacatgtgtaacctaggtggtagtatagaaatgctctagtgtaccacgattatggattgtcaattttgcttaacgcttattcacatggtatcacttgtcgatttagaacttcattaaagctttttagcaccaccaatatcaccttttgcaggcgcatgcaagaacaaaagaaaccaggacgcatatggaggcggtgaggactaaaagttggaaggaaaacataccaatgattttgacgcttcaatccgaatgaagtgaatggatccatcaaggattacaattttgtcatcttttgccttggcggttaataaacagaccaaacgttatttataatcattcagaagacgccataccggctgaagtatagcgcttgctgtttgtatttttaagggtaatggaagtattaatgtggcggttgctgctttgttttaagagtcgcgaaagtattaatgtggtgcttgcgttttttatgggttttatgatggtactccatcaccatctctttcaaaatactatagcctgttctaaatcaaacatggctaagcaagaaatatatcaacatttacaatgtcg

SEQ ID NO: 33759 - DNA, 1248 bp, Zea mays
  Clone ID: UC-ZMFLMO17168A04_FLI
gtgagcttggaactttgtacttcaatcataaaacaactaagcaggtccaaatcaatgttgtcatagtttccaaacagactgcaactctagaaacatagaattaccactgtcttatatgaatgaaaatgtacacacttgcatccaacctgaaattttccctggaagtggctacgaaagaaaattcatgtgctttaggacacagtacaagtacttagaaagccaactccttgttcacgtctattttttccaatcgccgggtccgagtactacagtcactgtttccacctctcttgcttattctttacaaagctcttttagcgccaattaataatggtcaactagctgttatgatgcatggtgaattacaaggagctttgggatcttcgccgatcattttatttgtgattgcaaacagctggctctttatttttgtacagatcattgcacactgatacatagaagatcttagtgtcaaaagtatagctattcacacgccaattcgttatgagtgtttgcctcattgcagcatagaaaggcattagtttctctgctaccttgtgtagatcagatcgattgctttgtttgactgatttaatacacttgtctatttttccaaactttgtatatttttgaagcttgtgttttaggtactacacaaggtaattgattcatttatatagtaagtagttattgctactatatgttaatcagtgtatgctatgttcgttaattgacactaattatttagatgggtgccctaacagacgaattttgctactgtattcaggcccaggttcgttactgaagttaccttttcaaaagagcagttccctttactttcaaaaagtgcctttcttgaacggtcaattgaagaaaattctgaccaagaataatgcatcatcaaactaaatgacattcctggggtgccaagtcatttgagctagttgcaaggttctgctatgggtgtgaaaatagagcatcaaaagctactagagtgaacagatgcttttgtgactgatcagctctggagcagctagagtgatgtagttgtgggcttttgaacaatagctagagtgatatgaaacattagtgatgtagttgtgggcttttgaactacttcaagctggagtgatgtcgatgtggtgcttttgtgactgatcatctctggagcttttatgaatgatctagctagctatccgtaaatgatctagttgtgaatgatattataattgtgatgcttttgtgaat

SEQ ID NO: 33760 - DNA, 947 bp, Zea mays
  Clone ID: UC-ZMFLMO17168B06_FLI
attcttttagatgcggactataacgcaaaactctctgattttggacttgctaaagatggccctgagggtgataaaacacatgtgtcaactagggtcatgggaacatatggatatgctgcacctgaatatgtaatgacaggtcacctgacatcgaagagtgacgtatatagctttggagttgtactactagagatgatgactggtagaaggtcaatggacaagaacaggccaaacggagaacacaacctggttgaatgggcacgcccttatctgggagaaagacgcagattctataagcttgtagaccctcgtttggatgggaacttctccataaaaggcgcccagaagacggctcagctggcccatgcctgcctcagccgtgaccccaaggctaggcctctgatgagccaggtggtggaggtgctgaagcctctccagaacctcaaggacatggccagctcttcctactacttccagtccatgcaacatgagcggcgcacagcacttgccaacccatatggcagtcaaagcatgaaagcgcagagcacctttgcgcggaacgggcagcagcccatgaggagcctctcgtatggccctcatgcttccccgtatcgccagtcgccaaggcttgacagcaagcggcaatgagtcatggtgcttgtctgtcgaccataacatattttcaagactgaagttgtaaccagaactggtgtatgaactcagccatccaacaagcatctgagctatctattattgtggatgaagcagcaacattgattcgaatttgcatatcatctgcgagtgaatttttttctctcttgttatcgcttacattttagctgtactgtctttacggctctagataccttgacttgaaaggtggaactaaacagggttttgatcggtctttgaaacaatgctcaggcagcaaatgattggaatttgtt

SEQ ID NO: 33761 - DNA, 158 bp, Zea mays
  Clone ID: UC-ZMFLMO17168C09_FLI
gctgcaggtattcttggttggggtccagttgaaattagacggtatggtaatgagaggccaaaacgtgctgttcatcctagtcatttccctactgggcatggacctttgctgtagctgaaggaagtagatgatgcgaacaaccttgtccattttggcat

SEQ ID NO: 33762 - DNA, 2190 bp, Zea mays
  Clone ID: UC-ZMFLMO17168D01_FLI
gatagttctaaaggaagcactgctaccgagccaaatcaatcccagtcttcatcatcctcattaccaagttctgatttgcatgatgggggtggagcacaggtggatgagctgaatacacaaaaaaaccagccatcttcccagtccaaaaagccgaaaaaatctactctttcccatcaaaagagtgctcctcacgacttttaccatggtaagaagcctggtgtgtcagttgagtcttcatctaaaaatggtgctcccgatgtgactagcaatggtcgtccaaagtatcagaaaccccaatcctctcatcaaccaagacagcagaacccagtgaaccatcgtcctcatggtggatctggcaattttcaatcatcaaactcacatagaagcaactcatgtccagcaccagctgggcataatggtattcctactgcaccgttgcaattctggccaagcgggccaccttatcatggaccaccaatcaattatcctgatatgagtcggttgaatatttctgaatatcctaggggtattcataataaccaaggtttgcatgccaactaccatccaaaccatcctggttacaatgattatagctacagacctccaactcaacctaacatgcctagcaacatgcaaaatattggacactggggagccaacccgggatgttcacagccatcttcggaccctcaaggtcttgtaagatatatcttaggtgctttggaagttttgaagactgagaagattcctccaacagagcaatatatagcagattgtatatggtatggacatggtgatgctaatatgccaaattttgatgttaagaaggcacttcaagttgccatgcagcatcaagctgttgtcaagaaaaagttagggaaaatgtcattctttctgggaaaagatgaaaatctctggaaatgtgttaatataatggatgataacgcaaaatacccaaaagaaactctagatgctgttcatgctttcatgtcttctgctccaggctattctgagataaagagttctcaatctaggtatcaagctgctactatgttgaagaaaacatgcctgaagcatctttcccttgctgaagtccttcaggttctgaatatcataattaacacaaaaaagtggtttgtgcctcattcttcaggttggcagccgttgtcgtttaacataatagtggctgatgctactactgccactggtggaaaggcttagcatcggtacattatctgcttgtaccaattgaacatgttgaggttctggtcgttggtgcaagctgcgtccgcaaaagctaagttctgttgaggtttcctagcacaatgctctgcattttgccaagtttggggttaagttgttttacacacagtatatgttagctggagtgaaacagtaagtagccttagactgctaaattttagtgggagtcaatctgtcaactattgggcatgttgaaagaactctgggcagccctggctgtggctactcctatgggtgataattgtggtggtaagatgcttatgcaatcaagcataaagcggttcagagggactatcgtcttttgttcaggcagtataccgatgcctgatgctggtggttatgatctgccctcattgtaccaagatggcttcaaaggcgtccatgaaatatgagttgacatggaggaaattttctgtagtattagactattggtatagctgcatagctgttgctattaagctactcgttgaagccttgatctacccacattatattcccagttcctacatgtactcattgcagtaagcatggatggacaggaccctgtgagtgtgaagttcagtgtatccacttttgaagcatggcaacagagtctgaaatgcaagcaaactgcattaaagacagtcatgctgctagctgcaaggttacctatagttcggtggcctctattggctctgccgggaaaggtttggagttcatctaagcgccttccagcatctttgctcccacctttagggcttgttcggttattcccaatcccgctcaatccacatggattgagagctaaccgaacaagcccttagatggcgggatgtttcttgtaatgctggcaaactattatgctgcttcttgtaaatcttactggttgctgattctaccaagtgctccggttgacatgttgcctgagagtaaatggttgatgactct

SEQ ID NO: 33763 - DNA, 2000 bp, Zea mays
  Clone ID: UC-ZMFLMO17168D04_FLI
tgaacgttctcgtcacctattgacatctggaatttctgagattctagaggaggcaacttttactaatgttgaacagtttctggaacctcttgagctctgttatagatcattatgtgcttgtggtgacaaacctatagctgatggaagtcttcttgatttcttgcgtcaagtatcaacttttgggcttgcccttgtgaagctcgacatcaggcaggaatctgatcgacacactgatgtccttgattcgataacgacacatcttggaattggctcctatgctgaatggtctgaggagaaacgccaggattggctgttgtctgaactgaggggcaaacgtccattgtttggttcagatcttcctcagactgaagagactgctgatgttttaggcacatttcatgtccttgcagagcttcctgcagattgctttggcgcgtatatcatctctatggcaactgccccatccgatgtgcttgcggtcgagcttttgcagcgtgagtgccatgtaaaacatccactgagagttgttccactttttgagaaacttgcagatcttgaagcagctccagcagctgtagcacggctcttttcaattgactggtacatggataggattaatggcaagcaggaggtcatgattggatattcagactctggcaaagatgccgggcgtctctctgcagcatggcaaatgtataaagcacaagaagagctcatcaaagtggcaaagcattatggagtcaagttgacaatgtttcatgggaggggtggaacagttggcagaggaggtggtccaactcatctggccatattatctcagccaccagacacgatacatggatcacttcgtgtaacagttcaaggcgaagttattgagcactcctttggagaggagctcttgtgcttcagaactttgcaacgctacactgcagctactcttgagcatggcatgcatcctccgatttcccctaagccagaatggcgtgctctgatggatgaaatggctgttgtagcaactaaagaatatcgatcaattgtcttccaagaaccacgcttcgttgaatacttcagatcggctacacctgagactgaatatggtaggatgaatattggcagccgtccatcaaagaggaagcctagtgggggaatagaatcactccgtgcaattccatggatctttgcttggacacaaacaaggttccatctgcctgtctggcttggatttggtgcagcgataaagcacatcatgcagaaggacatcaggaacatccatatactgagagaaatgtacaatgagtggccattcttcagggtcacccttgatttgcttgagatggttttcgcgaagggagacccgggaatcgcagctgtgtacgacaaattgctagtggctgatgatttgcaatccttcggcgagcaactgaggaagaactatgaggagacaaaagagctactccttcaggttgctggtcacaaggacgtccttgaaggtgatccttatctgaagcagcgtctgcggctgcgtgagtcctacatcaccactctgaacgtgtgccaggcctacaccctgaagcggatacgcgacccgagcttccaggtgagcccgcagccgcccctgtccaaggagttcaccgacgagagtcagccggcggagctggtgcagctgaaccagcagagcgagtacgctccaggcctggaggacaccctcatcctgaccatgaagggcatcgccgccggcatgcagaacaccggctaggccaagatcttcggtgtgcaaataacctgtctcccatgagacggtggacgatatgtgtaggcctgtgagcagttagtacaccggcgccagtgtgttctggaggatttttcatgtcagagcctttctcttgtgtgcttgctgtagatgccaaggggagcttattggctgttgaagcctgatgcaaaataaagtacgaaactatgttttttgtttaactaataactagcaaacatgcttccgttgc

SEQ ID NO: 33764 - DNA, 1485 bp, Zea mays
  Clone ID: UC-ZMFLMO17168D05_FLI
agcaaagttgggtgctgccattggaccacagtcatacctcagcaggctggcggcagaaagatctcaatatgcaagctcaacagccaggcccgcggctccattagcatttgacgagctttcacctcctaagctccagagtgatatcttctcggcgcagtcaagcatgagaccaagtgctagatccctttgggctaagcaaccatttgagcaattgttcggcatgtcaagtgcagagctcagtaaaggtgacttcaatcttccaggcagatcaggtggtgtggccaaggatgatttctcttacaaggaatctgagacgaagcttcttcagtccctcaggctctgcatcatgaagctccttaagctagagggatcagggtggctgttcaagcaaaatggtggttgtgatgaagatctaatcgaccgagtcgctgcagccgagaagctattgatgcaagggactgccgagaatcaactgctgcttcatggtggtgatctccagcaacattcttccgatcaggctggcatccagtacatgcgcacgcttcccaactgtggggaggactgtgtttggcgcgcgtcactcgtcgttagtttcggtgtctggtgtgtccgccgagtgctggacatgtctctggtggaaagcaggccagaactttggggcaagtatacctatgtccttaaccgtcttcaggggatcttggaccctgcgttctccaagcctcggggtgctctgaccatatgcacctgccttcagaaagacaccagagtgcgcaatagcccaccccacagtgggctaacagccatgggcccggtccccacaccgctccgcggcgccttcacgaccgcaggcgtggttctggagatgatcaaggacgtggaggctgcggtctcaggccgcaagggcaggagcggcacggcggcgggcgacgtcgccttccccaaggggaaggagaacctggcctccgtgctgaagcggtacaagcggcggctcgccagcaagggacagtagcgcgccggtgtcagacgggcgggcgatcgcaagcaatgttaggaggagcctgactattgttctccagggggggctgctgctggcgcaggcctccctgagccctggattttttcgttgcacgacgttcctagggaccggtggttgcccgatggtcgtcttggtcccttccagcaggttttttttttccttccctctttctgttggtttctttttgttggcgttgtgatgttttgtaaggggcaactagggtatgtgctcagaaggactcaagatgtacacgcgaaggagatgcagcgttgtaaagtccacactctgcaggttaaccctttttggggccgtcaagtgttagtgcgtgccctatgtatgttaatcaccccctccctgcagagaggttgcgaatactcacaaacttgcacctgtcgagatcgtttgtaatatccgacgtcttgttcagaattgttctcactctttttttt

SEQ ID NO: 33765 - DNA, 1233 bp, Zea mays
  Clone ID: UC-ZMFLMO17168F04_FLI
gcggcacgggcggtaggataaagtagcatagcataccacaaaaggtgctgcttgacagatggcaagcttcccacacctcacgcagatggagcatggcctagccagtggtgcctcccatggcacgccgagcttcttcttctgccatggcacagccacggcggattcagcctcgctggagacctcgtctggtgttctcgacacctccccacgaggcacttcttctgacgacaacaaggcctgcaggaagcacaaggaagatagtggtgccagcttcagctctgctcgctccaaggactcaaactcaaaggaaagcagcaaaaggagcggaggaaaaagagacagaagcagcaagaaggtggacgaggaggagcccaaggggtacatacatgtcagggcgaggagaggacaagcaacggacaaccacagccttgcagagagggtgaggagggagagaatcagtgagaggatgagggtgttgcaggccctggtccctggctgtgataaggtcactggaaaagccctcattttggacgagatcatcaattatgtgcagtccttgcagaaccaagttgagttcctttccatgaggattgcttccctgagccctgtgctgtatggttttggcatggacagtagtgatgctttcagtgaccttataactcagaagatcgaagggatggcccaccatgaggcgttcgcgatgcctagcagctctgtcctgaacggcactccgtcggaagctctcgtggacacgcacacctccagctcctccccgtcctacgaggtccacggcgacggcggcaccgccagcgtctctttccctcaggacagtggcagctacatggtgcaaacagtaggtgagccaaggcaagagctgttcagccaagtggtgttcagtaaccacatgtgccctttccagtagggagagagcgagaggatggaaggacgacaggaagcaataatgttgagatcctatggaggtggaggccaccaccagacgagtttgtgatgttggacgcaatccatcccctcgtcggtggccgtaacgggaacccctgcggtagctagcattagcagtagtaataatagtaggctgttggttacatcatcctgttagatctcaaggtctctgtcggtaccgcatcatctagtaggcattgttgctgcttagcttttgggctctcttattaccaagggttgcatgcatgccattgtattgtactctccaattgg

SEQ ID NO: 33766 - DNA, 1259 bp, Zea mays
  Clone ID: UC-ZMFLMO17168G03_FLI
caaccagccagccgatctcagcgatccgccatggccaccgcgtattacgagaggccccgtggcggcgccgtcgaggaggcggacgacttcgatgagttcgaccccacgccgtacggcggtgggtacgacctcgccgtcaccttcggtcgcccgctgccaccgtccgaggaaacctgctacccgtgctcggcgccctcgacctcctacgacgcaccgcactacgccgcctccgagccgtccccctacggtcaccacgccaagccaaagcccaactatgggttccgcccccagcaggagcaacagccgtcttacggcagcggctacggatccaggcccgagcccgctgcggaggagggcggtggctatggatctggcttcggatccgggtatgggaggaagaagcaggaggaggagagctacggctctggatatgggaggaaaccgcaggcggaggagagctacgggtccggcgggtacggctctggctacggcggtcagacccggccggaggagagctatgggtcagcagggtatggatctgccaatccgcaggctgagacatacggctctggctacgggaggaagccacaggtagaggagagctacggatcggagtatgggtctgggttcgggaggaagccgcagattgaggagagctatggatcggggtacgggaggacgccgcaggttgaggagagctatggatctggttacgggaggaagcctcaggttgaggagagctatggatctgggtacggcagcaggccgcagggtggggaggagtatggcagtggtggtggtgggtatgggaggaaggcacaggaggagacctatggctcctcggggtatggctatggcaggaagaacgaggagcagagctatggtggttctggctatggttatgagaagaaggcatctgaggaggacgaaggtgcctttggctctggtggttaccggaagccaaaaccctatgacgaggagacacagggttcatacggttatggagaggagcagcccaagtatcagagtggcgggtatgagaggccgagctatggtgggggagaggggtactatggccgcaagaaagatgatgacgactcggatgatgagaagaagcggcgtcattctaagcaccaccaccatggccaccactacgatgactaagcaccagtgccttctgctgggcgttgccctggttcaccgctactgctactatatccattcgcttgcataaataaagacggctgtgtaccttctgg

SEQ ID NO: 33767 - DNA, 1024 bp, Zea mays
  Clone ID: UC-ZMFLMO17168H04_FLI
gggttattgttgccattgagaacccacaagacatcatcgtccagtcggcccgcccctacggccagcgtgctgtcctcaagttcgcgcagtacactggcgcccatgccatcgctgggaggcacacccctggtaccttcaccaatcagctccagacctctttcagcgagcctcgcctgctcatccttactgacccaaggactgaccatcagccaatcaaggagtctgctctggggaacatcccgaccattgccttctgcgacactgactctcccatgcggtatgtcgatatcggcatcccagccaacaacaaggggaggaacagcattggatgcctgttctggcttttggccaggatggttctgcagatgaggggcactatcctccctgggcacaagtgggaagtcatggttgatctgttcttctacagagacccagaggaagcaaaggagcaggaggaggaagctgctgcggcccctgagtttgctgcagtcactgattaccaaggagctgatcagtggggcggtgaccagtggacctctgatgtggctgcaccacctgttgctcctactggtgctgattggggtgctgcaccagctccggttcctaccggtgatggctgggatcaaactgtggcccctgttcctgtggatggcactgttcctccagtggtcgctcctactggttgggaatcagcagcccagcccactgcccaaggctgggaataggcgttgaggcatcactttgagacgtcttgtgcgggattattccaaagtatgaatgcccgaagtcagacgacatattttgtagctaatttgctatgctttgtgcacttatgtttttagggctttctagttgaaccggtgcccctgttctgtttttaaaattgatgctatgaaagagcctatgaagtataagtactagcccctttgttttctgtcgaccgcattccatggtttggttcgaaccgttcgatgtcgtagttctatatgataatacattcagttgattttgatatatggatatt

SEQ ID NO: 33768 - DNA, 1984 bp, Zea mays
  Clone ID: UC-ZMFLMO17168H09_FLI
ctctcagtcctcccaataatggtggcgtggtgagaaatccttccgtccggccgtcgtcttagaagatgaactgttcctcttgctgcgccgctgccactccatcttctccggcgcttctcgccaggccgcgggggggtttagctgctagctgctccacgacgacagcaaatcagaaggtgcttttcctgggctcaaaacagtttccacggatcacgtatagccgtgcgtcgtcacggttgtcgcggagagaggtaatagcttttgccgggcaacaaccttgggacatcggcagatttgtcaagacgctgtatttcttcaacgggcctccaaaccttctcaagattgtagaatctatcatcagcagtttcactggacctgcttctagtgaagcgccaaagaaaatggaaacatcagatgtggtgctggttactggagccaccggtggtgttgggcgacgggtggtggacgtcctgcagaagaagggagtacctgttcgagtattggctagaaatgtagacaaggcaaggagcatgttggggccggatgtacctctgatcataggagatgttacaaaggaagatacacttgatcctaagctattcaaagggataaaaaaagtagtcaatgcagtctctgtcatagtggggccaaaggaaggtgatacaccagacaggcagaagtacaaacaaggcatcaaatttttcgaacctgagatcaagggaccttcacctgaaatggttgagtacatcggaatgcaaaacctgattaatgccataaagagtagtgttggactgagtgaagggaaactgctatttggtttcaaaggcaacttatctggagagattgtgtggggagctcttgatgacgttgtgatgggtggtgttagtgaaagtacattccaaatcttgccaacaggaagtgaaagtagtggaccaactgggttgttcaaagggactgtatctacttcaaataatggtgggtttactagtataaggacaaagaattttactgtgccagaggacctgtcagcatatgatggtgttgagttacgagttaatggtgatgggcgacggtataaactcattatacggactagctatgaatgggatactgttggctatacagcaagttttaacacaactaaggggggatggcaaagtgttaaagtacctttctcttctctgaaacctgtattccgtgctcgtactgtgactgatgctccacccttcgatgcaagcaacattacttcactacaactcatgtttagcaaatttgaatacgatggaatactcaacccaacatttactgaaggtccgtttgagcttcctttttcgagtattagagcatacatcaatgagccgatcactccaaggttcgttcatgtgagttctgcgggagttacaagacctgaaagaccggggttagatttaagcaagcagccacctgctgttcgattgaacaaagagcttggctccattttaacttttaagttgaagggagaggatttaattcgggaaagcggtattccgtacactattgtaaggccatgtgcattaactgaggaaccagctggagccgatctcatgtttgaccagggggacaacatcacaggaaagatatcaagggaagaagttgcccgtatttgtgtagcagctctggcaagcccagatgctgtgggcaaaactttcgaggtcaagagcactgttccattcagcgaaccgtatgtgattgaccctgcaaatcctcctcctgaaaaggactatgaagtatatttcaaagaactcaaagaaggcatcacgggtaaagaggcgttagaggcaacacctgctcaagtttgaagatgtcgttgaattaagaatttcgtctgttttcgtaaattctgacacagtaacccccactctgaatgtctaaagtcatctagaaacatagatgacactaatgctaaattttgtagctgaagatcagaccaataaatattcccaag

SEQ ID NO: 33769 - DNA, 1714 bp, Zea mays
  Clone ID: UC-ZMFLMO17168H12_FLI
cgtcttcgtactcgcctacctccgcggctcaaacctttcccccttctcccaattcccgccgccgctccatcccgtaacgcgacaccatgagggagtgcatttcgatccacatcggccaggccggtatccaggtcggaaacgcgtgctgggagctgtactgccttgagcatggcattcaggctgacggtcagatgcccggtgacaagaccattgggggaggtgatgatgctttcaacaccttcttcagtgagactggtgctgggaagcacgtgccccgtgctgtttttgttgaccttgaacccactgtcatcgatgaggtgaggactggcacctaccgccagctcttccaccctgagcagctcatcagtgggaaggaggatgcagccaacaactttgcccgtggtcactacaccattggcaaggagattgttgacctatgccttgatcgcatcaggaagcttgccgacaactgcactggtctccagggcttcctcgtcttcaacgctgttggtgggggaacaggctctggccttggttccctcctcctagagcgcctgtctgttgactacggcaagaagtccaagcttgggttcactgtgtacccttccccccaagtttctacttcggtagttgagccatacaacagtgtactgtccacccactccctcctcgagcacactgatgtggctatactgctggacaatgaggccatctacgacatttgccgccgatcccttgacattgagcgcccaacctacaccaacctcaacaggcttgtgtcccaggttatctcatcccttactgcctccctgaggttcgatggtgctctgaacgtggatgttaacgagttccagaccaacctggtaccctacccgaggatccacttcatgctttcttcgtacgctccagtcatctctgctgagaaggcctaccacgagcagctctctgtggctgagatcaccaacagcgccttcgagccatcttccatgatggccaagtgcgacccacgccatggcaagtacatggcctgctgcctcatgtaccgtggtgatgtggtccccaaggatgtgaatgctgctgtggccaccatcaagaccaaacgcaccatccagttcgtggattggtgcccgactggcttcaagtgcggcatcaactaccagcctcctagcgttgtgcctggtggcgacctggccaaggtgcagcgtgccgtgtgcatgatctccaactccaccagtgttgtggaggtgttctcccgcatcgaccacaagttcgacctcatgtacgccaagcgtgccttcgtgcactggtacgtcggtgagggtatggaggaaggtgagttctctgaggcccgtgaggacctggcggcgctcgagaaggactacgaggaggtcggtgctgagttcgatgagggcgaggatggcgacgagggtgacgagtattagagaagtttgctgatgacgcagcatcaggccagtgtgctgcccttatcccgtgatctgccgagagttgctcctgctatcgtgttatgtgtgtctgttctgaagtattgtgtggtttacaacacctgatgttgtaagagttgttaattcccctgcattgctaccgggttattgagaataattatggctgtttacgttgttgcttcatctcggagatgctttacatttaccaccttgttcatcttttgtcatcagtaaaatcgagtcggcggatg

SEQ ID NO: 33770 - DNA, 1560 bp, Zea mays
  Clone ID: UC-ZMFLMO17169A01_FLI
ggtcggatctgagacgagacgagtcccctcgcctcacccaaccggaacgaacaagttaccatctcatcccaaccccgcctcgaccggatctcgtcggactcggatccgcccgaccaccccgcgccgccgcagatcaaagaagatggcagctctcgacaccttcctcttcacctcggagtctgtgaacgagggacaccctgacaagctctgcgaccaggtctcagatgccgttcttgacgcttgccttgctgaggaccctgacagcaaggttgcttgtgagacctgcaccaagaccaacatggtcatggtctttggtgagatcaccaccaaggccaatgtcgactacgagaagattgtcagggagacctgccgcaacattggttttgtgtcaaacgatgtcgggcttgacgccgaccactgcaaggtgctcgtgaacattgagcagcagtcccctgatattgctcagggtgtgcatggccacttcaccaagcgtcccgaggagattggagctggtgaccagggacacatgttcgggtatgcgaccgatgagacccctgagttgatgcccctcagccatgtccttgccaccaagctaggtgctcgtctcactgaggtccgcaagaacggaacctgcccctggctcaggcctgatgggaagacccaggtgacagtcgagtaccgcaatgagggtggtgccatggtccccatccgtgtccacaccgtcctcatttccacccagcacgacgagacagtgaccaatgatgagatcgctgctgacctgaaggagcatgtcatcaagcctgtcatccctgagcagtaccttgacgagaagaccatcttccaccttaacccatccggccgctttgtcattggtggacctcacggcgatgctggtctcactggccgcaagatcatcattgacacctacggtggctggggagcccatggtggtggcgctttctccggcaaggacccaaccaaggttgaccgcagcggagcctatgtcgcgaggcaggctgccaagagcatcgtcgccagcggccttgctcgccgcgccatcgtccaggtgtcttacgccatcggcgtgcccgagcctctctccgtgttcgtcgacacgtacggcaccggcgcgatccccgacaaggagatcctcaagattgtcaaggagaacttcgatttcaggcctggcatgatcatcatcaaccttgacctcaagaaaggcggcaacgggcgctacctcaagacggcggcctatggccactttggaagggacgaccctgacttcacctgggaggtggtgaagccactcaagtcggagaaaccttctgcctaaggcggcctttttttcagtaagaagcttttggtggtctgctgtgcttaatcatgcttttatatggcttctacatgttgtggttctttcttgatctgcaccgcgcttatcgtttgtgttgtactgccctaataagtggtgcttatgaggactgtttctggttttgctgcttatgttgtaatgctttgaaacaatgaaagaagctacaggccacagctattttgagaagt

SEQ ID NO: 33771 - DNA, 1170 bp, Zea mays
  Clone ID: UC-ZMFLMO17169A04_FLI
ccgggagagtacgtggaggagcagccatggcttcatcggtggccgccgcggcgagcacattcctgggcacccgcctggcggacccggcgccacagaacgggcgcatcgtggcccggttcgggttcgggttgggcggcaaggcgaagcctgctccgaagaaggtggcgaagacatcgacctcctctgaccggccgctgtggttccccggcgccgtggcgcccgactacctggacggctcgctggtcggcgactacgggttcgacccgttcggtctcgggaagcccgtggagtacctgcagttcgagttggactcgctggaccagaacctggccaagaatgaggccggcggcatcatcggcacccggttcgagtcctccgaagtcaagtccaccccgttgcagccctacagcgaggtgttcggcctccagcggttccgcgagtgcgagctcatccacggccgctgggccatgctcgccaccctcggcgccctctccgtcgagtggctcaccggcgtcacctggcaggacgccggcaaggtggagctggtggacgggtcctcctacctgggccagccgctgccgttctccatctcgacgctcatctggatcgaggtgctcgtgatcggctacatcgagttccagcgcaacgccgagctcgacccggagaagaggctgtaccccggcggctcctacttcgacccgctcggcctggcggccgaccctgagaagaaggagcggctgcagctggcggagatcaagcacgcgcggctcgccatggtcgccttcctcggcttcgccgtgcaggccgccgccaccggcaaggggccgctcaacaactgggccacccacctgagcgacccgctccacaccaccatcttcgacacgttcggagggtcctcttaagcccgccattgctccgccccgtccatcgaccggccggaacgtgttcttggattaactacgatctctatgagcctggggatggatcaacccgtcgtgcgtggtctcgttttgtgatgagtgggagagagagagagagaggatgacaagatcgatcctttgttaatggagatctcgttaattaggagagctaccgctgggacttggtggtttgtataatatatgatccaaccagtgatgaattaatgcattcacttgtgtacacatatac

SEQ ID NO: 33772 - DNA, 1284 bp, Zea mays
  Clone ID: UC-ZMFLMO17169A05_FLI
ataagaaggacgaggagggcaaggttgaggatgttgatgagaaggaagaaaaggaaaagaagaagaagaagatcaaggaggtttctcatgagtggcaattggttaacaagcagaagcctatctggatgaggaagcctgaggatattaccaaggaagagtatgctgctttctacaagagcttgaccaacgactgggaggagcatctcgccgtgaagcacttctctgttgagggtcagcttgagttcaaggctgtcctgtttgtgccgaagagggccccctttgacctctttgacaccaggaagaagccgaacaacatcaagctctatgtgcgccgtgtcttcatcatggacaactgtgaggagctgatcccagagtggctgagctttgtcaagggcattgttgactctgaggaccttcccctcaacatctcccgtgagaccctccagcagaacaagatcctcaaggtcatccggaagaacctggtgaagaagtgcattgagcttttctttgagattgctgagaacaaggaggactacaacaagttctatgagtccttctcgaagaacctgaagcttggcatccatgaggactctacgaacaggaacaagattgcggagctgctgaggtaccactccaccaagagcggagatgagctgacaagcctcaaggactatgtgacgaggatgaaggagggccagaatgacatctactacatcactggcgagagcaagaaggccgtggagaactcccccttcctcgagaagctgaagaagaagggctatgaagtcctgtacatggtggacgccatcgatgagtatgctattggccagctcaaggagttcgagggcaagaagctcgtctcggccaccaaggagggcctgaagctcgacgagagtgaggatgagaagaagcggaaggaggagctcaaggagaagttcgagggcctgtgcaaggtgatcaaggaggtgctgggcgacaaggtggagaaggttgtggtctctgaccgcgtggtggactccccctgctgcctggtgacgggcgagtacggctggacggccaacatggagaggatcatgaaggcacaggcgctcagggactcgagcatgtctgggtacatgtcctccaagaagaccatggagatcaacccggagaacgccatcatggaggagctgcgcaaacgcgcggaggccgacaagaacgacaagtctgtcaaggaccttgtcatgctcctgttcgagacggcgctgctcacctcgggcttcagccttgacgaccccaacacct

SEQ ID NO: 33773 - DNA, 1723 bp, Zea mays
  Clone ID: UC-ZMFLMO17169A07_FLI
agcagactcgcaagggggtagggttgtgtactctgcgcctgtgcggacggcggccggcggacggcgaaggagatggatcgcctgcccgagtcgacccggagcatgaggaagtacgcgtcggaggccggcggcctgcgcgcggcgcggcagggcccccacgggcggtcgctgacggcgcgcacggcgcacagcatgtccacgacggcgctgcgcaccaagtccaagtcggccgcgtcgctgctgcgcagggtgcccttcgcgccgctccgccccgtcctcgccaacctgcaggaggtgttcctcggcaccaagctcgccgtgctattccccgccgtgccgctcgccatcgccgcccagtgcgcgcacttcggccaggtgtgggtgtttacgctcagcctactcggcctcatccccctcgccgagcgtgtcagcttcctcaccgagcagatcgcgatatacaccggccccaccgtgggcggcctcctcaacgcgacgtgcggcaacgccacggagctcatcatcgcgctcttcgcgctcatggggggccagatcgaggtcgtcaagtgctccctcctcggctccgtcctctccaacctgctgctcgtgctcggcacgtccctcttctgcggcggcgtcgtcaacctcggctccgaccagccgtacgacaggacccaagcggacgtcagcacgggcctcctcatcctcggcgtgctgtgccagtcgctgccgctcatgctgcgctacgcggtgggcgccggcgagcactccgtcgccgcggccaccacggtgctcgacctctcccgcgcctgcagcgtcgtcatgctgctcgcctacgtcgcctacctcttcttccagctcaagacgcacgcgcagctgttcgagccgcaggaggtggacgacggctgcgaggcggaagaggacgagcaggccgtcatcggcttcgccagcggcttcttctggcttgccttcaacaccgtgctcatcgccatcctgtccgagtacgtggtcggcaccatcgagcctacctccaaatcctggggtttgtccgtcagcttcatcagcatcatacttctacccatcgtggggaacgccgcggagcacgccggagcaatcatttttgctctcaagaacaagctggacattaccctcggagtagcgttggggtcggcgacccagatctccatgtttgtggtgccgctgagtgtcattgtagcttggatcgcgggtattcaaatggatcttgacttcaagctcatagagaccggctctctcttcgtctcagtaatagtgacagcattcaccctccaggatggttcgtcacactacctcaaggggatccttctgctgctgtgctacattgtgatcggtgcatgcttctttgttacgaggcaacctgcaagtaacaacaatggcgctgggctgtcgctgccaactggcactttgagtgcacaagctgcatgatggttcaagggtcctgcctgagcctgaacaaatgagcatccaaggcagcaacgcagttgtgagtcagaaacaatgccgtgcaaaggttgatgctttcagaagcggtgaaatctcagccggtggctcagtgctatgggagaaatgaaggctagctgctgttgcaataagggtagcgaatatgcatccggtctatgtatatgatgctgtgttgtttcatttattatacagcttaataagatatatgcagagggtggatttgtat

SEQ ID NO: 33774 - DNA, 892 bp, Zea mays
  Clone ID: UC-ZMFLMO17169A09_FLI
cgagagacttgaccaagcagcagcagcagggatggcgcctctgaagctgtacgggatgccgctgtcccccaacgtggtgcgcgtggccaccgtgctcaacgagaagggcctcgacttcgagatcgtccccgtcgacctcaccaccggcgcccacaagcagcccgacttcctcgccctcaaccctttcggccagatcccggctctcgtcgacggagacgaagtcctcttcgagtcccgtgcgatcaaccggtacatcgccagcaagtacgcgtcggagggcacggacctgctccccgcgacggcgtcggcggcgaagctggaggtgtggctggaggtggagtcgcaccacttccacccgaacgcgtcgccgctggtgttccagctgctcgtgaggccgctcctgggcggcgcccccgacgcggcggtggtggagaagcacgcggagcagctcgccaaggtgctcgacgtgtacgaggcgcacctggcccgcaacaagtacctcgccggggacgagttcacgctcgccgacgccaaccacgcgtcctacctgctctacctcagcaagacccccaaggccgggctcgtcgccgcccgcccccacgtcaaggcctggtgggaggccatcgccgcccgccccgcgttccagaagaccgtcgccgccatccccttgcccccgccgccctcctcctcggcttgacctcgccttgcgctgcctgggtcgcggatgcgtcggagccccgagtcgaataaaagaggccgcatcctgtcttgcatttgctgctgcgccatgtgctataacagcctgtgtaataaacactgttgctttcgtgtgtgttcattgccttttggttggttggtccttgcatatcctactagtgctgatctttttgtg

SEQ ID NO: 33775 - DNA, 1215 bp, Zea mays
  Clone ID: UC-ZMFLMO17169A10_FLI
ggaagaagatgacgaggacggtgaaggggacgaagaagaagaaggtgatgaggaggtgactggattctaagcgaggctactcatcacctgtaactttggaagtgtgagttagttgacatactattcacttgtacctcgtgcgatttcttatacgtgtacttgtgtgcgttctatgggacgcactgagcccataaatcgattcgtgactatgtaggtatgtgtagtgctgttgtgtgtaccttgaatttctttctacatcttcctgtggtggcatagaatgcgtgcagtaaggtatggtctaccttctgtttgacatgccttgtgtatttatggtcgatatgtgtttttgtttaaatgatgtttctctgttgctccctctgggtaacagattgttattgacttgggtgttgcctaatggcccttgtgcctcctacctcgcctctaatctggggtagtgggaccttcaggcctacaaagttgttttattgagctagcaatgaagctagtaccggatgcaacttgcatcatatctctcttacatttatgaactagcggttgatccaatccatatgtgtgatctcccctcatctacttgtagctgcattccaccaatggtcagattgatgcataaatcatcatgtgcgtggtgattcaggataaactaattgcctgattgggttttgggtgctgccaatttatctgcataagtttttgtattgttatcatacatctccataagcttttctaatctacacaagcttttctaactggtttgaatagagaataagattaacatcttatgaaggattgttgggatatataatagtgcaaatgtagttcaggcgaccttttggatctccctgcaattacttattaactagacgtataactcagatttacaagaaggcagaaaatgatgcaaaatctacgtgtccttttggatctcaccaattgtcagcacgtctgcttataacgaagttctagagaaggaaaagatggaatgaaactcaaattttggtggctgcataagtgtggagacttgaattcatatatacttagttaggctcaacgttagcgcaaatagttgatgaccaagtttttccattagtattttagtttggatttaaagtacacttatgtatgagttatttgacaatgcttatttatgagatattgaatgatacttatctatattatattaattataatgttatt

SEQ ID NO: 33776 - DNA, 2204 bp, Zea mays
  Clone ID: UC-ZMFLMO17169B04_FLI
ggggggagtaacttcagtaatttgcatgctagtaaggtggcatctcatagcaatagcaagttccctatgcaatcaccacacggtaatgccaacaagaaaggatctttgatgagctcagctggatcagtttctcagtaccagcacttgaatggtgatagccatgacattgatgtatctggatggcatactcatacaggtggttttacttcatccatgctgaacaatcaactgaatcctgatggtgactatggcaatgttctttcgaatcatggtggatcgagttatcagggccaaccaacagagacgatgtacgcacaatgcttgcaggcaaaccctgattcaccccttggcgcagctgcaagcatgagccctttccaagggaggggttttactggttcaggacacttggatagtcctggataccaaaaagcttaccttgggtcattatttggccagcaaaagctacaatatgggatgccatacctgggcaattctggtgctcttaatcaaaatatctatggcaatgattctgcctttggcattggaatgacttatctaacaagcccgccatctactccatatatctcatctccccaaggccatgttgggcaaggaaaccgtctgactcgacttccagcagtggtgaggaacaccgctggaggatccatgggatcgtggaattcagagaatggtctgatggataatggttatgggtcctccttgctggaggaattcaaaagtaacaaaactagatcttttgagctgttagatattgtaggccatgtggtagagttcagttcggatcagtatgggagtcgctttatacagcagaaactagaaactgcttctactgaacagaagaatatgatttttcctgagatccttccccaggcacgtactttgatgactgatgtttttggaaactatgttatacagaagttctttgaatacggaactgaaacgcaaacgaagcaactggcaaccctgcttaagggttttgtgttacagctgagtcttcaaatgtgtggctgccgggtgattcagaaggctttggaagttgttgaagtggaacaacaaacacaaatggctttggagcttgatggatctatcatgagatgtgttcgtgatcagaatggcaaccatgtcatccaaaaatgtatagaatgcatccctcaggagaggatacgatttatcatttctgcattttacggacatgtcgtggagctttctatgcatccttatggttgtcgtgttattcagaggatcttggagcattgtgacgatgaaagcactcaaaatgccatgatggaagagatcatgcagtccgtggttactttaacggaggaccagtatggtaattatgtaatccagcatgtcctgcaatatgggaaaccagaagagcgttctactataattgcacaactcgctggacagatagtgaagatgagccagcagaaatttgcatccaatgttgttgagaagtgtcttacttttggttctcctgagcaacggcagattctaatcaatgaaatgcttggcacaactgatgagaacgagccgttacaggcaatgatgaaagaccagttcgcaaactatgttgtgcagaaggttctggagacatgtgatgaccagaaccgtgaattgattctttcccgtatcaaggtccacttgaatgcactgaaaaggtacacctatgggaagcatattgtgacacgtgttgagaagcttattgccgcaggagaacggcgcattggcgcactaccctcctgctgagatggcaatggttaggtcacctgtacagcagaagatagcgaggcctagctttttaccattaccagtagtcgttaatattgagcaagtacaaccgcagaagttaaaaaagaaaggctcccaaatcctttgtaaataaaggagagcctctggaaataaataagaatgagaaaagatgagattttacttgtcctcgaggaaagacttgtatatttgtattgtttttcccccctcttgcaagcagcaggataaagaagttttaaatattttgtcgagaagcaaagcagttactagaaggataaaggttttaggatcatagatgatgggaaggactgctgtagattctccttttttccttgggtttcatcagtcagtgtataagtactaatgtccatgctgatgttaatctctgtaagactgccttcagtttactg

SEQ ID NO: 33777 - DNA, 2085 bp, Zea mays
  Clone ID: UC-ZMFLMO17169B06_FLI
gcagcccgtcaggttatatagctcactcttgatcgcttcctggtttgctaagcgatttgcctctcgtggttcggtgacggatcggaggcgctgcgagttcgaagctggtttctctgggctaagtcggttcggacttacttgttcagtaggtgtagtgtagctcgatagacgagaagaatatctggcgtggaagtttcagcaaagctcctggattaaattggcatcatagagggcgcaggatccaaatctgccggaaacctgtatcttcatccagtatcaaggggaagttctgttgttgtgagttcggtgatggatacatccaaaagcaagcaaggaccagaacatctccttgttcttgtccatggtatcatggcaagccccaaagactggacatatggggaagcagtgctgaagaggcggttgggtgatgattttttcatatatgctagttcaacgaacagctacaccaaaacctttgatgggattgatgttgctggaagaaggttagcaaatgaagtacgtcctttgaagtttgtcctagaaaaaaggtttcaagcattctccttgttggagactgatatctcctgttcctggatcctaatgaactgctttagaagctctgataattgtgcctatggaaacaggtcttggatgtggttaacaagatgcccagcttgagaaatatttccttcctagcgcattctctgggtggtttgtttgctagatatgctattgcaatactccactcagtctcagtggaaacaaagaatgcaggacaaagtagtgcacttactgttcctacaacaagagggccagcaaaatcaagatgtgcttcaggattaggttctattgctggattgcagccaattaattttattaccttagcaaccccacaccttggggttagagggagaaatcaggtgcatcaccaaaatgtttcggattacgtttgcaaaatatactgcacattatccagcaaaggctcgattcctgggaaaacgaactctctatttgttattttgttcattcatgtagattttgaagttgcatggtatgatttttacaagcttggattatatcattgctgaagtggtcaataccaactagcatctataacttttgaggaaaaaaacgacgaacttattgggacctgttcctgttagtgctgagcaatttctttgacacatgcttatatgtttttcccccgaattaccagcttccgtttcttcaaggcctatcaatcctagaaaagcttgctgcgcctttggctcctttaattgttgggcgcaccggtgctcaactcttcctcactgatggtgatcctagcaagccacctctcctgttacagatggcatccgactgtgatgacaaaaactacatatcagccttggcagcttttaagaaccgtgtcctgtatgccaacgtctcgtacgaccacatggtcggctggcgaacgtcttcactaaggagagagaagaatcttataaagccctcacatcgttcactggatggctataagcacattgtgaatgtggaatactgttcgcccgtgtcatcggagggcccacatttcccttccaaggctgccagagctaaagaagctgcacagcgaacgccaaaccgagaaaataccgaggagtaccaccaaatgatggaggaggagatgctccatggcttgcagaaggttggctggaagaaggtggacgtcaacttccattcgtcattctggccttactctgctcacaacaacatacacgtcaagaacgagtggcttcacaatgctggcgctggtgttatcgcgcacgttgcggacagcatcaagcagcaggagtcacggccatgtcttcctgccaatctatagcagtagcattcagcaatccatttgttcaaattatctgtcgctagcaaataaacccatgaccaaactctgttcgtcagcatccactgagcggcgaaatatttgggactgggacacacaataagctgtgtatcattatcggccgcctaggttttacattgtttgatgtcaattgtcaaatggcatgtgtttcctcatggaacagacgaagcattcgaagttgatat

SEQ ID NO: 33778 - DNA, 1154 bp, Zea mays
  Clone ID: UC-ZMFLMO17169B08_FLI
accaaaaccaaatccaagaacaagtggttcttcttgtgatatccatatcctactgatcatatgtacatttcatatctattttcaatccaagtatatgatttatcgtatgctcttccctcggcaaacaaccacttattccaaactgtttgagactcacaaacttgcaagaatgcaatatgcaaacgaagagtattttgtccacaatcctttgcccactttggctcgtggggatcgttttctttttcactcaggcagctagttaacgccaatacaaatatcataaactagatacaatgtcatgctacacttcagtttggagtacgacgatgtgtcacagatacttgaggcaaaacgccaaccatcattcctggcatagtttatcttcacttgccactgcatgcagaggtagaaagcaactgattttacaagtccactcacttgaaattacaaggttcagatttcatagccagaacagaatacaaagaccatgagctaagcttcaatcagcatagtacaatcgcggggtctaatgagagcaaaatcagatcgaggtacgagttgtcctactgaacacggttgctgtggagaagtttgtgagtttatctattctgataatggaactgtaaccattgtatatcatgtgaatatttaaaggaactgatagagagatacaatcaatctcaaatgaacttaaggataataagggtcaacatgagatatgttgttctaaaattgaaacaataaagggtaaatggcttccaactctgtggattcattcgtaactttcaagaaatggcagttgctcactactaacagcttatctacaacctaatgaaattcgttggtagtgtccacttcatatgtcataagttgaagagcataaatattctgaaagctcacggtaaaagcatcaaggatagttacatgctaaatggctatgcactaaagactaaacacaggccgtgcaggtcaaggaatgcctatgagagtaactcctactagaattacttctcttgattttaacactcataagacaaaaatgcaaacagatccaagggaacttgataagattcgtcagagttatttgtattctatgttccaatactttagaatttgtttgcctatttatggtagaatcagcactataaatacat

SEQ ID NO: 33779 - DNA, 2735 bp, Zea mays
  Clone ID: UC-ZMFLMO17169B12_FLI
tctgtacattttagaaaatacaagtaaatcgacaaatcgtaccctgtgtgactctgtcaataaggcatgtaaaccctttgtaaaaaagaatgaagagaagaagaaagatgatcctgtacgctcgtcgaaaccaaagaaatacagtgcgtactaccattcaaagctcttgcattattattttcaatcatctcgtgacggaaaaacaaagtcaacacgaaggactcggccggtagcactggcgctagcagcagcagagatcgaccggccatcgccgttttataaaaagagagtccagcggtagccgtcgctgacggacgcccccctcccagacctccgcccggatctcgccgcctctcccgcccctgctcgcgagccgccgtcgacagccaccgccatgggcacggccaacggccagcagccggcagagggcgctccctctgacaagctccgccacgtcgagtccatgtcggagctgccctccggcgccggcaagatctcggggatcaacgccgtcgtgctcggggagtcgctcgccgccgaggagaacgacctcatcgtccccagccccgagttctctgccagcgccctcgtctcttctccgaaacagtatcgcgagatgtatgagaggtccattaaggacccggccgggttctggtcggagattgccgagaccttttactggaaggagaagtggaaccccgccgaggtctgctcggagaacctcgatgtcaccaagggacccgtccagatcaactggttcaagggagggaaaaccaacatatgttacaacgctgttgaccgcaacatcgagtctggcaatggcgacaaggttgcaatgtactgggagggtaatgagcccggtcaggatgggaagcttacctattccgagctcctggagaaggtttgccagcttgcaaattacttgaagagccttggtgtcggcaagggtgatgctgttattatatacctaccaatgttgctggagcttcccattgccatgcttgcctgtgcccgcattggtgccgttcactcggttgtgtttgctggcttctcagcagattcgctagctcaaaggattgtcgattgcaagcctaagcttgtcatcacgtgcaatgctgtgaagcggggagtcaagcccatctttctcaaagatatagtggatgcagctttggttgaaagtgagaagaatggagtctctgtaggtctctgtttgacgtatgaaaaccagtcagccatgaagagggaaaacacaaaatggcaagcagaaagggatgtttggtggcaggacgttgtcacaaaatttccaaccaaatgtgatgtggagtgggtggatgcagaggatccattgttccttttgtacacaagtggcagcacagggaagccaaagggtgtactgcatacttctgggggctacatggtgtacactgcaacaacatttaagtacgcatttgactacaagccaactgacatatactggtgcactgcagactgtggctggattactggacatagttatgtaacatatggtcctctcctgaatggtgctacggttctcgtttttgaagggacgccgaactaccctgattcgggccgatgctgggatattgtggacaagtacaatgtgacaatattttatactgccccaactattgttcgttcactcatgcgtgatggcactgagtatgttacacgttactctcgaaagtctctccgagtcctgggaagtgttggtgagccaatcaatcctagtgcatggagatggttctacaatactgttggggattcccggtgccctatatcagacacctggtggcaaactgaaactggcggtttcatgatcacccctttgcctggcgcctggcctcaaaaaccaggttctgcaacctttcctttctttggtgttcagccggtcattgttgacgagaaagggcaagagattgaaggggaatgtagtggatatctttgcataaagaaatcatggcctggggctttccggactctgtatggagatcatgagagatacgagaccacgtacttcaaaccatttgctgggtactatttcactggtgatggttgcagcagagacaaagatggttaccactggctgactggaagagtagatgatgtcatcaatgtcagtggacaccgaatcggcacagcagaggttgagtcagctttagtgtcacatccacagtgtgcagaggctgctgttgttggtgttgagcatgaggtcaaaggtcaaggaatttatgcttttgtaactttggtggatggtgttccgtatagtgaggaactacgaaaaagcctcataatgacagtgcgcaaccagattggggcatttgcagctcctgacaagatccactgggcaccgggacttcctaaaacccggagtggcaagatcatgcgaaggattttgcgcaagattgctgcacggcaactggatgaacttggggacataagcaccctcgctgaacctgctgtagttgaccagcttatttcgctcagcaattgttaggttgcaacgtaattggatggtggatacatccttgagcgcatgttgcgtttgtctgtaatatgagtagaaggtgcatttcaatatcgagaactcaagtgggacgtggtgacatgttgtcgatgtttccttttaaacttttgtatcagatatcaagataggtccatcagaatgtattattgattgacacagacaaatatatcaataaaattgttaatttttc

SEQ ID NO: 33780 - DNA, 2248 bp, Zea mays
  Clone ID: UC-ZMFLMO17169C06_FLI
ctttcttttacctattccaaccctctgggctctggcacacagctactccgcctcctcgcccttttctcctcatccctcgctttcgcttcgccgttccaacgcggagcccccacggaaaataaaggccaagaagtgatggtagtggagtaaaaccacgcgttggagggcagagggacaggttggtggaggacgcgcacccagcgtggagagcagcaggagctacgcgaattcgggccgcgagtgcgccggttcaggttgccgccgccggtggaattgtggcagacgaggtggcctgttggtagccgcgggagtttgcgagtaggtcggttccggttggtgtgcgagcgaaggtgctgttggaggcgtggatctggccggcggcgggcgatgggaaggagggactagggctcgattggagggaaaggcgcgatcttggaggttcccatgggcggatgcctctcgcaggaggagcaccggctccagagcaggccagctgaagctgctggagcagatggattgcggaagtctaaatctgattctaaagctgtagcaagtgttcttgctcctccaaaagatgtggtggacctgcaagtagaaggatatggaaatgtgaatattttcacatatgacgaattaagagcagccacaaaaaacttccggccagatcaaattcttggagagggtggatttggagttgtttacaaaggtgtaattgatgaaaatgttagagcaggtttcccatcgagacaggttgctgtgaaagaactaaacccagagggctttcaaggggacaaggagtggcttgcagaagtcaactatcttgggcaacttagtcatccaaatcttgttgaattgattggctattgctgtgagggttcacatagactgcttgtctatgagtacatggcttgtggaagcctcgaaaagcacctttttcgccgggtttgccttaatatgccatggtcaacacgcatgaagattgcattgggtgctgcaagggggctcgagtaccttcacggagctgagagatccatcatttatcgagatttcaagacatcaaacatcttgctagatgcggattacaatgctaagctttcagactttggtctcgcaagaacaggtcctagtggagaccaaacccatgtgtcaactcgggtcatgggaacttatggatacgcagctccagaatatgtcatgactggccatctgacggcacgaagtgatgtttatggcttcggagtggtgcttctagagatgattatcggaagaagggctgtggacaagagccggccaagccgtgagcataacctagttgactgggcacggcccctcctcgtccataacaggaagctgttccgaataatcgatccgagaatggaagggcaatactccaccaaggctgccactgaggtggcaagccttgcataccgctgcctgagccagaaccccaagggacgaccaaccatgagccaagtcgtcgagacctttgaggccgtgcagaacatgcctgaatgccaagacatactcctccagaacagcatcacaggtgccgtgacgctctatgaggtccccaaggagcctgcagacagagttgagctggagaaggccaagcaggaaccggcagtaaagagcgccgcgatgccgcccatgaacggaaagccagtcccccagagcaggcggacgcggcctgggaatggccggagcaagagcgagccatcgttggagtgcaagatgtacatcccgtcaccggactctgatggacaccagctcggcctggaggcagtcgcatccccagatggaagcataagggaccctcctgatgaggatttgtacaagatataacaccagggcagtttttcttcaacaacgaggggcagatctggcgcagtgttgagttgtgggttttcaaaccagcctcttcgcatttagggaggaagatttgcatctgtttatctctttctcatacctcatttacgtgggagcctcgatctgcctttttaacgtgagcccgcgttgctcacctttggcgccgccactcccgttcttaaagatcaatcagctgtaattttttctctgatggccactggccacggtagcgttcatattcttccgattagcaattgtatgtagaggagagttgtgatggaaagcatgtgtgtgtttgccatgacgacgctgtaaaaacctgaaacacttatttctaggggggtttccactccaaaatggaagtggagagatgtgtcctgat

SEQ ID NO: 33781 - DNA, 2371 bp, Zea mays
  Clone ID: UC-ZMFLMO17169C08_FLI
cgcaactgcaagcaaccactgatccagcccgttctatgtcccggcgaatggtgacgaaccaggacgcggaggcggcagcgccaggggcaggggcggcggtagatccgatgcggctagcatcgcggtggcggcgatcccggccagagtggaactgcgcgtcggcggagctggaggctgagccgtccgagctcaacaccgtcaacagctcgggactcttctccgtcgtctctaccgacaagttatcggtaaaatacctcggcagccatcaccacggccacgacgtcggtgtcgtgcaggccgaccgtcccgcgccgacgcgccgagccgtgtactacttcgagatgggcgtcaggaatgctggatacaaggggcagacatccattgggttcacgagcgagagcttcaagatgaggcgacaaccgggctgggagacaaacagttgtggataccatggtgacgacggccatctttatcggggtcaagggaaaggtgaatcatttgggccaaaattcacatctggtgacataattggtgctggcatcaactacttgtcacaagaatttttcttcacgaaaaatggtactctggttggagccattccaaaagaaattaaaggcccactatatcctaccattgcagttcatagttacggtgaagagttgactgtaaactttggaaaagaaccattctgttttgacgttgagggttatattcttgaggacaaaatgaggcagcaatcagtgtctgataaattgaacttggagccagacatcagccattggattgtccgttcatatctcctacattatggataccaagatacattaaatgcttttgatatggcaaatgcaaccgatcgccccaccagtcgccaaaatggtaatgcagaacctcccgaaatgtatggtcttagccatagaaaacttttgcgtcaggtgagcttggaaactcaattcaactgattgttgaattcatttctctggtatcttagttagcatctatgtgaactcagttggtacttcgtaaaagttacacagaatttttttcttcgaacagaaaatattgcatagaattacacttcatttttagtacagtttgacaattaggcaccagttcctaatgattattgcatgggaaacttcgtgtgaagtatctttattgttgttactgtttgttatgagggtaacctgacttttgttttttttactaccaaccaattaggtttgaagttctatatctttttaacttgattagaattttaaatttgcatgtgtttgagctcattagctgccgtttccattctcacaggaaagtgatagttgatctttgcgctgagctgccttgaagtttgagctcttttacctttggttgtgctgcgcgaatatgttgtagtattacatttgtccacatcattccactttattttgcagacaactggatattgatttgctattgccctgtttttttttggcctctggtatggcttctgctttctgaaaacagtttattttatttgataaagcttatcatgagtggagatattgactctacattcaaaagacttcgggagtggtatccgcaagtgataaaggatgagcaatcggttatttgcttcctactccgttctcaaagattcatagaatacatcagggctgaacaactggaggttgctgtgaaatatggtcgtgctaacctggcaagcttcttcacccacaaagcttttgaggggctgctgaaggatagtgtggccctacttgcgtatgagaagcctacagaatcatgcttgggatacctgatggactcttcccagcgtgaatttgtggcggacgcggtgaacgcggctgtcctgtcgacgaaccccactgtgaaggaccctgagagctgcctttactcgtgtctcgagaagctactaaagcagctcacagtatgtagctttgagcgacgtgcattcaacaactaccaaggagatgcattcttactccacaaagaagtgcagaattatgaaaggtctaggcgctcataggcatcgggtttgatgcgcatctcagaagtaaactcagatgctagactcccaagtctcaactgctctttgaagggacgaaggttcagaaccaagtggtcgaccatgctaagcacaaatccttccccttgatgcagcacccctactttcggaagtgtggatacaagatttcacagacagaggtcaggctttcggaaggtgtcttatcctccctgtaatcagaaaactcagtcagatacgccaacgtttcagtctccctagttttttttgttggttggctaatatgatgtttgacattgacattgtggatgctaaaaggtaaagatgcttcaatgtatgtccaccttttag

SEQ ID NO: 33782 - DNA, 1432 bp, Zea mays
  Clone ID: UC-ZMFLMO17169D04_FLI
atcagaaggatatgtgataaagatgcgagatggaaagaacttgcgttgtgtccatagtaattttcaagggagaaatattccagagagtgcaccacaacctgctattgttttgaggattgaagatggaagcggaactttactcccgatcattgttttggagatgccaagcgttcttctgatggcagctattcgtaatgtccacattgcacgtccgaccatatatcaagttgtcaaggaaatgattgataaaatgggttatgaggtaaaacttgttagggtaaacaaaagaattcaagaagcctactgtgctgaactttatttaacaaaggtcaatgatcctacagacaacatcaccttcgatcttcggccttcagatgccataaacattgctgttcgttgcaaggttcctgtacaagtccatagaagtcttgcatacagtgatgggattagaccagtcgagccagcaagaatggcagtagcagctggcctatcagatgggttgttatttacagagcttgacagacctgatggacagccatgtgtggaggctcaagagtttggactggtgaggaacatgctcattgcagctatcgaagagagatacaaggatgctggtaatgatacatctctactatattagagcatcagttttttcagttccactatcgttgtgctccccccacatttaaataataaaaatgttaaaattatgcacaaatagggtttcgaaccattgttgttggctttaaaccccacattcatacccatctagtcaacagaacaaacatgtctgtgtgttctatattgtatatttaagcataaatggaaatcgtaaacacatacgggcactttgctagttcttattgaccggctcaattcatccaggactccaggttgagcatctggtaatgattctacccagtgcagtattatcatatctgtctgaatgctgaacaagcatcacatctgtcttactttgcaaccatgttctgccaaggaacaaaagaagagtgatgtgcaagaagaaacgcattgatcttgaataataattatcattagtttaaacctagatgtggtagttgtattgaaggttcattgatttatctgttgacttgaacagcatcatggaaggacaaactgattcggctcaggtctaagcgggagaactgggcctgagagcgtcgcatgtctggatggtgtaaataaagatgacgctcagctgaattccagtatgcactccagacaattgatactgtttatggctctatgtaactagctgtacatattgtaactagctgtacatattgtacgtactatgctcaggtctcagctaaattcagactaagatttgaagtgaaaaactaatccttttgtaatcttggccgtattaatttgtatgttagtctgttaggttgaatgtttggcaaaaaac

SEQ ID NO: 33783 - DNA, 519 bp, Zea mays
  Clone ID: UC-ZMFLMO17169E03_FLI
tattcttccagttgttctagactgcaagcggtaaaatcctaacataacaatggacgagctattgcatgaaaactcgagtggaggtccttttaacgccatcatgtgaaaccatcttccgcaatgttgagatcaatgtgagaaggttcatgacagtcacgacagtgcagtcgttatttgtttatatattcaaccaaatagtttacagagctttttagttgcaacagaggcaaaatgtttccagcagactgctttcagagcctttagaactctgctggacaaacaatttgatcgttgaggtctgctgagccgacaaccgtatgcctcctgtaaaattctggtatttttttttaattttttttttgcatatgtgggcttacgtgggtgtaactgaaatttgaaagtaccgcttgcacagcaagaattgccggtgggggttgaaagtggtaaatgaatgtaactgtaaagcgttgttacatgaagacaaaaatttccacccgttgcaacatagtaaatgctgac

SEQ ID NO: 33784 - DNA, 1053 bp, Zea mays
  Clone ID: UC-ZMFLMO17169E11_FLI
tgagctactttgttttgatttatcaggaaatccgtttgcttcatgttatgcaggctcagatctgattgctggattcggcatcttacgggcttgaatagagctaggactgggagaaaacaacaaacccgcgttggatcctgtatcggttagtccttgccttcaaggttcatgttgttttgttttggtggtcgagcatcgcatgttctgcttctggttccagatctggagaaatttctaagtcgtcgtcgtcgtcgtcgttcggttcggagcggatctgaggcgacgatggctggaggcggcgggatctcttggtctgcagtcctgcttcacctcgatggatgatgtctctgcgctgataattattggatcaatttcgataattattagtagatctatgagatatgccgcctggaagaggcgaggtaagctgcagcatgtaaaagtctgcgtgcgtcgacagcaaaaaagagaaaaaaagatgtgacatcctagaggaggcctttgccatgatgggtgcgctcgcatggcaggccaggtattaataaaaagatgattattgtgtgccgggggaggagatcgcacgggggttgatgtttttggccccggggtctcctccctcatcttgttccgtgttcctgtatccgttgtttccgcgcctgttggtccgctgcgcacgccggatttttgcatcgagcacggagatctacaacaaaaacatggagctacgacgcgactcccaagcatgtttgaaccatagcaattggtggacgtgtgtagagaagattgcaaaactgcagtatgatggattccactattcatcaaccgagatcatggcgcgcttcaatcgtggctacgctgatggggaattgatccgttatggctcgtggctgtggagatgtggaactcattggttatagtgtgcttcaatcatgggtcatggcgatgctgatggaactgatttgttaccaaggtttaagttttcgctaccgttggacggcctgactggtactttgccctgttgactgtttgagaacgtactgcccaggtttactt

SEQ ID NO: 33785 - DNA, 954 bp, Zea mays
  Clone ID: UC-ZMFLMO17169E12_FLI
ctcgcgatctacgctcgtgctcccctctcgtccgccgccagcacccccgcgccgccatggccacggactcctccgccggctcgttccagaagatccagatccagcgcgaggacaccacttttgatgcttatgttgttggcaaagaaaatgctcctggaattgtggttttgcaagagtggtggggagttgactatgagataaagaaccatgcgatccacatttcccaacttggtggaggatacaaagcactcattccagatttataccgtggaaaagttgctctggatgttgctgaggcacaacatctgatggagggtcttgactggcagggtgcagtcaaggatatccaggcttcagttaaatggctgaagtcaaatggatcacccaaggttggtgttactggctattgcatgggaggtgctttatcaattgcaagtggagttttagtcccagaggttgatgctgttgttgctttctatgggacaccatcttctgagcttgctgatccttctaaggctaaggctcctatacaggctcatttcggggagcatgacagttttgttggtttttcagatgtcactgcagccaagtccctggaggagaagctcaaatcttccgggataccatatgaagttcacatataccctggatgttcgcatgccttcatgaacacttcgcctgaggcactcaagaggaagaaggggatgggtctgactgatgagaaccaggaagccgtcgacctggcctggtctcgcttctcttcttggatgggccggttcctcggatctgcttgattatgtgccgcgtgatgatgtgtggagtcaggtcccatgaataaaatagaataaaataaaatgttcagattcaggaaccatgcaaatggactgggctgtacggttctctggatttgcttgtccttctgtttatagttatctacctcagtgtggtttcctt

SEQ ID NO: 33786 - DNA, 1490 bp, Zea mays
  Clone ID: UC-ZMFLMO17169F02_FLI
cacgattcacgccgcacgccccgacgccccgacgcccgcagccccgcatccgcacttccgcaggccgcagcgcacaggagtcccgatctcgactcccgactcgaactcgacgactcccagtcccagttcctctcgtccgcaaccgcaaaatccaagaccctggccgccggagccgaactgccccgcgcctcgggccctgcccgatttgtgtgctttgcggcctgtgggcatgctagccagccggcggcggcaccggagtccatagcagcaaccacgcggctacgagctacgacgggctggctaaggcgcaggttgagcgctgaaggctacccagctgtggtctcacgcgggtggccggtgagagcagccaagcggcaggtgcgctggacgctggacgaaccctaccacgcgcaccgtcacgttgtgaattgaatcactctctgttgatgggcagcctgagcgctccgccagtgctgtcgccgctcgtttctgggctcatcttttcatctgacagagtcctcaaatctagagggttaactaccagtagcgtgatgaagtcatgtaggctatccgagctcagcaatgctgaggttagcagcctcaaggctcgtcctcgcatcgattcctcgtccatgtccatatttggcacggtgaatccaattgttgagggtgtctgtgtcagaggtgatgcagcagataagcagtaccaggtgaaaaactgcagatggaggccaacttttgccttggagactgatgggccatctaacactgatggccaagactttgatgaggacagtggttttcttggtaggactagactgggaagactcatccaagctgctgcaagggagctacttgacaagctgaactctgcgagaaccaattcgccaacaaagatattccttgtcctccttggtttttacacagccaatgccttggcaacaatactagggcagaccggtgactgggatgttcttgttgctggtgttgtagtggctgccattgagggaattggcatgctcatgtacagaaaaccaattgccaggcctcctggtaggttccaatctttgatttcaatggtgaactactggaaagccggtgtatgcctgggcctttttgtggatgccttcaagctgggtagctgagtttatacaatcatctgctgctatctgcctatggtaattttttgggtatattgggatcacaataacgccatgatatggttccatgatggccattgctcgttgctcgaattctaatagctgcatttggctctaattctgggagcattggctgctgaggtatcagatttcttcaaagttaatgaagatgtttggagcagatattattctgaggtgactattcatttttccataatcgaaggccatgtttgtcaaccattgtttggcccgtaaactgtagatatgctgtagtttttccacctccatgtcatttagccctaatatgcatttatgcgtactgagagaagt

SEQ ID NO: 33787 - DNA, 951 bp, Zea mays
  Clone ID: UC-ZMFLMO17169F05_FLI
cgcgaagttaagccaccatgtggacgagggctttagcgacggtgctgctgttcgtggcaggcgccgcgctgctcggcgtcggcggcgccagcgcgcagcagggcgtgtggagcatcatcactcgtcccatgttccagagcatgctgagccaccgcggcgacagcgggtgccagggcgccttctacacctacgacgcgttcatcgaggccgccagcaagttccccggcttcggcaccaccggcgacgagcagacgcgcaggcgggagctcgccgccttcttcggccagacgtcccacgaaaccaccggtggatgggcgactgctcctggtggaccgtttgcctggggatactgccgggtgaaggaacagaacccgacggacccaccctactatggacgaggacccatacagctaactcatgagtacaactacaggctcgccgggcaagcgctgaacctgaacctggtgggcaacccggacctggtggcgagcgaccccgtggtagccttcaagacggccatctggttctggatgacgccgcagtcgcccaagccgtcgtgccacgccgtgatgaccggcgcctggacgccgtccgccaccgaccgcgccgccgggaggctccccggatatggcctcacctcgaacatcatcaacggcgggctagagtgcggcaagggccagtccaccgacggcgccaaggaccgggtcggctactacaagaggtactgcgatatgctccgggtggggtacggggacaacgtgccctgcaaggaccagaagccttacggaggatgaggacgtggacaacaataattatatggttgctgcaagccttcacgtgtttttgttgcctctctaccaactaagaataaatcaagctagcagcaaacaggggcaacctgctaccttcggcatgtgtctacttatcatatagtgtgtctatgtatggcac

SEQ ID NO: 33788 - DNA, 1110 bp, Zea mays
  Clone ID: UC-ZMFLMO17169F07_FLI
gaccttccagtcttctccgtaggggcttcgctccatagatttcgccgcaaggggcaacggcacaccccaactgacctgacccacgagggatccgcagatgaagatcattccggtcccttgcctggatgacaactatgcctacttaatcgtggacgagagcaccaagaaagcagcggccgttgaccctgtggaaccggagaaggttctcaaggcggccggcgaggtcggcgcctacgtcgactgcgttctcaccacccatcaccactgggatcatgctggtggcaatgagaagatgaggctgcaggtgccagggataaaggtatttggaggatccctggacaatgtgaaaggctgcactgatcaggtggagaatggaatgaagttgtcacttgggaaggacattgagatactatgcctacacacgccttgccacactaaaggtcatatcagctactatgttactagtaaggagggtgaagatccagcggtcttcaccggagataccttgttcattgctgggtgtgggaagttttttgagggttctgcagagcaaatgtatcagtcccttattgttacactgggttcgctgccaaagtcaacccgagtttactgtgggcatgagtacactgtgaagaacctaaaattcatgctgacactggagccagagaatgagaagacgaaacagaaactggaatgggctgaaaagcagcgcgaagcgaatcagccaacagtgccctcgactataggagacgagtttgagataaatactttcatgcgtgttgatctaccagaaatacaggcgaaattcagtgtcaactctccagttgaagcaatgagagaggtcaggaagaccaaggataactggagaggttgaggacacccatggccgccactagtctgttgaaccagcattccaaagtgaactaatgctgaaaccttgccctgtaggtgggaatgaggtttactgccgtgcaatgctttgagaaatgtgttgttgtgaaggagaagactcctacaataagctccgcgttaatgagtagtaacaatacgctccttgtaacttgtggtctgtttgccaataataatgtacggactgtagtgcctatcttg

SEQ ID NO: 33789 - DNA, 1077 bp, Zea mays
  Clone ID: UC-ZMFLMO17169F08_FLI
cgctccttgatccactcctcctgcagctcctctccccagcctccctctctttctctgtccttggtcctctccccagcagcctccctctctttctctatccttggtcctctccagataacctgacgcagtggtcacgcttgacaaggagagagaaaggcgttgcagcagctgatccgcgcccgcccggccgggagcgcgcgcaggcgaaggatggaacaatacgacgggctctttcctcccgcctacgtggacgactcctcatccctcctcctggtgcccaacgccaacggcactgcgcaggaggagagaccgcgagcgaggcgcaggaggcgtcgagcagcgaggtgcggcggcggcggtggcgagctggacggaggaggggaccacaagaagcggcggctgaccgacgagcaggtagagatgctggagctgagcttccgggaggagcggaagctggagaccggccggaaggtgcacctggccgccgagctcgggctcgaccccaagcaggtcgccgtctggttccagaaccgccgcgcccgccacaagagcaagctgctcgaggaggagttcgccaagctcaagcaggcacacgacgccgccatcctccacaaatgccaccttgagaacgaggtgatgaggctgaaggacaagctggtgctcgccgaggaggagctgacgcgtttcagatccgcgggcaaccacgcggtctccggtgatggcggagacgtcatggcccgtgccgtctgcagcggtagcccgagctcatcgttctcgactggcacctgccagcagcccggaggaggcggcggcggcggcggcgatcacctgggggacgacgacctgctctatgttcctgactatgcctacgctgacagcagcgtggtcgagtggtttagcctgtatggactgatgtaatcgatggtatgccatcgtcgtcggcagattaattctagctagctactcatcgtagcgtgtcattgctgtgctgaattgctgatttctatgtgcgccctcttaatcatatgtacataaatcaagctatcaattactggcaaaatatagccagctagcagc

SEQ ID NO: 33790 - DNA, 2462 bp, Zea mays
  Clone ID: UC-ZMFLMO17169F10_FLI
atggttttgcctggtgtggttggattcaagttgagtgggaagttacaggatggtgtcactactactgacattgttcttactatgacccaaatgctaaggaagcacggtgctattggcaaattcgttgaattctatggtgttggtgtgggcgagctatctttgcctgctagggccacaattgccaacatgtctccagaatatggagctaccatgggcttcttccctgtagaccaagtagcattggactatctcaaattgacaggccgaagcgatgaaactgtacatttcactatgtgcagactactcttttaccatacccgttccatcattctgatatgtatatatttttattaataaagcaaagttgtatatattgcattaaatgtgattcaggtgtcgatgattgaagcatacctgcgagctaacaaaatgtttgtggacaagcatgagcctgagacggaacgagttttctcttcatatctggagctggaccttagtgaggtggagccttgcgtttcaggccccaaaaggcctcatgatcgtgtccctttgaaggaaatgaagtcagactggcatgcttgcctggacaacgaagttggtttcaagggctatgcggtgccaaaggaacagcaaggcaaagttgtgaaattcgacttccatggaaggccagctgaaatcaagcatggcagtgttgttcttgcagcaatatgtagctccacaaacacatcaaatcccagcgtcatgattggtgctggccttgtggcaaagaaagcctgcgaattgggccttgaggtgaagccatgggccttacccctggatctgtggttgctaccgagtacttgaaacatagtggccttcaagattatctgaaccagcaagggttccatgtcgctgcgcatggctgcgccacttgtgtgggcaactctggtgacctggatggatctgtatccgctgctatcacagaaaatgatatcgttgctgctgcggtgctgtcggccaaccgaaacttcgaggggcgtgtgaaccctctcactcgggctaactaccttgcctcgccgcctctggttgttgcctatgctcttgccggcactgttgacattggttttgaggaagagcccattggagttggaaagggtggcaaggaaattttcttgagggacatatggccttcaaaccaagagatcgatgaggttgtggagtccagcgtgcagactcacttgttcaagaaagtgtacgactccatcatggaacgtaaccctaggtggaaccagctgccggttccaaaggaggcactgtacccatgggacgacaggtccacctacatccgcaagcccacttacctggagggcatgtccatgacgccgcctggcccgcccacggtgacggaggcctactgcctgctcaaccttggagacagcatcaccacggaccacatctcctactcggggaagatccccgagggcacacctgcggccaagtatctgctcgagtatggtgtggagcccaagaacttcagctcctatggtggccgccgcgggaacaatgaggtggtgatgaggggagcgtttgccaatatgaggatcgtgaataagcttcttaatggcgaggctggtccctggacgatccatgttcctaccggggagaagctctacgtttacgacgcggcaatgaaatacaagtcggaaggtcatgacatggtcatcatcgctggctccgagtacggcagtggcagctctcgtgactctgctgccaagggaccaatgctactgggtgtcaagtcggtgattgcaaagagcttcgagcggatccaccggagcaacttggtggggatggggatcattcctctctgctttcaagcaggagaggatgccgattcactcggcctcaccggacgtgagcgctacaccatccacctccctaccagcaccgccgagatcagtcctggtcaggacgtgaccgtcacgacccacgacggaagatcattcacttgcactcttcgcttggacacacagcttgaggtcacatacttcaaccatggaggcatccttccctacatggtccgcaacctggcggcacaaatgaaataagttgaagtttattggtgggaataaattaaaaggtactcaatgccacgtatttggcgtatgtatgtaaataagtggcacattctaatcttcaattgtattattcgctctggcattgaggtgggtcgtagctgcattatactttctccgcaagacatgagcatggattttgttttagcaacagattatttgtactcttgattctttggttccatgctctcttcggccatctccatgtcaatttgctttgcaaacaatataatatcagcgtgccgtgcccttgtagatttccaaatggttatatgcatatgtactattgaaattgtcattttagtttgcaaacaataccaacgtgcctttgtagatttcaaaatggat

SEQ ID NO: 33791 - DNA, 475 bp, Zea mays
  Clone ID: UC-ZMFLMO17169G04_FLI
gtcagaagatttcagttcagggcgaatgcttgtatatgtggcagcaggtgttgtgctgggcatgctgagttcgatgttcattacggccttattcagaggtatgtatgggttgttgctcgctgccgccaggtgggctgtgaggaagcattgcatcagagtatttgccagccggttgaagcgtgcctgccttcttgtcgcctatgtatccgctgttggctggatcaccttgcagtacagcaaatttatcgggttgaaagaactcttgtcggattctgaagtcatggagaggttcttttaggctgtagatgtattcgccggtgtatattgtacttgtaataccattcgggtatttaggaaggtttcttcttcttctttttgatgtgaaaccaatgctctgttgtacgagtatgtacatgccagttgccagctacactgctgctctgtcacaaacgtgttgttcatgccacattttatc

SEQ ID NO: 33792 - DNA, 1907 bp, Zea mays
  Clone ID: UC-ZMFLMO17169G05_FLI
gcaatgaggatttagtggttgttcatgatgctcttgagtttggacattgtcgtttgtcccttgcggtacctaaggaaggcatttttgagaacatacatactatggaagatttgctaaagatgtctgaatggacagaagaaaggccactacgtgttgttactggatttggatatctaggcgataagttcttaagagagaaaggttttaagcatgttcgttttttatctgccgatggagctcttgagtcatatcctcctgtgagtctgcttcctctccatttgttttccttctgttttccttgtgatcccctcccttttttttgcttcatgtatctattttaaatttgattggcccaatagtgcaggctacccttttctgttccccaacagtacttaaatttagatctttagagaatctgtaagtgctaattaattgttttattatatgttggtcattgctttatccagaaattattacgccacatagaattatgtgtactattgtccctgctatacttgtttacgttcttgctctagtagttatgattgctggcacgaattctgtatgggttatatatatatatataaaacccggtctgcaggggtaagaccaccccactgcattatattaagaagaagaccttctcacgcatgtcgagaaaacccccaaagccttgcaccacttatacacaacggcaccgtaacccatgtgaaaacgaccagggccgggccttagacctgtgctttggcgtgggacagacgagtggatttttatatgactgatatagattatgggtgtctgagctttaacccttcacatggatcgatttgtttatttactttaggtgccactggaatgtacactggtgtctttttttactagcttgcgagttgttgcgtaaagaggctatcaaggttaattcatgttgctaatttcctcccccctgtgaagatgggtatggctgatgctattgtggatctcgtgagtagcggaacgaccttgcgtgagaataacctaaaggaaattgatggtggagtagttctggaaagccaggtaaactttctcgaacacacatgcatgtgtcgggcacacactcttcagtaggcaatatttcacagttggtggttcctttgtcaaagagaaaagtttacccctttcctgtttcctaagatataaaattctatgcaggccactcttgtagcaagtaggaaatctctgcacaagcgtaaaggtgtgctggaggttactcatgagttgcttgaaagattagaagctcacctaagagcaactgcagaattaatggtcaccgcaaacatgaggggcaacagcgcagaagaagtggcagagagagttcttagccaaacatctatatggggattgcagggcccgactgtaagtcctgtctatcgcagacgtgatggaaaagttgatgtggaatactatgccattaatgtggttgttccacagaagttgctttacaaatctatccaacaactgagatcaattggtggcagtggagtcttggtaacaaagctgacctacatattcgacgaggagacgccaaggtggcgcaatctcctctcggagctggggttgtaacttgggcgcatggccaacttcgggtctcttctactagttcccatatgtactgcaccacattcgtttgtcagtgccgaagcatgtaaaccgatatgcagaagtgagaccgtgtggtatcttttgtgtacctcttcgcttcaggaaattttggcctgtatcttgaccgtctgagatgtattgatagagttggggaatgctgttgggttgggcgtgtgtgtacctcttctgcggttgtgcctgacttctcttgccggggcactgaataatcggccatgtttgaataaagaaagccggtgtggttctcattc

SEQ ID NO: 33793 - DNA, 1491 bp, Zea mays
  Clone ID: UC-ZMFLMO17169G08_FLI
agatccattcctgtcccgtgtttaccttcacccagcggcgctgcccccgtcgtcgtcttcccgcacgcttccgagcgccgccctccccagccccagccgtccccttctttccccatcgcctcgcttgcactccctctcatctccgtctcccgcgccgacgacctaagtagggtttggccttagggttcaggcaagatgggtgagcgcaaggtgctgaacaagtattacccgccggacttcgacccgtcgaagatcccgcggcggcggcagcccaagaaccagcagatcaaggtgcgcatgatgctccccatgagcatccagtgcggtacctgcgggacatacatatacaagggcactaagttcaactccagaaaggaggacgtcgtcggagagacatacttgggaatacaaatatttaggttttacttcaagtgcactaaatgctctgctgagatcacattcaaaacggaccctcagaattctgactacacagtggaatcgggggctagtcgcaattttgaaccatggcgtgcacaggacgaggcagcagacaaagaaaagattaaacgagatgctgaggagatgggtgatgcaatgaaagcgttggaaaatagagcaatggattcaaagcaggatatggacatccttgcagctttggaagagatgcggtccatgaagtctagacatgctggtgtctctgttgaccagatgcttgaaattttgaagcgttcagctcacgagaaggaggaaaaagcaattgcagagcttgatgaagaagatgaggaacttataaaatcaatcactttccgaaactctggattctatgtaaagcggatagaagatgacgacgacgatgatgaggatttggctcctggccaatcgagtagaacaataaagatcaatgaatcttctgaatctgtgactaagccaacagatgttttaagcaaaactaacggatcagaggttgccaataaagaagggagcaagagctggatgcccaaatttattgtgaaaccgaagtctgcaagcgcagatcctcataagagacagaagatcgaatccacggctgtccaagacaccggaaaaggccaagatgatgaacaaaaaagtgaacctgcgaagcaaaccaatgttctccagtccctctgccagaactacgatagtgatgatagtgaatgaatgaggacaccgccctcttgaagccataacagtcctggttgccaatgctgtattataccagaggatgttaacacatgtagttccccaaaccactggtattgtgccatcatggcacatgatatttatcacaaatctctgattgtcaatgggccaactacaagtattggctcttacaaatatgggctatccagatagagctgcgttattggataaaaatgatagttgcagaaagtcagatctgcggtttgtacatcaaacagccatacacaagcttgtttatgcagcatcactgaattaatcattgtttgtttg

SEQ ID NO: 33794 - DNA, 918 bp, Zea mays
  Clone ID: UC-ZMFLMO17169G09_FLI
caacaattattgtattactgttgcacatgatcctatggtatgtgaggaatctcaaaaaagttactgcattgttgattcctaagtacaaggtactcattgcatctttaatgcacaattggtacatcctgtaacagctgctgtgctgcaatgtgcatttttgcctttatgttgtgccatacactagtttctggaaaaaagaatctaaaccataatgttgtgccagaaattatctcctgatatgcctctccagctggcatcagacacaattttacggacactgagggcccgagtgcaccatcatcgtcaaggacaggtgaacatatttttttgggtgaagttttattttggtattgaacagttgaacggcattgtggatcattgcctagacctaactgagtttgtttcaggttaagcttatgagagatgctgtcttaccagttgaatttctttgctcctatatgatcctttgcatgttttagatagtccataatctatcacgtgcgacaaacctggacgtgcggttgacaagactggaggagagatcgaggcatgtgcagctaaccgatgagagtatctgcgactcctgtcgagctcgcctcggcaccaagctatttgctatgtacccaaatgactcggttgtttgctacaggtgctatcgatcccagcaaggtgaatcttcatcagggcatggtcgtagcatgaggaaagatgttatattcaaacagagctggcttgtaagtagatagatagcgaggaaggaatgaagagtggtgatcttgaggccagcatttggctgtggctgctctgaaatgggcaccaagtttttttgtctggatgggctctctggaaacttgaacagggtgttgtatattctttttgaggccaatgaatgaatatatacaaatacaagcatacagc

SEQ ID NO: 33795 - DNA, 482 bp, Zea mays
  Clone ID: UC-ZMFLMO17169G10_FLI
caattcgggagatactttgcacgagggccagtggaaagagatgattacgcgctagaacttgcaatgggagacgaatgagctgtgcctaagagaccttgccatctaaaatttgaataccatctcaaatttggacccatgtagttctgagtatgccggttatctttttgtggctccaaatctcactctcagccttctttccttcggctgttagcgtttagagtgacaaggacacttcctgagaggaggaataaagttctgctctgctctctattttccaggttgcccccttcccgcctttccttgttcggttgtcacttattagcctggtgcgtggctgcgtgcagttctcgtttctcctctaatagatggcacacgttatgaagtgtgtaaaggtgtcaaaatccaaaaacatccagcattcacaatctttgtcgtgatgaagtgtgtaaacttgtaaaaaattatccaaaatctttaccatg

SEQ ID NO: 33796 - DNA, 2724 bp, Zea mays
  Clone ID: UC-ZMFLMO17169G11_FLI
cgcagggcatgtcgtcctgagcagtgagcactgggcaggacacggatgaaggagcggaagccggcatcctcctcctccgctctggtccggatcctcgcggtctgcgcgtcccaggcaaaagattatgggagatgcatagcagcaaaggtccctgagattgaacataatatgtgttccaaggagtttctagcactcagagcatgcatgcagactgtggttaagaacaaggcttgaggctccatatttataggaagtttgatactaatctcttttggtaattgctgcggatttttgatccttttctatttttcagtcatcttaaaaagtagaacctcattttcttggctaaacaatcagtagagcctaagcacgcaagagacaaagaaaatgttgggcaatcagatacaagggggcttgggcacatctggggcactgtctcatgcttatgttcagcatcctccgctgcgatgtgacataccagacactcagggtctgttctatgatgatgcaaataagttccttatagctccaactgctgatcggatattgtactggaaaacaattctacctactccatctggacctccaaactctgatccagttaatgaaggacctgtcttgtcagttcgatattcgctggatcataaagttattgggattcaacgatccagacatgaaattgagtttagaaatagggaaacaggggagacttgtagcaaaaagtgcagagctgattcagaaactgtacttggctttttctggacagattgcccaacatgtgatgttatacttgtaaaaacaagtggtcttgatcttcttgcctacgagcctcagccccatgcttttcacttggtggaatcgaagaagttcaatgtgagctggtatctttacacacatgaaagtaggctgattctacttgcttctggaatgcaatgcacgatgtttactggctatcagttttctgctggtgggattgtcaaaataccgaagtttgagatgatgatgtctaaaagtgaagcaaacaacaagcctgttctagctgcagatgatgtttacattgtaacagtctatggtaggatttattgcttgcagcttgacagagttagtatgtcattgaatctatatcgcttttaccgtgatgctgttgtacaacagtgtactctgccaacatactcaagcagaattgcagttagtgccgttgacaacataattatggttcaccaaatagatgcaaaagtagtcatgctttacgatgtgtccctggattcttatgccccagtttctgcaccacttccactgctattgagaggactgcccatcaatagtagacaagtatctcagactgcggatagccagtctagtgcatacggtggaaccatctatggagaaggttggaacttcctcattccagacctcatctgtgatgctgagaatgggctcttatggaagctccatttagatctggcggctattgctgctagtagttctgatgctccttcaattttggaattccttcagagacgaaagtctgacccaagcatggttaagactctatgcctagctatagttcggacaatcatcctggaaaggaggtcagtgcccacagttgctaaggcgatggatgttgtccttgattcctacacgcgtttgatgaaaatgggaggggcttttcctggggttaggcgaatacatgagcaaaatcagcagtcaggtagtcagcctattgatggctcccatgtggtttctcaggaatccagtcctggaacaacagttagtcctgctgtgaacccagaccacggaagtgaggctgtggatatatatgtgcagtcaaatccaggagttgagcatacaatagacaggggattactaaatataaacatatcttctgattctgtggacaatacatctgatgctgtcgacaaacgacagcaagctgtaggcgaagctagccgaccattgtcttcaggcacaatgacgcaacatggacaacatgctggaaccgtggcaatttctccaattgagatgttccagtctgtctttacacttgttgaagatgaaatgatgggtgatcctgcatatcttattgctgtcatcatagagtttctacggagtgtctcaaaggctgggcttaaggctcctcacaacctttatgtgatgacggcgacactactagctcgtagcaaccgttacgctgaaatagcattgtttgtgtcaaacaagattcttgagccgtgtaaagaactggcaatgcaacttatggagctgggtctgcagcacccgccaacgaggaagctgggcatggacatgctgagggagcgaggcctgcatcacgactacgtgactgcgatgctgcaagatgggtactacttggaggccctgcgctatgccagaaaatacaaggtgatcaccgtgcagcctgccctatttctggagaaagccctggcgaagaacagcgcccacaacctggctgcagtgctgagcttcttctgcgagttcactccgagcttcaaggccacatcggactttgtcagataccggcatattctgtctgaaatggtttgaacagctttccgttgtgcaaacttgttgtcccgaaatgacttggcacgtcctctgtaacaagcaacgtcacctcggagggtacttttatttaattcttttggtccctcttgcagaaaataatattttattgttgtgaataaaaaaacgttgcaattaccgatg

SEQ ID NO: 33797 - DNA, 1161 bp, Zea mays
  Clone ID: UC-ZMFLMO17169H06_FLI
cagtgctgtgctgtgcacgccaaccacaaccgaaagggagagccgaagagggaagggggagaagcgaccgcgccgccaaaccctagccccgcgcacgcgaccgcgggggagctccactccgccgctccgccccccgtccccgcttcgcgacatggtactcaaggtccccttcatacagcagggggcacccaaaagggaggtcaagatcacaatctccagctcggtctcagtctaggtcacctgtcccagatcctagatctcaggcgaggtcaaggtctagaagccaagagagggaggaggatgctgttaaccgtgggaatactctgtatgtgactgggctctcttcgagggttactgaaagggatgttaaggattatttttctaagcatggaagggtggttggttgccatgttgttcttgaaccccatacacgtgtttcccgtggatttgcctttgtcagcatggacactgttgaagaagcggagcgttgcataaagtatcttaatggttctgtaatggaaggtcgaaacatcacagttgaaaagtcacgccgtggtcgcccaaggacaccaactcctggaagctatcttggccatcggtatgagcgcagggagcgtgggaggttccatagaggctatggtggtgggcgtgatgagtattacggcaatggcggcggcgggtatggctaccgcaggtctccgcctcccatgtactcttcatacagggagagtcgggattattatccctcctacaaggacagccgggactaccctccctacagggacggcagggactactctcctccccacagggaccctcgggactactacgaaagcaggggtggccggggctactcgccgcctccttatggtggtggtaggtcgaggagggaccgatcggtttcaccgtatcggatgccagaaaggggctacggtggaggccgccgggtgggtggcggtggatatgacaggtaatgtagaggttttctctccgccggtggctgctgctgcgatggctgtgtatggctctcgcagctccggtgatatggttagactgctgcctgtagctgtgtacttggtgtactgtcttcccgcgtatgtggatttggtgaaaacttctgtatgagcaccttttatttgtagcctgcaatgattccttctt

SEQ ID NO: 33798 - DNA, 1327 bp, Zea mays
  Clone ID: UC-ZMFLMO17169H07_FLI
tatggaactaaagaaagtacatacacaatgaaatctcaaggagaaagcacatcctacagctacttattgtatagttcaggaaaaattcatcatgttgtcatcggacctcttgaagataacactatttattactaccgatgtggagggcagggtccagaattccaatttaagaccccgccctcccaatttcctttgtcattggctgttgttggtgatcttggtcagactagttggacaacatcaaccctgaatcacatcaagcagtgtgagcatgatatgcttttactccctggtgatctatcttatgctgattatatgcaacacttgtgggattccttcggcacattggtggagccacttgctagcaaccggccttggatggtgacagaaggcaaccatgagaaggagcacattccattttttgagtcaggatttcaatcttataatgcacgatggaaaatgccttatgaagagagcggatctagatcaaatttgtactactcttttgaagttgctggtgcacacatcataatgctaggttcatacacagattatgatgatagctcagatcagtatgcttggctaaaggctgatcttgccaaggttgatagaaagaggacaccctggctcattgtgttgttgcacgtaccatggtacaatagcaattgggctcatcagggtgaaggcgacagtatgatggcttcaatggagcctttgctgtacgctgctcatgtggatatggtaatagcaggtcatgtccatgcttatgaacgtgcggagcgagtctacaattccagacctgatccttgtggcgctgtccacataactatcggcgacggtgggaaccgtgaaggcttggcccgcaggtaccgtaacccgaagccagcgtggtcggtcttcagggaagcgagctttgggcacggcgagctaaagatcgtgaactccacccatgcccactggacctggcacagaaacgacgacgaagagccggtgagaaccgatgacgtgtggataaactctcttgctggttcagggtgcatccaggagggcagccgtgaccgtgagtcgaggaagatcctgatgtctccttgatgcttagcagtatagcttgggcctgcgatgtactgtgtatataatgcgtgctacttgataatctaacacctagtaaaagttaatgcgtcgtgctgcttgcctgcgtgtatactggagactggtttgatctggcgcgtttgctgctcttgttgtgttgtaccactatggatgtttgtagcaaagtgacatacgacggtgttgtaatggactgaagatgaatagatgatgttccagt

SEQ ID NO: 33799 - DNA, 1784 bp, Zea mays
  Clone ID: UC-ZMFLMO17169H11_FLI
gtgccgctgcgagcagactggaataagcctcgccccgttctcgctacaccgtggagttggatcgttcaattcaggactaactgtgaggcttggtctttgtcggatttgagtttcgttgcgtgtctctctcttccttgctgtaggctgcggatatcaaggtgcttgggtctctcagcagggacgacctcaggaagctgtgcggtgataacttcccggagtggatatccttcccgcagtttgagcaggttaaatggttgaacaagcatctgagcaaactttggccttttgttgtagaagctgcaacagtagtggttaaggaatccgttgaaccactgctagatgattaccggcctccaggaataaaatctttgaagttcagcaaattttctcttggaaatgtgtcaccaaagatagaaggtattcgtattcaaaatcttcaaccaggccaaatcatcatggatatagatttccgttggggtggtaatccaagcataatcctagctgttgatgctgtagttgcatcactgccaattcagctcaaggatcttcaggtctatactgtcatacgtgttatatttcaactgtctgaagacatcccttgcatttctgctgttgttgtggctctccttgctgatccagagccaaaaattcagtacaccctgaaggccattggaggaagcctaactgcagttcctggactttctgacatgattgatgacactgtcgattcaattgtttctgatatgctcttgtggccacacaggcatgttgttaaacttggtgtcaatgttgatacgagtgacttggagcttaaacctcagggaagactttctgttactgtggtaaaagcaacttctttgagaaataaggagatgatcggtaaatcagacccttatgtgaaactgtatgtgcggcctatgtttaaggtcaaaacaaaagtcatagatgatgacctgaatccggaatggaatgaaacatttgacttgattgtcgaagacaaagaaacccaatctgttatttttgaggtttacgacgaagacaaacttcagcaagacaagagactaggtgtggcaaaactagcagtaaacactcttgaatctgagattacccaagacgccactctgaagctgctacattcactggatccaattaaaaataaggacaccaaggataggggcacattacatcttaaggtaaagtaccacccctttacaaaggaagagcagctggaagccctagagatggaaaaacaagccatagaggagaggaagcgtctgaaggaggctgggataattggtagcacaatggatgctgttggttctggtgttggatttgtgggtactggcattggcgctggcctcggtttcgttggttcaggaattggtgctggcgcaggccttgttacctctggtattggtgctgtcagcagtggccttggtaaagccgggaagttcatgggcaggactgtgacagggcctttcagcatgtcccgcaagaacggcagcagctctactgctccccagcatgatcaaccttcggcgtagtatgatgtacagtgaaagacaattgtcatatttgtgacagggttgccattctactctgtatacgtgctatacctaggactatacgtagcacttcgtttttgtttctgccactgcctggtgcctggttatatgaaatatgttttcgtcgttgtattgaaacgaggatctttcaaagtaaagattgctgtaaattgcatcagctttcccgaactatatgaaatttgtgcagtctgttgaagt

SEQ ID NO: 33800 - DNA, 1970 bp, Zea mays
  Clone ID: UC-ZMFLMO17169H12_FLI
gtcgtcttagttaagttactgattgcatgatgacaaagatgttttgattgtggtaattaggattaaatcattgcacttcaaggtttgactaattttcaaatactttacaaagcatagaccatagagaatgtgttgtaatgttataactcctgttgatcttcagccataagttcctatcattgatccaacatgtccttatccctttttcacttcttttgcttttatgtgttgacagaggctaaaatcatatatgcatgggttcaatatgtagctgggtctatccaaacatttttggtgcttgaataacgtgcagctgaatgctggaagctttataattatttttgtaaccaatttgaacgcaatagaacaattctgattgaatagcaccagcgtgctgattatcatcatattagtgctcaagctagaagggtttttatcggcagcatttaattcacaggtggagcgggaaacttttcgcatggacctttaagcaataatgcaatgcatagggctttttacatatttagaaatggcacctgttgaaccttacttcgaatatggtacaggtgttctaaagtgcagtgtttcaatatggttgcttgcatgattaggcccctttataaatctgatcatggtactgtactaattcctatcctcttccagatatctctctgagaaagcaacatctctggcaactggtgttattagtgagctggttaaggaactgagagtaaaacctgtgccaactgttcttgcttccttttctggtggctcaaaagggtgcatgtacaaggttattcagttactagctggaatatgtgaaggagatgcaaccatgaaggactatcggttagtgagaaattgtatctgcgggcaaatttatgactctagccctgtagattttgtcagtgatgtgggcacccagtttctccaaaagcctgctgttggaaattcatctcagtcaactatattacgttcatggatggcaaagcttctagcttctggcatggatactctcttcccaagcaggattgaagctcagcgtgcagagtactggcacacactatactcagcagcaggattgggtcctgttcttatattttgctcagaagatgataatcttgctccatgccatattatctgtggctttgcaaggcgattgattgaactaggcacagatgttaaacttatgaaatggagcgactcccaacatgtcggccattacaattcacatgaaattgaatacaggaaagctgtagatgatacgttgaagaaggctcttgttaccttctgccaccgaagccaactatatgactcaaatatggctggtgaccaggagtataagatagcacactcagtgtgcagtctacacaatgccgcagccaattcaaatgagagcttaagaagggttgctaacagtcctagtgatcacttcttcttgccaagttctaaggatcatgatgaatctcgggaacccagttctctaattgaggatcagaggcgccacatctcacatccaccctgcatggagcctaaaggagtccttggccaaatcctgtttgatgtttgtgttccaaataatgttgaaggatgggacattaagccaacagtgtccccgaatggacggccaacgtttgcttctgcccggcaacttggtccattcaatcccataaggtacttccggcgctcaagactgtagttttctgcaggagttgaggtttttgtatatatataaccgaggcaaggtggctagtagcaactctgagcaagattttacctatgtaagttccctgtaattgtttctgtttctgcttttgcaccgcttggcgagagaatgcacatatgctttgtatatcatatgagtgtgtgtactagaagggagatcctggacatatagtttctaggcgggttgcaaggtgcacgctaacattgtagccaaggggaatggattattatgtttctgtagtttc

SEQ ID NO: 33801 - DNA, 851 bp, Zea mays
  Clone ID: UC-ZMFLMO17171A03_FLI
cgcgagggtttccatccaccgcccgagcccagcgtcctgtgcaagcctcagctctctccctcaaccgccgcctgctcctccgtcgcgattccgacacacccgcctgtgttagccccggagcaggccgcgggcactggaggtgggaggcggtggctggggtcagggggttgtggctctgcgccgccttcctctccgccgacgagcaggcgcgcctcctcaacgccatccagcgagaaggatggtttattaatgcagacaaccaagcgatgagattcggtgacctcccttcgtgggtagtcgaactttctgcacttatccgcgaagctatctgcgtcggcgacgccggtgtcggtcttggtgcggaggcgacgaacgaggacgaggatgcgtgccctctgccatcagacttgctgtggcgggagccattttttgattagatgatcgcgaacagatacagactagggcatctgtgctcacgtcgatctgatgcgctttgacgatgggatcgcaatcgtctcgctcgagtcagcctgtgtgatgcgcttcagtcgagcagaaccagcctctgataccccgaagcaagggggcagtgccagtgaatctactgcagaggtccccgttctgctgaacccgggctcccttgcgctcatgtctggcgatacatgttaaaaagtcgacttagtggtggtcgtccgacaacagagggtcatgttcgctattatgttgttgttcatgttagtcgtctcagtgttatcagtcttgtcgtgttacaaaataaacatgtcgtacgcataattttcccttatgaacaattttgcaattattcgagttgaacatgtatttgaataatc

SEQ ID NO: 33802 - DNA, 1384 bp, Zea mays
  Clone ID: UC-ZMFLMO17171A06_FLI
cgctgaggaagctatctcactggtggaggcactagctgtccagttgacacaacgagaaggggagttaatttatgagaaggctgaagtaaaaaaattggctaacttccttaagcaggctactgaagatgcacgcaaagtggctgaagaggaaagggcccttgcactggctgaaattgaaaaggctagagctgcgatcgaaaaagttgagaaagcatggcatgtacatgattttgcgtcaagtagcagagagaaggcggagatagaggaacttaggaaagaggtccgagaggctaggagaataaaaatgctacaccagccaagcaaggtcatggacatggagtttgagcttcaggcactgcggactctcatctcagagaagactcagttatgcaatcagctaaagaaagagcttgccatgatcaagaggttagaagacgatagttctggcctctttgagcttgaaggttctaatacccttggatcacagctttgtattatcccgcgagttgatggtgcttcaaacatcgcgaactgtccaattcagtggtatcgtgtaatttctggaggcactagagaactcatatcaggagcaacaaaatttatgtatgccccagaaccgtttgatgttggccgattgttgcaagcagagatagttttgaatgcagacaaaattatagttcagacagatggccctgtagataacgctgcaggacttgaacgttatgtggactcactaatgaaaaggacggacattgagttcaatgtagtagtaacccaaatgaatgggaaggattactcgtcgaattctgttcatgtatttcacattggaaagctgagaataaaacttcgaaaaggatggtccacaaaagcaagagagtcgtattccactacgatgaagttatgcgggagccgtggtggtggtaatgctgcagctagggcagttttctggcaccctaggaaaggctcgtcctacactcttgccttcgaaacagacagggataggaatgctgcgattatgattgctcgcaaattcgcttcgaattgcaatatcgctctcgctggcccaggcgaccaaggcacctgatgaagtgatcacgcgatgttttgacggcgacaacagtacataattagggcgtggattggctgattgggtggcgtgcttgtcttagttttgtcgatttgtgcttgtgagggtagaggttgtacacggcgtgaggcattgtttttgtttgcctgcctgcagcactggcgacattcttgaaatatggtgtacgaattgataactgttcttgtgcgttactgcatgggtaatatttgaaccaaaaaagattggtcatgatataagtttctctctcaggaagacgacctgttgagagccttaagt

SEQ ID NO: 33803 - DNA, 469 bp, Zea mays
  Clone ID: UC-ZMFLMO17171A07_FLI
tcgccgctgggcgctggctcaccccactggctttctcaagtttcaagcccctgctgcatcttggccagttgaagatgagcagggcatcaatcaaaatcatcccagagtgctacagactagtgatggatcttgattctaatttcttcaagaggaaggatgctaggggtagcatgttgcttgcttactccgtgtcaacagcaagcagatcgaagttgttcctgtggatgctacaagcaacacttttggatgcatgctactttgctttgcattttgtagcagaggataaagttgcaagtgaactaggttcctgaacccaaaacatgtggttgcaacagtagacatttgatctatgagagctttgacaagccaaacttgttgttgcctacttattacgatttgaaaggtgacaagtagactcattattgtgaccgattattggcgctaatggaaatgtgacctacgttttgct

SEQ ID NO: 33804 - DNA, 2807 bp, Zea mays
  Clone ID: UC-ZMFLMO17171B09_FLI
ctccaaccatctccgaggatctcgtcagtcgtcacgaaatctccatggctggagcacgcgagagaggccaggatacaccccaggtccccagccgcgcccgcgctatataaagctcccgccccccattcccttccccctcctcccccagctaggtagcttagctagcgtgataatcaccgcgctaaactgatcatcatacacagcaattggcgtgtgacaggacacaggaggagggggcaggctggtaatatatagcaaaagtacaagcgttcctccagtggcgtccagcgttatatagttcgctgtccggccggacgtccttcccccaggtacaaagaggatgacggtgacgcccatgattacggtgggggatgggcggctggtggcgcacgggcggagcgtcctcgccggcgtgccggacaacatcgtgctcacgcacgcctccggggcggggctggtcgacggcgccttcgtcggcgccacggccgcggagcccagcagcatgcacgtcttcaccttcggcaccctccgggacctgcgcttcgtgtgctgcttccggttcaagctctggtggatgacccagcgcatgggcacctccggccgcgacgtcccgctggagacgcagttcatgctcctggagtgcggcccgggcgacggccacggcgacggcgacgcggcggtgtacgtggcgatgctgccgctgctggagggccagttccgggcggcgctgcagggcaacgaccgcgacgagctggagatcaccttcgagagcggggacaaggcggtgcagactgcgcaggggacctgcatgctgtacgtgcacgccgggaccaaccctttcgacaccatcactcaggcggtcaaggtggtggagagacacatgcagacgttccatcacagggagaagaaaaagctgccgtcgttcgtggactggttcggctggtgcacgtgggacgccttctacaccgacgtcaccgccgagagcgtcaagcaaggcctcaagagcttggcggacggcggcacgccgccgcggttcctgatcatcgacgacgggtggcagcagatcggcagcgagaacaaggaggagtccgccaacgccgtcgtccaggaaggggcgcagttcgccagtaggctgacggggatcaaggagaacgccaagttccagaagaagacgaagacgaaggagagcggcggcggcggcggcgagcagcaggcgcaaacgccgggcctgaagctgctggtggaggaggcgaagcgcgagcacggcgtcaggtacgtgtacgtgtggcacgccatggcggggtactggggcggcgtgaagccggcggcggaggggatggagcactacgagagcgcgctggcgtacccggtgcagtcgccgggtgtgatgggcaaccagccggacatcgtcatggactctctgtccgtgctgggcctggggctggtgcacccgcgcagggcgctgagcttctacgacgagctgcactcgtacctcgcctcctgcggcgtcgatggcgtcaaggtggacgtgcagaacatcatcgagacgctcggcgccgggcacggcggccgggtcgcgctcacccgcgcctaccaccgcgcgctcgaggactccgtggcgcgcaacttccccgacaacggctgcatctcctgcatgtgccacaacaccgacatgctctacagcgcgcgccagaccgccgtcgtgcgcgcctccgacgacttctacccgcgcgacccggcgtcgcacaccgtccacgtctcctccgtcgcctacaacaccctcttcctcggcgagttcatgcagcccgactgggacatgttccatagcctgcacccggcggcggactaccacggcgcggcgagggcaatcggcggctgcccgatatacgtcaggtgagaccgacaaccagctcctgatcagaacgaacgacgtcgtggggttgccgaaatcgctgtcgatcgcggcgtccgtcccagacaagccggcacaaggatcgatccctcgagacaggggaaccgaatgatttggttgcctgcccttgcggcatggcagcggaggtgccagccccgaagacccgaccagtcgccgccgccgccatgattggccgtcgccatcagcgagcgcattataggcgcgcggccttgtctatctaactggcacacaagctgcagtagcaaagcccaacagcgactcgacggctgtggctgcttgcgtcgccctccggcacgccttccggcggacggcgcgcgagcccgtgtctgtgaacgacaagccaggcaaccacaacttcgagctgctcaagaagctggtgctccccgacggctccgtgctccgcgcgcagctcccgggccgccccacccgcgactgcctcttcgccgacccggcgcgcgacggcacgagcctgctcaagatctggaacgtgaacaagtgcacgggcgtggtgggcgtgttcaactgccagggcgccgggtggtgccgcgtcaccaagaagacccgggtgcacgacgcggcgccggggacgctgacggggtcggtccgcgccgacgacgtggacgtgatcgccggcctcgccggggacggctggggcggcgaggccgtcgtgtacgcctacaggtcaggggagctagtcaggctgccccagggcgccacactgccggtgacgctcaaggtgctggagttcgaggtgttccacgtctcccccgtcagggcggtcgcgccgggcgtgtcgttcgcgcccatcggcctgctcgacatgttcaactccggcggggcggtggagcagtgcgaggtccgtggcggcgcgaac

SEQ ID NO: 33805 - DNA, 783 bp, Zea mays
  Clone ID: UC-ZMFLMO17171C01_FLI
gctcaaccgagccctcaaatcgccgcatcgcgcccctagctctctccgtctccctcatcctgacctcgattcgagctagtttcgggaagcaaaggtaccggatcaacccccttgatcacccatggtgcccagggatagggcgcacagcgccgctgctgccaccgcgcccccgacggagaagcccgttcaagggcctatccagaacaacaagtgcgaaaagaaggctccaaagaaggtgcataaatctgagagagagaaacgtaagcgggacaagcagaatgatctctttggtgagctgggaaacatgctagaacctgatagacagaacaatggaaaggcatgcatattaagtgacactacacgaatacttaaagatctactttcacaagtagaatctcttcgaaaggagaacaacacgctgaagaatgagtctcattatgtcgctttggagagaaatgaactactggatgaaaccaatatgatccgtggcgaaatatcagaccttcaaaacgagatgaggatgcggctagaagacaactctatctggagtcatgacacttctagaccaaatcttacagcaccccatccagcgaccacagtatttacattgcagcattcaccacatccacaagtcattgcaacaatgacacttcctctgcaacagccagcagtcgttgagcaatcttacgctgccccacggcgggagctacagctattccctgaagctgcacccactgaagatactgagccaccacaaaacgaggggacctctaatcatgtgat

SEQ ID NO: 33806 - DNA, 3308 bp, Zea mays
  Clone ID: UC-ZMFLMO17171C06_FLI
ccctttttcacatcagtaccttctggtagagttggctcttgccatgaagctgtgttcaggtcaaatggagagtttaagaaggtatagctagtaccgactgaattctttagagctttgtgcttcctcctgtgaagtgtcgaattgtacactgcataaacatgcttgcactctagcatcaagcagactcttgaatttttttcttctgttctgtgccaataaagcaaccggccatctgatttcattatgtacttgtcagagcagtttggttaaactcaagagcgaatgtgtaactcagtatgatgtacaatcccttacaaaaatgattacaactaactgaaaacctgcagtttttaagagcttttagggacacaggtttacacattaaagtcacatgccccctcatttcattttgtaaggtttactcacaagtcacaacataagattcaaacttgataatattttattagcacttaatattataatttgtaggttatgccatacaaatatttgagaacacttccatattgtcaaatgaatattcatgaacattacaatgtatgtgtgttaatggtgaaaatgtactatttcttttgttcttgataaaatgatacacaactttactgcatttgagaagaaaaaaaatataatggtcaaaacatgacatttaccatgccttacaaaaataaaaggagggattactttctgtgtttttttaattcatattgatttttaactcaaatataaaaatacatgcttgctttgacttgtgaagcttctcagactccacttcgaggtgccactccaagagtatgtgtggatgtgcctatatttctatttgtttctgtagggtaaagtctactccagggataacctgtgactaacagataggtctgtacttcctgttgaggttaagaatgtaatcgacaacacttctatcatgtctgtgaaatgtttgctgctattggatttacaattcatatttgtaggatcaagtgacatgtaccctgttcatgtatgctgccttttttaacaacactatctacaataaagaatgttgaagatcagctttcatagtaatattttagtgaaaagtttaaaagatattatattgtgaaagtactgtctcataaagaagaaccgacattattgtttccaggggctacattacaattacatcatgttactagtttgcaatttaaccttgttttatgtacataaccacatttgttttataacaatactatgatgaacttccccaaagtttttcataaaaaaaatcaacagagtttgacgactgaaatcataaacacattatattctgaagggatggaataacatcaaaattaaaaaggtgcttttagggaatgctccaactgaactgctttacagaacacaatgcctttgttttagtgcagcttttttgctagcattgctaattagatatccaaatttgggccttttctcttatgtgtgtgtgatgtaagcaggacagtttttcacaaggcctctaatgttttttattgtgtcgtcatgaaggccatcttatcaagagagttggaagatattgcatctattgaagacaagttaggaaggtcacttacaaccatggagaaagatagaattggagtgggtaacttaagattatatttggaagagttgctgcagaagaggtacgttaagagtgttccattaatcattccacttcttgagaagcaacatcgaaatacaacaagtaaattgcgtgaaatcagtcatgaactcaggtgatgttttggacttttagttgattattctgttcaataaagtgggtccttccttgtagtgggttatgtggtgtttctgtagctcaaagctttgatggaaagctgggttacgttcttccccatatctccaactttacaggctcatgataatatatttgttattcaagatgtattatttatgttgtcaccctatatctgaacagtgatctagatgaaaccaaactgaaggagaaagctcagctattccatgacacatttttgaccaagttatctttgctattgaaaggcatggtggtggcacctcctgataaatttggagaaactttagtcaacgagaggattaatggaggaacatttactggaagtgagaatttccagctcccgaacaagatgatgccaaatggtggaatgcgtctttatggtggtgcacaatatcatcgggcaatggctgaatttcgtctggtagttggtagtaccaggtgccctccaataactagggatgaaattgtcaatgcttgtggtgttgaggatattcatgatggtacaaactactccaggactgcttgtgtaattgccgtggcaaaagcacgtgacacgtttgagccatttcttgatcagttgggttttaggcttttgtacatactgaagaggctaatcccaatctctgtttatctgttggagaaagatggtgagcactttagtagccatgaagtgcttataaggcgtgtccaggaagcattcaagaggtttgttgaatccactgagcaatcatgtcgtcaaaggtgtatggaagatttggagagtaccactcgttatgtcacttggtcccttcacaacaagaaccgtgctggattgagacatttcctcgattcatttgttgcaccggagcaactatcagtaaatacattgaacgagcggttttctgggttgaatgataacaaacaggataaggcaaagggtgactcgaagtcaaaccattctccagacacaaattcgtccactgctatgccagagacaaggctggttgacctattggatagcacactctggaacagacgcctggttccctcatctgaaaggcttgtttatgcgctggttcaccagatttttcatggaatcaaagagcattttcttgtcaccactgaactgaagttcaattgctttctcctcatgccgattgttgacaaactaccagcacttctaagacaagaccttgagtcagctttcgaagaggaacttgatagcatctttgatgtcactcagctgcgccagtcacttgggcagaagaagcgcgagctggagatcgaactgaagcgggtcaagcgcttaaaggaaaagtttggagagataaataagaagctcaattctcttcaggttaggcagtaggccaggctcaaaatttagcagtagcttggtagtctaggactccaggtagagtgtttctatgctgtaataaaataattggtcatctagagtgacttcttgttgtatcctatcagttgtaaatatgaagtcttcctatgtcttaacgtatgttgttgctac

SEQ ID NO: 33807 - DNA, 743 bp, Zea mays
  Clone ID: UC-ZMFLMO17171C08_FLI
gttctcataaatgaaagacgcggacggcggcagctacaagcgggcgcagtcgacgccgtcgaccccgacgacgccggtgacgccgtcgtcgtcgacgacgccgcgcggcgccggcaacgtgtggcgcagcgtcttccacccggggagcaacctggccaccaagggcatgggcgccaacctcttcgaccggccgcagcccaactcccccaccgtctacgactggtgagcaccgtctccgtcgtctccatctcttgcctagctacgtgcgtggtctgcgtgctcaaactggacagcagcagcagatccaggaccaaactaattgagcaagaaccacgcgaatgtttcgattttattttttatttttttaaaatcagtttttcatgcgtgtataataatttctcaggctctacagcgacgagaccaggagcaaccaccgctagatcgggcgagatggatggacagtgaagaggccatgtttgctggtccttgtggttatctaaaacgcacgcatgctctattatagctagtcatcactatatatatacttgtgtttgtgtattgttgttcttgttctgctggtgtctccgccgtttaatttgacctatgttatggagtgagtgatatatgtgccgtcactcctagtatatagtagtgagtgactagttggtatgtgtagtactgtactatcttttctccatatgcatgttttgccagcgcgtaatgaatgtaatgtcagtactgct

SEQ ID NO: 33808 - DNA, 1833 bp, Zea mays
  Clone ID: UC-ZMFLMO17171E08_FLI
gtgcccctagcctttccttgctttccactgaaatctcctatctgcagccatgcagttgctcaatcctggcctcagatgaagcccaaccattcatcggtatataagtcgctacaacctttgcaatttcccactccttcagaacatcgtcgaagaagctctgtgctaccggagaaggtgttcgtcgccgtgcataattatacattccgcagacctgtaagctctgtgagtttggttggagctcccaggttctgcattgcgttgagatggggaggcattcttgctgctacaagcagaagctgagaaaggggctctggtcccctgaggaggatgagaaactcatgaatcacataacaaagcatggccatggctgctggagctctgttcccaaactcgctgggcttcaaaggtgcggaaagagttgtaggctgaggtggataaactatctgaggccagacctcaagagaggggcattcgcccaagacgaagaagacctcatcatcgagctgcacgctgtcctcgggaacaggtggtctcaaattgcagcgcagctgccagggaggactgataatgagatcaagaatctatggaactcgtgcatcaagaagaagctgaggcagaaaggcattgatcccagcacccacaagccacttactgaggctgatcgcggcggtgcagctcccaccatcagcaccgagagaacctcagggtccagcgacgtcaacccatcaagcactggtcctctggggaacttgagccccctccttagcgagacggctcaatcatcaatgctgatgcccgtgtacgacaagaatcgtgctgaaacaccaaacttggcacgccctaagctgccaccaaaggagctgttcctggagcagcttactgctggacacgagagtccatcaacctgccactcatcaggccaaactctctatttccctttccaacagcctttaggctacaacagtgagagtggcagcagcgatggggcaaatatgaattcactctggttcaaccagagtgacttcaactgcagcacaatttctacagtgatgccgccagtttcaccatcggccctctctacatcaatggggctgaatcttccacctgataatcctcgacatggaggaactggcattggaagtaccgcagtagattcattctactgggatggtactaatcctagcagcagtagcagtactgggagcagagggagcaacagtatgggatttgaaccacagagcacgagcacaattctggagaacagtgtcttcacatggacagacattggacaagaaaaagatacaagggctcacctagtagcggaacttaagtggcctgactcctttgccgagacaaccacagccatgcagaaccagagccaaacgctttatgatgatgtgatcaaggcagagagccaattcagcatcgaagggatatgtgcttcttggttccagaatcagcagccacagcaacagctgcaggtagcaccagacatgtatgacaaggacttgcaaagaatgcaactatcttttgagaatatctaggcattatgttccaccacatggaacagagcagatcagaagaagcagaaacttgtaattttcagagattcgtgggcagaattatgctgaattgctcacatagatacgttaagttgatacagaaatcatcctccacagctgttcctcagttaaagagctggcaatatcaaggaaaggacagccctggcattagaagttgcagcaggatgcataggaaagtatgttctagagtctcctttcctttctcttgaaaattgatgttttccttctgtacacgactgaacttttgcat

SEQ ID NO: 33809 - DNA, 2066 bp, Zea mays
  Clone ID: UC-ZMFLMO17171G11_FLI
tgccgcgccggccggatcgaggacgcgcgccgcctcatcaacggcatgccgttcccgccggacacgttcacgttcaacccgctcatccgcgcgctctgcgtccgcgggcgcatccctgacgccctggcggtgttcgacgacatgctccaccggggatgctccccgagcgtcgtcacctacagcatcctcctggacgccacctgcaaggcgagcggctacaggcaggccatggcgctcctcgacgagatgcgcgccaagggctgcgagccggacattgtcacgtacaatgtcctcatcaatgccatgtgcaacgagggcgacgttgatgaagctctgaacatattgagcaacctgccgtctcatggatgcaaacctgacgctgtcacgtacacacctgtgttgaagagtctgtgtggctctgaacggtggaaggaggttgaggagctcttggctgagatgaccagcaacaattgtgcgccagatgaggtgacattcaacacaatagtcacttccctgtgccaacaaggcttagttgatcgtgcaattgaagtggttgatcatatgtcagagcacggatgcgtcgctgacatcgtcacatacagcagtattcttgatggtttgtgtgacgtagggcgcgttgacgacgcagttgagttgttaagcagactgaaatcctacgggtgcaaacccgatacgattgcctataccactgttctgaagggcctgtgcagcacagaacaatgggagcgtgccgaggagctcatggccgagatgctctgcagcgattgcccccctgacgaagtgacattcaacacagtagttgcttctctatgtcagaaagggttggtcgatcgtgcaatcagagtcgttgagcagatgtcagagaacggttgcagccctgacattgtcacatacaactgtatcatcgatggtctgtgcaacgaaagctgtattgacgatgccatggaattgttaagcgatctgcagtcctgtgggtgcaagcctgatatagttaccttcaacactttactgaagggcctgtgtggcgttgaccggtgggaggatgccgagcagctcatggccaatatgatgcgcagtaactgtccccctgacgaaatgacgttcaatacggtaatcacttctttgtgccagaaaggattacttacgcaggcaatggaaactctgaagataatggctgagaatggttgcgttccgaactcatctacctacaacatagtagtcgatgcacttctgaaggccggaaaggctcaggcagcccttgagctgctgagtggcatgacaaatggtactccagatctgattacttataatacagtaatttccaatcttaccaaggccgggaaaatggaggaagctcttgacttgttgcgtgtgatggtctctaatggcctttgcccggacacgaccacatacagatctttggcctatggtgtctgtagagaagatggaaccgacagggcggtcagaatgctccgcagggtgcaagatacgggcttgtcgcctgacactacattctacaatggtgttcttcttggtttctgtcgagatcggagaacggatcttgccatcgattgctttgctcatatggtctccagtggctgcatgcctgatgaatcaacctacgttatcctccttgaggctcttgcttatgggggtcttttggacgaggcaaaacgacttctagccagcctgtgttctcttggcgttttagataagaagttgatcgaggaagaaagccactactcgtagactgagcatgcatgttaacgtgttgtgattaagttgaatagcagtggcttcgcttactgtagtacaaagcgctgaaatggtcgctttggatcctttcaggtcatgagggattgtgcatacctttgtatagcttaggttcaaattttccatgcacgaagttgttatgcatctttcgctgttcacagtactaccattcagttctcgcttcgagcagatgttcgagtttcgtccagattcagtgctaatacttgctgtaatagtatgctaattgaacagtttcacacctttttcccctc

SEQ ID NO: 33810 - DNA, 764 bp, Zea mays
  Clone ID: UC-ZMFLMO17171H12_FLI
aactgggaacaggggatattcatgcaagctgattttcaaacggcaatctttccttgagcgcaaccctcggcaggttgaaggattggttaaggacggtgatggttcgacggtggcaagcctaatgggaaagtgggatgagaggatgtactgcagcgcatcagggcagaatgtgattctgttgtgggagaaaaatgaagcttcgactaatcccactcgctataacctctcatcgttcgcaataactctgaacgagttgactccagaactcaaggagagccttccaccaacggattcaagactgagaccagatcagcgacatgtagagaatggggagtatagtaaggccaatgctgagaagctgcgactggagaggaggcaacggatgtcacggaagatgcaggacaatggttggaaaccaagatggttccgaagggatgatggcacattccgctatgtgggaggttactgggaggcacgacagcagcggaaatgggacggatgtcatgatatatttggtgaattcgtgtgactcaacagtgaggctgctcggagcttatatatatgtgtctaatacaacaagtagctagatagtcgaactggacaattgggctgtacactttgtcgggctgccgtggtccgccacccgcgtcttgccggactcgttggtaacgcgcatggactgtatcaatttggtttgtatgttctaccaatttccatcacatattttgctgtgcattcataattacaccgacatacatatacat

SEQ ID NO: 33811 - DNA, 906 bp, Zea mays
  Clone ID: UC-ZMFLMO17172A01_FLI
ctcaagtgaagagaagtagaactagtggagagaggagaacaggagattagatcagctcgcacgcaagccaaaggaaaaggcaagatgcggagcccaaggggtggaggcggcctggagcacgtggatctgattcccggcatccccgacgacgtcgccgtggactgcctggcccgcgtcccgcacgcctcccaccgcgcgatgcgccgggtctgccgcggctggcggagcgccgccgcggcgccggccttcgcgtcggcgcgcgccgcggcgggcgccaacgaggacctggtgtacctgatgcagttcgggaacccgtccgccgacgacgggcccaaggacggggacgacgggccgggcaacaccccggcgtacggcgtggcggtgtacaacgtgacgacgggcgagtggcggcgggagcgcggcgcgccgcccgtggtgccggtgttcgcgcagtgcgcggcggtggggacccggctggccgtgctgggcggctgggacccgctgagcttcgagcccgtggcggacgtgcacgtgctggacgcggcgacggggcggtggcggcgcggcgcgcccatgcggtcggcgcgctccttcttcgcgtgcgccgaggccggcggcaggatctacgtggcggggggccacgacaagcacaagaacgcgctcaagacggccgaggcctacgacgcggaggccgacgcctgggacccgctgccggacatgtcggaggagcgcgacgagtgcgacggcatggccaccgtggccggcgaccggttcctggccgtcagcgggtaccgcacggcgcggcagggcgggttcgagcgcgacgccgagtggttcgacccggcggcgcgggcctggcgcaggctggagcgcgtgcgcgcgccgccctccgccgcgcacgtcgtc

SEQ ID NO: 33812 - DNA, 2242 bp, Zea mays
  Clone ID: UC-ZMFLMO17172B12_FLI
ctgagccaggacatgcatcgtggttggacaaaattcagcagactgtacagaatgtttttcaaaaattcaacttttttaggacccctgtagatttgtcaggtaatttgtatatagtggtttctaatcagtcgattcttcatgagtcatgagggtatgttataacattcacatatcaacttttttagaggcttctcgcgttcgtaaggagtatgacgatgccaactcaaagctttcaaaaattcagtctaagatatccaatttagctgagaagctaaaacatgattttggcaaagacaaggagttctattccttttatgatcagtgctttgagaccaaggaaggaaagtatacttacaaggtctgtgcatataagaaagcatcacaggctgaagggcacagttccaccaacctggggtatgcttctcgttcttctttctttgctgaaatctcataatttttctatttgtaagttaatcatactttttgtatgttgctgctgtgtttttttttctaataatgattgagcctactgtttactgaaagggttatagtgatattttgtggacctgcatgggcaaaaattctcattatccttatcttagtagggtatttttttaaattgttgtgaaagggcctcttgctgagttggttaggtggtctgagtagcactccttaggtattgacttggactttctgtgggagtgaatttcaagcctgggttaaaaaatctgtcccatgacaaagcacaggtctaaggcctggtcctggtcgcggtcgttctcacatgggctacggtgccgctatgtatgggtgtggcagggattcggggggttttctctcaatataataccggtgattgtcttaccctccgcaggtcgagtttttttccttttaaattgttaaatactctcaagtggatggtaatagtgctctttaagacaatgcactacatagaccaccagtaatgtttcagatagcatgcacttttgttcattgttagttcacttatccgcgggacaaaaataacctcaaaggtatgaactgtccttccttcactgggaaaaatgggtgagtttgaacgtagtcattagccaatgatcatctataaatgcaacatgtagttttcctactatgccagttgatggtgcttttcagattacagcttcatatgttgctgtcaaatacaattatgttaattaaaatgtctaatttatgaatgttgtttaggtaatgtcatttgaggaatatgttcaggggatcaactagcgagggcccattctgtctttagactatatatgtttctattgttttacatgactttgaatatcaggtggtttctgaatatttttttagtggatttaagaaatactgctctttaggtaatgatagcccttacccattttgctgtatatacaagtgtgtttcatcttgtttactggtgcttagctttaaaatgtctttctagaatacttagaaactgcattcagtgatagaatgacctgcttgaatgcttggcatgttttttttttccacatgtcctgacgccttaaaatgaattttctatcatcaggagatgggacaaatttgaagaatcgtacagagtaatgcacttttcaggtggagacaaatgctggaatggtcctgaccgaagcctaaaggttaggcttagatgtgggctgagcaatgagcttaatgatgtcgatgagcctagcagatgcgagtatgtggctgtattgtcgacgcccgcactctgcgttgaggagaagctgaaggagctgcaaaacaaactggatgccatgtcttcgaagcagcccgggcatgatgaactttaaacggttccggcgtggacaaagaaaatgtcaccaggaagcatagattgacagttacactcataaccttaagggtggaagtcaatggggcatatggacaggaaagggccaagctgaagaaatgggaatgtagggttcaggtcgcctacctggcaatgttagctggcatagagctgtttttttagctgaatttgattggatgctgcaatttttccaggctcatcccgagttgtttggtggaggcgactgcaaccgtgcttttctttgtggtttaacattgctctatttaattagggagagacgctaggcttttgcgtctccagcttcattgccagccattacacatttgatggaatatatagtaagaaacagtacactctgaaccatcataatttgaagatgccagttaaccc

SEQ ID NO: 33813 - DNA, 1570 bp, Zea mays
  Clone ID: UC-ZMFLMO17172D03_FLI
ccttcctccccctatctagctagccttcccgttcccgttcctgcatcgcggcggagatgggcgcctccaccacgccgctcgcgtcggcggcggcggcgctgcttctgctgctgctcgcgccgctcgccgcggcggcggacatgtcgatcgtctcctacggcgagcggagcgaggaggaggcgcggcggatgtacgccgagtggatggcggcgcacggccggacctacaacgccgtcggcgaggaggagcgcaggttcgaggtgttcagggacaacctccgctacgtcgacgcccacaacgccgccgccgacgcgggcgtccactccttccgcctcgggctcaaccgcttcgccgacctcaccaacgacgagtaccgcgccacctacctcggcgtcaggagcaggccgcagagggagaggaggctcggtgacaggtacctggccggcgacaacgaggacctgccggagtccgtcgactggcgggccaagggcgccgtcgcggagatcaaggaccagggcagctgcgggagttgctgggctttctcaacaatagcggctgtggaaggcatcaaccagattgttactggcgacatgatctccttgtctgagcaggagcttgttgactgtgacacttcatacaaccaggggtgcaatggaggtctgatggactatgcgtttgagttcatcatcaacaatggcggaatcgacaccgaggaggattacccttacaagggcacggacggacggtgtgatgtcaacaggaaaaacgccaaggttgttactatcgacagctatgaagatgtaccagcgaacagtgagaaaagtctgcagaaggcagttgcgaaccagcccatcagtgttgcaattgaggctggtggcagagcatttcagctctacaactcgggtatcttcacaggaacctgtggaacagcgttggaccatggtgtcacggccgtcggctacggcacagagaacggcaaggactactggatcgtgaagaactcttggggcagcagctggggcgagtccggctacgtcaggatggagcgcaacatcaaggcgtccagcggcaagtgtggtatcgccgttgagccgtcgtaccctctgaagaagggcgccaaccccccgaaccctgggccgaccccgccttcccccaccccgccgcccaccgtctgcgacaactactactcgtgccccgacagcaccacctgctgctgcatctatgagtacggcaagtactgcttcgcctggggctgctgcccgctcgagggcgccacctgctgcgacgaccactacagctgctgcccccatgactaccccgtctgcaacgtcaagcagggaacctgcctcatgggcaaggacagcccactgtcactgtcagtgaaggctacgaagcgcaccctggccaagccgcactgggctttctctggcaacacagctgctgatggcatgaagagcagcgcatgagaaaaacgcagcatggcattaggccgtcaacagccagcatgattagagcccccctgcatgcagaatgatcacccggtcccgtagttcacgacgaaagcatggct

SEQ ID NO: 33814 - DNA, 1726 bp, Zea mays
  Clone ID: UC-ZMFLMO17172G07_FLI
tgcgtgcactaaacacaaactaggcagtagtgcactctacctatagctctctccgatccatgcagagctcggtggtcatgttgtcgagcacggtggcagcggcggccatggcatcgctgcgcaccctcccgctgccggtgctggtgcccctcgtcgcctcggggctcgtcttcctggccaccgtgctccgacgcttgctaaggcggcagcggccggtgtacctcctgaactacagctgccacctcccggacgcggagcggcaggtgaacctggaggtgtgcgagtacttcggcctcaagtgtcgccgctactccgacgacatcgccgacttcatgcggctggtgtacagcaagtccggtctgggccaggagaccttcgcgccgcccttcatctactcgggcaagttcgagaagacgctggcattcgcgatccaggaggccgaggagggtctgttcgccgtcgtggagcagctcctggcaaagtcggacgtgagtcccagcgacatcagcgtcctggtggtggcctgctccatgttctccccgatgccgtcgctggcgtccatgatcatgcaccggttcaatatgcggccggatgtgaagtcgtacagcgtggccgggatgggttgcagcgcggggaccgttggcatcgacacggcggcgcggtcgctgcgctctcggcggacgcccgggtacgcgctggtggtggtgacggagaacacgagcctaaactggtacttcggcaagaacaagcacatgctggtgaccaactgcatcttccgcgtgggcagcgcggcggcgctggtgacggacgtcccgtcccggcgcccggacgccaagtacgagctggtgcgcacgctgcggacgcaccacggcgcggacgacgcggccttcaacgcggcgctgcagatggaggacgaggagggcaacctgggcgtggcgctcaccaaggacctggtccgcgtcgccggtgcggcgctgcggaggcacatcaccacgctgggtccccaggtgctgccggtgtccgagatgctccggtacgcgtggcgcgtggcgcgcgcctacgcggccgggaacagcaaggccgcggcggcggaggtgcccgacttccagcgcgcgttcgagcacttctgcatccactcgggcgggaaggcggtgatcgactcgatcgcgcggctgatggggttcgggccctacgtcgtggagccggcgcgctccacgctgcaccggttcggcaacacgtccagcagtctggtgttctacgagctggcctacttcgaggccaagcgccgcgtccgggccggcgaccgcctctggatgctggcgttcgggacggggttcaaggcgtgcagcaacgtctggcgcgcgctccgcgacgccgcgcccgacgccgacaacccatggaacggatgcgtccaccgctacccagtgccgccgccgccaccgtccaagacgcacaagcatgcttgatatagtactatgtgctcctccgtcgccgcgtctcgtgcctgtgtctgcgtcgattgtttgataagcaacatcaacgaaggcgtatgtatcctagctagggaccgggtcagttgtttgatacgcttggatgcatgatgatcagctgtctcattggctccaagaagacctatggattgtttgatttctgtgtcagtgatatgtcatatgacaacatgagtatccctgtttggaaagtgaaatatataagaaatttaaatatt

SEQ ID NO: 33815 - DNA, 478 bp, Zea mays
  Clone ID: UC-ZMFLMO17172H10_FLI
ctaagttgaacacttttgttccatccatggaggctgcaaaaccaggtttcaaggaagttgagaaatggagtgaaaatgctttgtggagtgtatctgagcttcaagttggcgatgagaagcagactggttctaacaaatttgatatggaaagagtactgaaagggtttggagcttgtgatgcttttgtggcttctgggctcaacgcccctaatggacaagttggtggtattacgtttaagtcttcagacattgcccttctaatatgattgttcgtaggaaagaaagctcctctggattttgcctcaaagactagcttgcagtttgtttcattgtcaccagtcaagtggtgggtgtgcactagcttctcttgctgttgtgtatcgaaattttgccagttagaaattgtattaacattgtgtctatgttgcctgaacctataacatttccttagtttggaattgtgttctattatttctgc

SEQ ID NO: 33816 - DNA, 1441 bp, Zea mays
  Clone ID: UC-ZMFLMO17173D11_FLI
gttcttgggcgtacgcggacacagccccgatccgaatcgtcgtccttgcgagcctcgccgatcccccactcccctcccctcgcttcaagatgcagatctttgtgaagaccctcaccggcaagactatcaccctcgaggtggagtcttctgacaccattgacaatgtcaaggctaagatccaggacaaggagggcatccctcctgaccagcagcggcttatcttcgccggcaagcagcttgaggacggacgcacacttgctgactacaacatccagaaggagtcaaccctccacttggtgctgcgccttaggggaggcatgcagatctttgtcaagaccttgactggcaagacaatcacccttgaggtggagtcctcagacaccattgacaatgtcaaggcaaagatccaggacaaggagggcatcccacctgaccagcaacgtctcatctttgccggcaagcagttggaggatgggaggacccttgctgactacaacatccagaaggagagcaccctccacttggtgctgcgtcttaggggtggtatgcagatctttgtgaaaacccttactggcaagaccatcactcttgaggtggagtcttcagataccattgacaatgtcaaggccaagatccaggacaaggagggcatcccgccggaccagcagcgtcttatctttgccggcaagcagctggaggatggacgcacccttgcggattacaacattcagaaggagagcaccctccacctggtgctgcgcctcaggggaggaatgcagatcttcgtgaagacattgactggcaagaccatcaccttggaggttgagagctccgacaccattgataatgtgaaggccaagatccaggacaaggagggtatccccccggaccagcagcggctgatcttcgccggcaagcagctggaggatggtcgcaccttggctgactacaacatccagaaggagagcaccctccatctggtgctccgcctgaggggcggtatgcagatctttgtgaagaccttgactggcaagaccataaccctggaggttgagagctctgacaccatcgacaacgtgaaggctaagatccaggacaaggaggggattcccccagaccagcagcgtctgatcttcgccggcaagcagctggaggatggtcgcacccttgcagactacaatatccagaaggagagcaccctccacctggtgctccgtcttcgcggtggttattaagccatcagtcgttgaagctgctgctgtatctgggttatctagtgtctctgccattgcccatggatggtgctgtctttcaaagtatttgtatggtttgtgtcgtgagtcgtgactgagctggtttcatggaccagttgtgttctcgttacccaaaactatcgtgcgaccgcatatggcttaatcatgaataaatgttgtttgaattt

SEQ ID NO: 33817 - DNA, 2970 bp, Zea mays
  Clone ID: UC-ZMFLMO17173E08_FLI
ggcccgtctcctcgacctccccgaaaccccacttctcggatcgagactagggttagggtttcgtcactcccgccccgattcgaaccaatccgcctaggcccccgccgcgccatggccgccggttccattgtggtggacttcccctccatgggcgccgccctctgcttccccaacctcgaatcactcctccgagactccgcctcgggtttcctctccgccgtctccgccgccccggcccccggcgccgccgacctcaccaacttccaccgcgtcttctcgcgcgtcctcagcacctactcagacccgccgctcgaggtcgtctggttcttctccgcgctctccttccacgaccgccctgacgacctccgctcactgctccagctcctctccgccttcgccgcttcctcgcctggggccgccaagccgctcgccctcctcgcccccgtcgtctccgagcttttccactcagataagccgcgcagggagaccgaggccgtcgtcgaggctgtcctcagctacatcagcatctgcagcagtcgccccgccccctcttcgactgaaggcaccaccgccgacgctgtgaggctgctgccggctttcggcgatcttgtcaaggtgtggagcgtgcggcactcgagggagaggtgcccgttccaggtgctgttcccgctcgctggtgacgaggccaggcgggagctcatgaaggaaggctgcagcgttgactacctcgctggggtggtgctggttgaggcgttccttctcaggctctgcctcaaggtgcagaatgcaacaggagtgcctcgctctgagctgcagaaggagctcaagatctgggcagtcagctccatcccggtcttccagagccaccaattcttcggggtcctgctgaacatgctcttgaactctccgctgcctgtttactctctagtggtatgtgtttcctgactaatgagcaatttgagagcatgacacagcaagctagtattattatggattcactgcttattaacaaaattataagagtattaattaagcattcacaaggcatgtggtagttgtatggaccataaaaatattaacaaacatggcaaatagcttataaactcatttcatgaattaagaaacatgagtcatgatcatgctttttcattacctgttctgtaaactagttatttacctttgtgaaataagaaatgtgcaacttgttgccttgttcttcaattgtgcttggaataaggaatctatcctaatttgtggaaactaaagaggagaacagaacggtatatgactattgtgtatcgcaaagctggtgttactatagcattttgctgtcatcatctgcaaggagcatgatttaagatggagttgtgtctcatctttgtgatatgcaaacaggttgaagcctgaactgtggtttgtcctagtatacccttttgtttcggatcatgattatgccttttttatgcggaaatggcaaaataggggtttatgtacaattttacttggttatatgttcagttttgcaagcagtgcagtactgtacacatgtatttgatcactcctataaagttgccagactggttgatttttccgagtagttggttacttcaattttcactgtttagaatctaaaagtatcatatgtcagataccagaccaggagtaacgcctttattgactgagttttgtcagtggcagtttcagtttttcttgactcatgtaatttgtgttgtgtttggtttcttggtgactcagagtgctgatgatgaaatcttggtgagggatgttctatatgattctcttatcctggtggattattcattcattaacaatggtgctggagttgatctcttgcctgtatatgtgtcgagattgattatcactcttgatgctgtcaatgatgccaggtgataaagagtttttgtaaccaaacttagttggggggggggggtggaaatatcttctcatttcatttctgctgacaggaggaaaggtgatcaaggtagagcagtgtcatttattaatgccttctcaacctcaaatattcccaattttctcatcaagtgggctacttgtcaagctggctctggtgcactcagcaaaccaatttccaatacaccccaagctattctcaagtggcttatcgaccttgaagataaggggctcaaagtgtttggagattacagttcttgggttatgaggaggtttgtttgcaatgaggtcaagaatgggtatgtgaacatggttcagtcagatgcagaccttttcttcgttgataaacagagtggtagggaacttatggacaccaaaggcagcgaggatgatgaagctgttgaggagatggagactgcaggtaatgcttttatggctgctgcccagtcaatgaagggggtaactaacggcataaggaagaggaagagctgcggaaacgaagatgcagctgctgtgaagtttgtgaagtacaaggtagaagacagctcagtgaagggctacctgttagcagctaatggcatgagcagtggcagtgaggtagagaacccacagtcggaagatgagatggaagaatccgactgatgcatagaaaacgacagcacccgctaatgcttactttggggagagttgctttgaagagtttcttggacaaccgcctttttggagtctggaccagccttgtttcagatgccgcttcttaatgatgtcgtgcagtaccctgttctaggccaataatctgcaggagggcccctctccagctaggcttttttcggatatagtggtaaccgttagctgaccctacttgacaaggagcatgtgatgtctgctatgagctatatcgtgttctttgttgttataatgctatatagtagagacctcaatgtagtcttgcttcattttgcttttgtaatagatgggtacgttgttgttatcccacggaaccagttggaactaatgaactcttaacctttcctgtgt

SEQ ID NO: 33818 - DNA, 2080 bp, Zea mays
  Clone ID: UC-ZMFLMO17174A07_FLI
gaagagaagcctgatggcgatgccacccaggaggagcaacctaaaatagaagagaacgtggaagaaaatggagagaaggatcagagctcaaactccaacgaggtatttcctgatggggcccaatcagagcttctgaaggagtcaaatacccagaacggttcattccccacacaggctgcagagtcaaagaatgaaaaggaagtccaagcgttaccgaagtcttcaggcgatgcaaccagctatacctggaaattatgtaatagtagtgcctcgacagattacataccttgccttgacaacgagaaggctatcaagaagcttcgaactaccaaacattatgagcatcgtgagaggcattgccctgaggagcctcctacctgccttgttccactcccagaaggatataaacggccaattgagtggccaaagagcagggacaaggtatggtacagcaatgttcctcacactaggcttgcagagtacaaggggcatcaaaattgggttaaggtctcaggtgactacctcttgttccctgggggtgggactcagttcaagaatggtgccctccactatattgatactattcagcaggcactacctgatattgcatggggcaaacgaagccgtgtcatattggatgttggttgtggagttgccagctttggaggctacatgtttgatagagatgcgcttaccatgtcttttgctccaaaagatgagcatgaagctcaagtacaatttgcattagaaaggggaattccagcaatatcagctgtgatgggcaccaagagacttccgtaccccagcagagtctttgatgtcattcattgcgctcgctgcagggtcccttggcacatcgaaggtggcatgcttttgctggaattgaaccgcttgttacgccctggtggttactttgtctggtctgccactcctgtttaccaaaagctcccagaggatgttgagatttggaatgccatgtctactttgacaaagtccatgtgctggaagatggtcaacaagactaaggataagttaaaccaagttggtatggtcatatatcagaaaccaatggacaatatttgctatgagaaaagatctgaaaacagcccgccattgtgcaaggaatctgatgatgcagatgctgcttggaatgtaccgttggaagcatgcatgcacaaactgcctggtggctcaaaagtccgaggatcaaaatggccagagttatggccgcaaaggcttgagaagacccctttctggattgatggttccaaggttggtgtctatggaaagcctgcaaatgaagattttgaggcagataatgcccactggaaacgggttgtaagtaaatcgtatgtgaatggcatgggaattgactggtccaaagtgagaaatgtcatggacatgagagctgtctatggaggttttgctgcagctctgagggaccaaaaggtctgggtcatgaatatcgtgccgatcgattcaccagacacgctgcccatcatctacgagcgcggtttgtttggcatgtaccatgactggtgcgagtctttcagcacttacccaagaacgtatgaccttctgcacgcggaccatctgttctcaaagctcagaaagagatgcaaactggctgcagttttcgccgaggtcgaccgtgtactgaggccacagggcaagctgatcgtgagggacaccgcggacacgataaatgagctggagagcatggccaagtccgtgcagtgggaggtgcggatgacctacaccaagggcagcgagggcctgctctgcgtcgagaagtcgatgtggcggcccaaagaactcgacgctagcacgtgaactgtgttgaggaggaactgctaccacgtaggggtgaaattagaggaattttgtcttctagatatgcgtatggctcttgttggtgctgaaaggaccagaaaatatttggtgtaactgtagaacaatacatctgttttttctgccgtttgttttcgtttttgttttttcacaacgttgctgtaagttagtgctggaaatcacaggtacattcagttctactgggcacgttgttggcttgtcggatagc

SEQ ID NO: 33819 - DNA, 1259 bp, Zea mays
  Clone ID: UC-ZMFLMO17174B09_FLI
gagactattactctgaacgatcaatgtccaacttcgacgtttaccaatcaacgaacatggattataataacaactaacgcaggacactgatcccatcatataaacacctttcatcaaaagcagcactaacaacctatcaactaaacgttcgagacccgaaacctaaactttactagcgaaacaaatacgatgccacaagcgaagagttattttcacaaacatctaacaccaccacaatgcaccagtgctatcaacaagagaaacgatgtaactaacgtgtctaaccaaatccatccgaccaatagcggaagtaacgaatcggcttaccacatcacaattcgtctcgatatcagcgagaacgatgacgacgaactttggtttcaggtgttttgttgagcacctggcgagcaccaatgttactgttgccaaagctgtcgctacctcctagcagcaaggtaccaccaccaggtgtgccatcaaagaacccatcagcgccactccaacctcccaatacaccaaagcagagctcgacgccggagccggaggtcgagcgcacaggggaaagacgcaagaaccgagcggcaagggagaagaaaccgagctggagctcgcaggggagtttgccgaggagggaaatgggcagggacgatgcggcgatgggagcaggagtcagggcgccgagcgggatccgagccagggccagggagatgggcgccaccaccttggcgggcggcagaggacgcgctggggaagaagcactacggcaagcgaacgtcagagcgctcggtccgagctggttgacgcgagcagggaggagcagagccgagcggagggctgctcgcgcggccccaggcgccaggagagagccgcggacgagggaggaagaaagctccctgccgagcttgaggggcgcggctatggagatcgggagcagggagggctctgagctcgcgtggccagggaagagcgaactgagggggaaagctgggagttgggcatcatcggagctgggcgagctgggcgccatgggagcttggagtggggaagaccacagcgcgcaggggaactccgcgagcgagggagctgcgcggtaggggaagaggagcagaggaacacgagcttggggaaagggaaccggtgagcggcggagaggagcaagcgaccgagctgccgaactcctgggagggacatagtggagcagggtcatgaggaagatgcagcccggcgaggttgaagaagaggggcacgatctggagcgg

SEQ ID NO: 33820 - DNA, 514 bp, Zea mays
  Clone ID: UC-ZMFLMO17174C06_FLI
tccacacaggatccagctaataaaaagatatagttggcacccaaagttattgcagaagtttatactgcaccacgctgacttgttctacataagctaacaagctattatctgcccaacaccaaaagttcaaacaaaagtgtttttttatcataagttacaatgcacctggcttcctaagtttaaaccttcgaagttgcctgatgttgtgtcatgtcatggtaggcctcccgattgatgagttctcaaggaagaagatggatgccactgcccaagagctgacggaggagaagacgcttgcttactcatgcctcgagtaaattctaccacatccagagagcaattgccaccccaatgttttgaataaaaaaagaaactccaactccattcatagattctcactcagaactgctgcacgtcgcagtgcaggcgtgttgctggcttcgcccagcttctttttttgcctgtgatttgcacgacatttatatttattgaaatcttgcagaatcgcttgacg

SEQ ID NO: 33821 - DNA, 1729 bp, Zea mays
  Clone ID: UC-ZMFLMO17174D01_FLI
gaacataatggcaggagctctgcctctcaattaagaagaatagaattgatccagttttaaggaaaaccggacccaaaacctacacagggcgcacggtagaaaaaccggtgaaggccctaacaaaccacctagacaacagcagcctcacacacacaaacacatctagagtcattgttgccaagctcaaacacaagggacgagcagctccgactccccaagacgagccgcacactgccaaagcaactcgacgacgcctaaatccagacaccgacgcaaggaataagatcacggcgcgccatcgttgccaagcctcgcacaccccacacgaggcagctccgattcttcgccacgagcaaagatccacaacgccgaactccgggagaaaacagacgcctaaagcgacaatggccccgacaccaccgagccaagcggagtgacaaagagcctccacaacgccgacgaacacacaaactagaggtcttctgggctgtgccttcaagaaggagaaacgaagtcgaaaagtcgtcgccgcccgcctggtaccaaccaagcaaagtttcctccgaagacctcctgtcgtccgccgacccaccaacccagcaaccccaaccttcagagccccaacgtcggacgagcaccagcgaaagtccccaagaaggccgaggcgagggttcccgcattgtggtgagaggtccaaggacagcaccctcaatagggcaggggtggcgcccgcgggcgtcaccgctgtccgcccgcaagcgggcatggctttcgccagaggccctcccaccacacgccccaacgcacggagctagccgcccctgcagaaggcgccgcagacagctgcagatccggcgacggccaacgccccaaccaaggcaagtacaggcaagccacgccgccaccacagcgggccagccgcacgcgtgggtgccgacgccgcagaccagctacgaccacgcgagcgcgcaggcaccgccgcagcagccgcaaggccacccgcccaagccagcaacagggaggagcggcggaaggcgaccagccccccagatccgggcagacagcccgcagatccgaccaacccaacgcagatcaagacgccgaccacctcatcgtagacgcagacgagtggaggtcccgccaccgccaatccggtcgactgcgcaggcccaccgacgcaccacgccgaacaccaccccggcacatgcccgggaccagcctgtcgacgcctccgaaggctggcacgcggaggccgcgaaccccacgcgcactagattccagacctccacgcgcggcgccgctccctgccctgggggcgccagacagcaccttctccgcgcctgcgacccacggccggccgcatgcccccctgctgcgcgaacacccatccaggacccgcaacgcccggatgtgccatacgaacgtcgcgctcactgccgccaggatgccgccgaggctgagccgcgccggcgaagggtcgccgccccacacacgccgctgccacctcctggaacccgactagatccgggcagacgcgaccaaaccagagaaaaatcgcctcgccgccaccttccttggggccgcgcggacatccggcggcgccctctggtgacggcgaggtgggatggagtggagggagggggcggcggcgctagggtttcggccgcccgtgtagtaagttgacatccttagcaagcaagttgaggaagaaatcaataattgtagtagc

SEQ ID NO: 33822 - DNA, 475 bp, Zea mays
  Clone ID: UC-ZMFLMO17174D03_FLI
ctcgtgaagctcttcaaagaactcgaagcttgtggccgtaaacctccaagcaaagacattgtgcggaaagtcgaagatgcgtacgaaacgcttggattactagaagataaaaaggcgttgcttgataaatacaaggatttatacaacaaaccgtctcgggacgattggaagaaaggctccagatccaaaaagatcgagactgataaaccatctgatggtgacagtaaggaaagcaagatggaaacatctgagaaccttgaagaccgctgtttccctgtggatgcgaaatcagatgcctctgcttaggctcatcactgaaccaccgacgtcgccataagatttggccaaaacccggtgctgtcagcattagcgatcagcgtgctctcagtacacgtttgctcccctaaccagcctccggctatgtataatactgtgcgacgttcattactggcagcaatatacacaccccttgttc

SEQ ID NO: 33823 - DNA, 808 bp, Zea mays
  Clone ID: UC-ZMFLMO17174D09_FLI
caaaatcttgtctcatgggcacgtcctctgtttaacgacagaagaaagctccctaagatggctgacccgaggctggaagggcgataccccatgcgtgggctttaccaagcccttgcagtggcttcgatgtgcattcagtcggaggctgcttcacgcccactgattgcagatgtcgtgactgctctgtcctacttggcatcccagccatatgatcccaacgcagctcttgcttcaaggaagccaggcggcgatcagcgaagcaagcctggcgagaacggcagggcagtttccaggaatgatgaaactggaagctccggccacaaaacacctgccaaggaccgagaggactcacccagggacctcccagcgatcctgaacaaggaccttgaccgggagcgcatggtggccgaggcgaagatgtggggcgaccgggagcgcatggtggccgaggctaagatgtggggcgaccgagagcgcatggtggctgaggcgaagatgtggggtgaaaattggcgtgacaagcggcgtgcagagattgggcagggtagcctggattcagttactgggaacagctagggggcaattaagcgaacagaaacgtgacatccacccatgcatttcgtttgtttatttccaggtccattttcgttctggcggcggtcggcaggccctagggttgtacatttctaggtcagggaagagtgggaaagcggcagcgttgtactggacagtgaatgcatgtggttgtacatgtaaattctcagaaaagttttgtgagaatgaaaggacatatttgagttccacttgt

SEQ ID NO: 33824 - DNA, 1053 bp, Zea mays
  Clone ID: UC-ZMFLMO17174E03_FLI
gaaaggagcatagaacataagaggagagaccgcgcactacacacctcacgcctgaaggccagatctaagccttctcgtcctcgcccaaggacaacgataaacatctaagaaccaaacaaatcagagcacgaccatcggtctctaagcaaaacgcgcagcacgcacgtagcagagcgcgcatggggcttctggaccagctgtgggacgacacggtggccgggccgcgtccggactccggcctcggcaagctccgcaagcacgcgtccttctccccctcgtcggccgcgccgtcgccgaccgcggagggcgcggcgccgcccgccgtgacgcggagcatcaccatgctgcggccggcggcgctgtccgtcgccacgtcgccgcgcagcgagtccagctccgcgccgtcgtcgccgtcgcccgcaagcggcgctcccgactcgcccttcggcgcagcgacgacgcccaggggagagggctggaagaagctgcgccggaaaggcaggatggccgacggcgccgacgcccccggcacgccgaggagccccaccgtgtacgactgggtggtgatcagttcgctggaccgctgaagcagccggccgggccaagacgaggaggacacagcacaaggatggaggaaggcagccaccatcagcagcagctagcggactgaaggaggatcggaacagagaggccccccggccatgcgacctgcttaacagagagcttctggtcacggttctgttatactacgcgttaacggtgtatgtatatacgtcatcttcctgtaaatctccgtggtgtgaggtgctgctgattttgaagagagtgatgctcctgttatgtgctactagctagctagtgctgttgctgtatgagtacagtgtagtctactattaagggttgtcgtttggactgttagtctatagagacagaaaaatgtagaagtacgtattaaagccaatcgaatagacatgtttgtcgccatgtaaaaaaagtataatcctacgtatactcgtacgcaacgatagtaatgcgtgcttgagtgttgtggac

SEQ ID NO: 33825 - DNA, 1162 bp, Zea mays
  Clone ID: UC-ZMFLMO17174E11_FLI
tagctagtcttggatatggagccaagctgtatctggtggacatgagaatggttttttctcccttaacagctaactcctagtgacttttgcacttgcagagtggtagagagcgtgggcgaaggagtagaaggcctcgccccaggagaccacgtcgttccgatcttcaccggggagtgcgagaaatgcgtgtactgcaagtccgacaagacaaacctgtgtggaacctaccgtgtggatcctttgaagagcagcatggtctacgacgacggcacgaggttctccgtggtggaccaggcgtcaggccagcggcggccggtgtaccacttcctcaacacctccaccttcaccgagtacaccgtgcttgacgcggcatgcgccgtcaagatcaaccctgaggccccgctgcagaggatgtgcctcctcagctgcggcatctccacaggagtgggagctgcgtggaacactgcaaacgtttctgctcggtccaccgttgcagtgtttggactcggcgctgttggtcttgctgtagctgaaggtgccaggctacgaggggcaactcggatcatcggcgtggacgtaaacccttcaaagttcaccaaaggtaaagagatggggataacagacttcatcgaccctaacgacatctgtgacaaaccggtccatgaggtgatcagggagatgactgacggaggtgtcgactacagcttcgagtgtaccgggataaatgatgtgctgagagaggccttcttgtccacgcatgatggttggggcctgacggtggtgctagggatccattcaacgcccaagatggtgccgctgcacccgatggagctctacggccgtaggatcaccggctgcgtctttggcgacttcaagggcaagtcccagctgcccgacctcgtcgataaatgcgtcaacggggaggtcaatataaacttcgatggcttcataacacacaagatgccattctcggacatcaacaaggctttccggttactcgaggaaggcaagtcgctgcggtgcctgctcagtctctgatcgacaatacttcatcagcgaggacagttttggattgagtagcaaaataaatgtacaaggaaagtttttccctcgtatactcgcttcttataaaacgaatgcatgcaacttcttttgttctttg

SEQ ID NO: 33826 - DNA, 1430 bp, Zea mays
  Clone ID: UC-ZMFLMO17174F01_FLI
gttaacttgcaaatggaattgtgggatcctacattggctaaaggaattaagattttcttagcaacatcaactccactctttggacacgtagctactaattacaccgtgaactaccagaaggccgctagtttcattcagttgagctgcagtggcaatggtatttccttctcagaaatgtggaccttgcaattataacttcgttcagcatatgaagagtagctcttctgaaagtagttctcatgaagtggttgcctgtttcagttccatgtgactggtgtaagcatttcttgctgaatgttagttggctttatcttttagtgcttatttggaatttttatacttgtttttcaggatatggaatgcatgcaggcccttcgccaccacgcagagcagaagccagcaaatttgatgatgatgttagtccacgttacactcatggatatcaagggggtggtagaggaggtgcaaggttccgagagggtcctccaccatatggaagaggtagatcatatgggagaggttatggtgctccacatggaaaggatttgattaatattgatggagaatatgttcaccgaaatgacccaaatctgtcgccaagagaaggtgattggatatgccagaaccctaattgtggaaatctcaattttgctcggcgaactcactgtaacaactgcaacaagttccgctattcagcacgtgaagcatatgaacctaggcgcagccctcccttcaggagttaccccagccctccacgagggcctccaaggatggttggtccacctggtgatcgagcccctgcaagagagatggccaggtacagatccccacctcatggttggggagcaagtgatcccagggcatatgcaggtcgatcccctccagaacgtgcaggacggtttacagatccatcaactaagggaagaatgggcttccgtggtgagcgtgacccaagggaccgtgtgaaatatgagtggtctgccactgatgactacgttcagagggagcgcccatatgatggttatcttgacaggagtcggcgtcgctcaggatctcctcgtggtaactggggaaatgatctgcgtgacagaagccgctctcctgcacggaacaggcctatgaagagttccttcaccggaagaggtcgacctgacgactatgctgctgatccatatggcagccgagggagacccaatggtatggaggccggccgtgggcgtgggcatgcttacagagcaggcagtggtccgtaccctggtgagactcgaggtgaccaacgcgctgctccacgcgctaggaacgaggatggctattagatcttcatgaagctgagtgacgtcattttgtctttgttggtcaggaaaggagaaccttagtcaagctggagcttgagaatatctgcagcttgtaatattaaagatcgtgcacac

SEQ ID NO: 33827 - DNA, 1387 bp, Zea mays
  Clone ID: UC-ZMFLMO17174G09_FLI
aaaattttcaacatacggttacattgtcggatggtaccattccagaaggtactgtgagagtttcagaggctgcaatacaaatctcaaggtgccgcgtttctgagtatctcaatttgcatacatgctatgatttactcccggattcgggcaaggttattgctctggacattaatttacctgtgaagcaatcttttcatattctgcatgaacaggggattcctgtagctcctctctgggactcattcagaggtcaatttgtcggccttctgagcccattggatttcatacttatattgcgggagctagaaactcatggctcgaacttgacagaagatcagcttgaaacacacactatatctgcatggaaagaggctaagcggcaaacttgtggaagaaatgatggtcagtggcgagcacatcagcatctagtgcatgccaccccttatgagtccttgagggacattgcagtaaagcttttgcaaaatgacatttctacagtgccagttatttattcatcatcatcagatggatcattccctcagttattgcaccttgcatccctttctggaattttgaaatgtatttttaggtattttaaaaactcaactggtaatttgcctattctgaaccaaccggtgtgctccattccgctgggttcctgggttccgaaaatcggtgatccaaacagtcgtccattggctatgttgcgacctaatgcatcacttagctctgcccttaacatgttggttcaagctggagtgagctcaataccaattgtggatgaaaacgactccctgcttgacacttactctagaagtgacatcacagccctagctaaagacaaggtctacacacatgttcgcctggatgagatgaccattcatcaggctttacagcttggacaagatgccaatacgccttttggattttttaacggtcagagatgccagatgtgcctccggtctgatcctttgctgaaggtgatggagcgactggctaatccgggggtgcggcgggtgttcatagtagaagctgggagcaaacgtgtggagggtattatatcactgagtgatattttcaagttcttgctgagcttgtgataagagaagaggagcatgacggacatttgtttgtgatcaatagtaagaaaacagcagggtatgtgaagcaagctgccatggatctcgcatttcccctccccctccggcctttggtcaagtaaggcaggattgaaggtggcgggctttgtctttgctgataatggctgttggaattcatggtctgtaaagttcttttttcccctttgtttttcgttttaaccattttgtgcctcccgttgttaccaaaaatatctggtgatttttattattatttttggattgtttcc

SEQ ID NO: 33828 - DNA, 1556 bp, Zea mays
  Clone ID: UC-ZMFLMO17175A02_FLI
gtgtgtcttatccaagggctatcctgtatgcctgtaaagctttagatttctggacatatgaaaacctatctttttatggacatatttgttcacataataatagcttatgtgtatatttattcacatacatgtatctgatcgattatttcaatattctactctacttttaatccttcagaagcttaaaaagtgcatgtttttgtcataaattctgtaaaggatttgcttttcatgggattatgataaaggaagttgtttaaatttgacaaatgctatcaaggcagtggacaagtaattcatcatttttgccttacacttttcatactaaactattttttatatggttctttcttgcattaaacttgtgcaggtctcttttgctattaaacggtcagggggtaaagaccaagatggtagtgaagtatttgagtggtttgagagatatgtggtcccttcaaaactggatgttagcataactcaactagagctggtaagtatcaagaattaggtattacttctgtgcagaattctatggccttttcttattagaggtaattatcatttgctattgaaaatatacagatttctgtcagaattttgcattgctactctttatgatccttttttctggtcaaatgttaaataaaactaggtgatgaaccaagatttataagatttattattgcgctgttgctatagtagcacttccacctcattgatatcttctattgaagaaatggtcgaatatatctaatatctttcattgcagtgctcactgttatcacagggtggtgatgtaacagacaaacatatcacactattgatgaatgctggtctcttagtaagtaacttcatatttattgctttaagatcactatcacggatattgaggccatgatttcaagaaagttatgttcaaattccaattccatgtactaaaagaataaatgtagctgtactcgtatcatctgttttcatgcgtgtctacttctacacctagcatgaaaataaaatgatttatcttctctttaccaattgtacttgcttaacattgctgtttatgctggattccttattccttccagactcgtcaacttattgatccaaatatttactggttttctattccaagaattggccccatattgaaaggcctatcccaggtttgtgcaccttcctaaatattttcagttcttgttttacgaagttgccagcgtggacatcttttaccatctgagttggctgtgttgagcagggcaggaaggaaattctttcgctgttgaaccgtagaaagtacaaggagatgccgctttcttcactggagaatacaaagttaagattatcacctcttgatacgcggttcctccttcgcgatttgattggatctgggcacataaaaacagttcaaacgcccactggtttgctcgctcgcgtatcaagagattaatagagctctctgtcgtaatcctacttatctgtctgccttatctcttatctgatcatgcacgatttggtgattctagtttcgttttgcattttacctgttttcaaacagc

SEQ ID NO: 33829 - DNA, 2071 bp, Zea mays
  Clone ID: UC-ZMFLMO17175C02_FLI
ctccgcttcctcgaggccacgtttcgccggctgcctgccggcggtccaccataacatgggcggcgggcggaagcggcggcggcgcgacggctcggagatgccgtcgatgcacccgcggaaccgctacgcagccgccgcgccagatttcgccgcgctggcggagctctacccgtcctttcgccccttcgtcttcatctccggcagcgggcgcgcgtccgttgacttcaccgacttctcctccaccagggagctcacgcgcgtgctcctcctccacgaccatggcgttaactggtggattccagatggacagctctgcccgactgttccaaacaggtccaactacattcactggatcgaggatcttctctcctcggatctgattccaccaatatccagctcgagtgagagagtgaagggcttcgacattggaacaggtgccaattgcatctaccctctccttggagcatctttactgggatggacctttgttggatctgatgtcactaatgttgctcttgaatgggctaagaagaatgtggagagcaatccacacctggcagagttaattgagatcagaaatgcaaatgcagcaccatctgaatctgaaactgttgtcagggaagctgccagcgagaagattttagagcctgcggaggatgtagctatgccaaagccacatatccttgtgggtgttgtaaaggagagtgagagctttgacttctgtatgtgcaatcctccattctttgagagtacagaggaagctggccttaacccaaaaacatcgtgtggtgggacagctgaagagatggtttgcgctggtggcgagctggcatttattacacaaatcattgaagatagtgtttcccttaagaactctttcaggtggtttacatcgatgattggcagaaaggcaaacttaaagttattgatctcaaaggttcgtgaggctggggcatcagtcgtgaaaactactgaatttgtacaaggtcatacagctagatggggccttgcttggtcattcattgctccgaaaccaagtaaaatagtcctcggctccagtgctccagcaaaaaaacaccattcctttatgcttcaggggcttcgtcgtgaacatggtgcgttccaaattctgaaatcaactgaggctttctttctagcttctaatctatcatgcaaaacggattcgtcggccttttcagtcgatgtcacattgtcagatgagcagattgaggctgcaatattgcatggggttgattatgccggttctctagaagatagctctgcaaagttacaatgcgttgtcaagggaatatcatttcgtattacagtgtttgaacaaattcctgggaccctcctaatcaaaggttcattattgaataaagcattatcaggtaccttctcatcattgttttctcggttggaggatgcgttaagggcggaatgtctcagtaaggcgcgatagatctttaattatgagctttgatgcctctgcacggataagtcttctggatgccaaggaatgtgcaaaacgaaatcatgggacggcaacagcgtattagcttatagccaggagtcacaaacagagacgctaagcggtgatggaatctctgcacttgcactgcaggaaccattgttgctcgcatgttttcttgatgtgcagtgacggcaagtttgtgggaataccagcatcatgtctggtgtgctggctgcttatctggatttggagaacgacttgacatgacaacaatgggggtcttgctttcaaggccccctgcagtggcacgcaccgtaaaccattccagtgacactgagtagatgacaaatgcagcatcagtggtctgtgcagaccggggtatctggtacactgaattgcctccagagttttttctttctttctttttccattctttctttctttctttgctatggcacgggaagtcagatgaaggctttgaacttcagtgaaccgcacagtgtatgaaactgctgctgcttcaaattaatgggtttctggaacatgtttgtagcacaatgcctctggccggtagcagtggattatgtaactgtctct

SEQ ID NO: 33830 - DNA, 2006 bp, Zea mays
  Clone ID: UC-ZMFLMO17175C10_FLI
cgccgtggacacggtccacatcaagatgctgagccacataactccggtgggtgtgggtccaacgccccccacctgcacgctggccccccgccccgccgcgggatcaaatacgccgcctccgcccgtccactccctcgccgcccccgtctcctctcctctcctctcccccgcatccacggccgcaggccgcagccagccactcgacgatctagtcgtctctctctccccgctctgccgcctcgctgccgcggcttcccgtcggctggaggatgaaggtcacggtcgtgtcccggagcggccgggaggtcgtcaagggcggcatcgacctcaaggactcggccaaggtcgcggacctgcaggaggccatccatgccaggactaagaagtattatccttctaggcagcggctcaccctcccccttcaacctggaaaaggcgggaagccagttgtcctcagtccgaaggccagcctgctagaatactgcgagaagggttctgggtcactgacagtggtcttcaaagatttagggccacaggtctactacagcacactgttcttcttcgagtacctgggtcctctcatcatctaccccatgttctactatctgcctgtctacaaatacttcgggtacgagggggagcgggccatgcaccctgtccagacctacgccatgtactactggtgcttccactacttcaagcggatcatggagacattcttcgtgcaccgcttcagccacgcgacgtcgccgctctcgaacgtcttcaggaactgtgcctactactggaccttcggcgcctacattgcttactactgcaaccacccgctgtacaccccagtgagtgatctgcagatgaagattgggtttggttttggggtcgtctgccaggtcgcgaacttctactgccacatcctgctgcggaacctcaggagcccaagcggcagcggcgggtaccagatcccccgcggtttcttgttcaacatcgtgacctgcgccaattacaccaccgagatctatcagtgggtcggcttcaacatcgccacgcagaccgtggcaggttacgtcttccttgtcgtggcggcaggcatcatgaccaactgggcgctcggcaagcacagccgtctgaagaaggcaagtggctttcttccctgcgtacttttttttgatacgaggatatccccatttctattacatgcgtaacagaaatacagagttcattagaagcatactgacatagacagaacaaggagtgggaaaagggactaccataaaggaaagatctggttcagatcaaccaacaaactagctaacgcaaccagaacctaacagcccaaattatcaccaatcagccaaaagcatcacagaagtttttgtccacgcaggaacatagtcagcataacgacattcagaacacataacaagcagctcctgtttgctcgaacctgcccatgacacaattagagcaccagctcgacaaacagtttcaggaggggggcttgatcacaactctgtcaaaacacatcttatttctagctttccacaaggcccagcatatagcagctactaccccgatgataatacgtacacatcattagcctttggcaaatttccctgcgtactgaccactgccgtcggcgtcgggaatatttcgtagctcatcttcttgacttcttctgcagctgtttgacggcaaggatgggaggcccaagtaccctcgccggtgggtgattctccctccgttcctgtgaagaggtggtggtggtcggcctattgtgattcgatgtctacagacagttgtactgtactaatcgtgcctgtttagcggttgaacttggattccgttgtccgaaatttctaatccgaaagatggatttcattgtcttcttcttcttagcattatgtcactatctcacgtcgtcctgtctcaatacagtctaaggttcatgtgatgttatccccatttgtccacgcacaagtgaatgcagtcactatttcgatccgccc

SEQ ID NO: 33831 - DNA, 2560 bp, Zea mays
  Clone ID: UC-ZMFLMO17175F05_FLI
gatcgatttgtcaacgaatcagctcaccggagatatacctgaagatttcggcaatctcaagaacctcacaatactgtttctgtacaacaaccagctcagcggcaccatcccggcaagcatcgggctgttaccacagctcaaggatatccgcttgttccaaaaccagctgtccggagagctcccgccggagctgggcaagcactcgccgttgggcaacctcgaggtgtccatcaacaacctctccggcccgctgcgagagtcgctctgcgccaacgggaagctcttcgacatcgtcgccttcaacaacagcttctcaggcgagctccccgcggaactcggggactgcatcactataaacaacctgatgctacacaacaacaacttctcaggcgacttcccggagaagatatggtcgttcccgaatctgaccttggtgatggtccagaacaacagtttcaccggcaccctgccggcccagatatcctccaaaatggcacggattgagataggcaacaacaggttctccggctccttcccggcctctgcaccagcgctcaaggtgctccatgcggagaacaaccggctgggcggcgagttgccgcctgacatgagcaagctcgccaaccttactgatttgtcagtgcccggcaaccagatctctggctccatcccaacatcgatcaagctgctgcagaaactgaattcactcgacatgagaggcaaccggctgtccagcgccatacctcctgggagcatcgggcttctcccagcactgacgatgcttgacctgtccgacaatgagatcaccggcagcatcccgtcagacgtaagcaacgtgttcaacttgcttaacttgtcatcaaaccagctcaccggcgaggtgccggcgcagctgcagagtgcagcctacgaccagagcttcctcggcaaccggctctgcgccagggcggactcaggcacgaacctcccaacgtgtccagccggatgccgggggtgccacgacgagctttccaagggcctgatcatcctcttcgcgatgctcgctgccattgtcctcgtcggctgcatcggcattgcctggctgctgttccggcgccggaaggagagccaggaggtgacggactggaagatgacggcgttcacgcagctcaacttctccgaatcggacgtgctcagcaacatccgcgaggagaacgtgatcggcagcggcgggtccggaaaggtgtaccggatccatctcggcaacggtaatgccagccacagcgaggagcgcggcatcggcggcgacggcaggatggtcgccgtcaagaggatatggaactcaaggaaggtcgacgagaagctggacaaggagttcgaatcggaggtgaaggtgctgggcaacatcaggcacaacaacatcgtgaagctgctctgctgcatctcgagccaggaagccaagttgctggtgtacgagtacatggagaacggcagcctggaccggtggctgcaccaccgagaccgggagggcgcgcccgcgccgctggactggccgaccaggctcgccatcgccgtcgacgcggccaaggggctcagctacatgcaccacgactgcgctcccccgatcgtgcaccgcgacgtcaagtccagcaacatcctgctggacccggacttccaggccaagatcgccgactttgggctcgcccggattctcgtcaagtcaggcgagccccagtcagtgtcagccatcggcgggacattcgggtacatggctccagaatatgggtacaggccgaaggtaagcgagaaggtggacgtctacagcttcggcgtcgtcctgctagaacttacaaccggcaaggtcgcgaacgacagcggcgcggacctgtgcctggcagaatgggcatggcggcggtaccagagaggcccgctactcgacgacgtcgtcgacgaagccatccgggagccggcttacatgcaagatatcctgtcggtgttcaccctcggcgtgatctgcacgggggagaacccgctgacgcggccgtcgatgaaagaggtcctgcaccagctcatcaggtgcgagcagatcgccgctgaggcagaggcgtgccaggcgagctaccagggcggcggaggcggcggcacgccgctcctcgagtcgaggaagaaaggcagccggcgacggagcatgtctgactccggacggtggaacgacgacgacgaggaggacagcggcaacttcgttgtgcacgtggtgtagtcggttcggacagtatacagctactggcctcctgctgcaagctcatccatggaggaatttggtagaggcgccggaggccggcctctgcggagcaggcgcctgaagatgaccgatccggcatgagcgcaagaacaaacaaccaagtgtagtatatagatgaatgaacgaagaggtaaggctgtgatttagctacaaaaccacaagccaatctccaatcacacaagaaggaggttctggagatgttggatcgcgatcgcacttagcaagtgtcaatactgcgtgtaataacaagtgccagttttgggcacttttgggtttcag

SEQ ID NO: 33832 - DNA, 1051 bp, Zea mays
  Clone ID: UC-ZMFLMO17175G10_FLI
ctgcgccgcaacccaacccgcatcgagctcacctcctccgaccgcgacgagctcgaagaccacctccgcgccgccgcggcgagctccgcggcagccgccaccaccaaggatccttccggttacaccactccgtctccagtccttggcccgcagacctccaatcccctgctccaattcctccacccgaagcccggcgccgcgccatccaagtcccaacgcatcggcatcggcctctccaccccgccggctccggccccgaacccgcgaccaccccatccaccccatggaggttgagatcaagctccgcctccccgacgccgccgcgcaccgccgcctgtccgcgttcctcgcgccccgcctccgccgcacccacgcccagcggaacctcttcttcgacgacgccgcgcgcacgctcggagccgccaccgccgcgctccgcgtccgcctctacgacgggcccgacgaccgcggcccctcgcgcgccgtcctcgcgctcaagcgccgcccgcggatcgaggccggcgtcagccgcgtcgaggagatcgaggagcccctcgagcccgcgctcgccgtcgcctgcgccgacgaccccgcccgcctcggcggcctcgactcgccgatcatccgcctcgtcgccgccgagtacggcgtcggcggggacgccgcccccttcctctgcctcggcggcttcgggaacacgcgcgctgtctacgagtacgagcttgaggacggcggcggcggcctcgtgctggagctcgacgagacgcggttcgactttgggaccaggtacgagctcgagtgcgagacggcggagcctgaccgggtcaaggaggtgctggagcgactgctcacggtggccggcgtgccctacgagtactgtcggaacagcaagttcgcctgcttcatgacagggaagctgcttccttgactaggcatagccttgtccgttcttggtatttcccttcttcgtgccattaagctgcatttgaacaacttgaatggaatgtcagtgacgctttgaataatgacaaaaataagtgtggcttctcat

SEQ ID NO: 33833 - DNA, 815 bp, Zea mays
  Clone ID: UC-ZMFLMO17180G06_FLI
caagggtccacgtagtcgaggactacagcaagaaatgggggtcaacaagtctgcagttctgcttggtgtggttttggtctcagtccttctcttcctggacgttgtgtacgcaagggagctcactgaagccaatggctctggagtgaagaataatgtgaagcctgcaggagagcctgggctcaaggatgagaagtggtttggtggtggatacaagcatggtggagggtatggaaacaaccagccaggatacggtggcggaggaaacagccaacctggatacggcggcggaggaaacagtcagcccggatacggtggaggatacaagcgccatcaccctggtggcggctacgggtctggacaaggagggcctggatgtggatgtggaggagggtatggaggtggcaatggtagtcctgggtacggcgatgacaatggtggtggcattggcactggtggcggaaatggcaatgctggtgggtacggaggaggaggcggcggttatggaggcggctacggcagtggtagtggtacagcaccaggaggcggatatcatggcggtggtggtgcacaacgctacgctgggcagaactagcaagaacaaccccttatgctagtttatgttaaataaacgatccattgttcatgtgactgagcaatttaagcagtgaaggatcttgactcgtgttatttgtgttaccatatgtattgattgttttatgtttaagatgaatgtacaccgctatttgtatgtcgaactcgttgcatggagatgaaaaaaaaaggcacaaaaacatcagcaaaccatgctttccttc

SEQ ID NO: 33834 - DNA, 2854 bp, Zea mays
  Clone ID: UC-ZMFLMO17180G09_FLI
aagaaagtagggggaaagcagggaagtaagctaatgagtactgttttttatttataatatttgagcaagtcattttaaagtattgtcctaaatactgatgtgttctcttccggtattgatgttatctgtcttcttggcctatatttgacgcaaacttcagttctcacagaaacaaatggtagtgtgctctatttgatcttgtcaatttgttagttacttgttgcgcaggtcagtgtgaggttttctcaattctttttttagttctcatttttaattgtaattccacctaaatgattatgtttctgggctgtttttatttattctgactgttttctttactactgtctaatttagttctcaatttcttgtgcagtgtccatgtactatcttgtgcggatttcgcgcaccatatcacctcctaccggatcttttcagctcttcatcagaagccccgtctaggtcggcagagcctgcttatcttgcacattttcctacactcacaaggaatgtgcctggattctagcgcctcgccggagcatggggtcatcgaccccatcgacggcggttgtggaggaatggaggaatatgataaacggcggcgacggccagaagaggcgcaacccaaatatcattcgctttcaacaccacattgagttcgaccccaagttcttcgacaagtcgtggcgtaagctccatgacgccatccgcgagatctgcaaccacaactgcatcggcctctccttcgaggagctctacaggttaacattgcatgcttgcccctggtcccttggcttttttggttgtcgccctgttccatcagattctgttccagacacttaggtcgcgctatatgatcgcagatgattcggatagatagtggtcgtgaatggattgattgctgtgctgattggtgatctgtaattttcatgttttaatttataaccaatccccgtgtgggcttgtcagcttctatgcatgtgaatagattagtgtagtagggcttgtcctgttaccataatttatcaacatgatattaggatattttattattggtagttgctcgaagcctttagtttaggccatttgcggtgtcattttctcggtctcgtcattaaatgcttaaacggttggagatcttcttttgattccatgttatgcgtacaccagagctgactaacgagaactgccatctagacatgcttaaacattatttattatctagagaactcccttaataatcttgtgctcgtgttcctgtacttcataatatgtcttggcatcgatactccctgcatagtttgcacttagcagtccaagtaaatgggttgtaccattcccttgtctaatgatacgaggagattcgactatggtgctccaccactctccctgcatagttggcccctgcatttcctaccccacctactaccactccttcaaatttggctccatcgtttaccctaattgctgctggtggtggttcgttgcgagcaaggaggactgagagagcaggacgccaccaccattacttcctggtaagcaattccactaccacgacgaccgcttttctgttctttgcgtcatctcattctcatgactgagttggatagaatcgtgagatgtgcggtagtacatttggttaaagtctgtatttgtgaggtgactatctatttgttccttcgaaatgtcagggtggcattcaaagagttcatattataaaaggatgtgtagatggatcacttctattagaattgtttacaggagatggagaaggaacaatgatcgctagactggaattgaaggtttgcaggcaataaaacctcgtctgagagatcagtgcaataaaaaaggaccatcaaacaatcatgagatgggcagagattttaatacttcaagttatgttggtgaccatggagttgatgttgaagctaccatggtcattggcgaagtcgagattgagggtgccaaatggacaatggataatgtcaaagtttctgtcaaagaaccagaatgagctcattttagtcaattgtctaaacctgttgatttgaatctgctttctgaactgtttatccatttgagctttgcagatcgaggcggttgcaacaaaagaagaactagagcaccttgtgatgctttgcagatctgaggctgatgcaatggggaggatcactgctggaattcttcgtctccttaaacttgacaaatctcttgggcaaggaactatagaacaactacgtaacctaggaagtggaggcatggacaatatcttttcacccaggaggctcagcaggcagaacagttttggtagcataggcactcctcggactccaactatgcaagccattgcagacgtcatgagttcgaaaaccacactggaagcaactatttcctcattacaaggcgagatttccgaatccaaggccaaatgtatggcactgatttctcaggcaagcagcactgaggatcaaaaccgtgccgaggacatcaggcagcttagcgaaaagctcgagagcatgcaatcgttggtgacacaattaaagaactttgatctgactatctgagttgtgcatgttttttgtgtgtacagtacacaaggtcgttctgttcaaactcggaagtggcaaatgctgcttcctggtggctggttgagttattcttgtgtacatttaagggggtgtgtaaagattgggtggaataatcggttgataggcagctcgaggaaattttgtaggcagctggtaccggcaatatgctttgtagcacgacatcatgatcaaacgggtcactaagaagagtgcagtgccatttatatcattgtatgtataaaatgtgcacagaacgttgcttttcgcgc

SEQ ID NO: 33835 - DNA, 1562 bp, Zea mays
  Clone ID: UC-ZMFLMO17180H08_FLI
tgagccttacacaccaacagctcagagctttggtggtgggaacctgtagaggggttttattcgcctgaacttagaggggatcttggtgctggacttctagaccttcatgctatggatgatactgggcttctgtctgaggatgtagcatcggaaccatttgagccatcaccttttatgccgaaggatattgatgatgatgatgaggatgtgatagcagggagtcagcaagcctcagtagataattatggtgtggtgaccagtgaaaaagagaccactgctagagaaaataatgtagcaaagattaaagtagtggtaaggaaaagacctttgaacagaaaggagctatctcgaaaggaagaagacatcataactgtggaggattcatcatttttgacagtttatgagcctaagctgaaggtggatctgacagcctatgtggagaagcatgaattttgttttgatgctgttttggacgaacatgtttccaatgatgaggtttaccgtgaaacagttgagcccataattccaattatatttcagagaacgaaagcaacatgttttgcttatggccaaacaggtagtggcaagacgtacacaatgcaacctttgcctctgagagctgcacaagacatggttcgtctattgcaccaacctgtctatcggaatcagaattttaagttgtggcttagctattttgaaatatatggtgggaaactatttgatcttctatctgacagaaggcaactactgatgagggaagatggcaagaaacaagtttgcattgttggtctacaggaatttgaggtgtctgatgtacagatcgtaaaggaatatattgaaagaggaaatgcagctagaagcacagggtcaacaggggccaatgaggaatcatcaaggtcacatgctattctacaactggctgtgaagaagcatatcattgtaaaagataccaggagacagagagatcgtgatgctaatgaagctaaaaatacaaaggctgtggggaaaatatcatttattgaccttgctggaagtgagcgtggtgctgatactaccgataatgatagacaaacaaggattgagggagcagagataaataaaagtctgttagctctcaaggaatgcattcgagcacttgataatgatcagatacacattcctttcagaggaagcaagcttactgaggtccttcgtgactcatttgttggtaactctaggacagtgatgatttcttgcatttctccaaacgcaggttcatgtgaacacacactaaatacattgagatacgctgatagggtcaaaagtctttccaagggcggaaatacaagaaaagagtagtcctttttacagtggggctgcttgggtgtttttttttggcagatgtcatgtatggcttgcccactttgcctttttttttcttttccccattttgtacgagaaactggaatgtctggaatgttgtttgcagacaccggtgggtcgatattcaccgagggggtctgtggaaaccgatacattgttgtatactagtcggttgaccgtgcgttgcaacggcttacaac

SEQ ID NO: 33836 - DNA, 2021 bp, Zea mays
  Clone ID: UC-ZMFLMO17181D05_FLI
caccccatatcaccaccactgatggcggcgcttccccttctccgccgcctcctggcccaccgccgccctctctccaccaccgccaccactcccgccgcctcatccagcaagccccctaccccagaggccgtgctctacgccatccacagcctctccaaggatccctcccaagcgctcgccgtcttccgccgctccgccgccgccggcaagcccgtaggctccgcggcatacaacctcatgctccgcaccctcgcctcccacccctcctccgcccagcgccatttctggcccttcctccgcgagatgcaggaggctggccactccgtcgaccagggcacctacctcgctgccctcgcctccttcaagaaggccagcctcaccgccgactacgcctctctcaccgcgcactacgacaagttccggaagggggacaagtccgccgccgccgccgccgcggaggccgtccgggaccacgacgccgcgggacttgatagcaggctcgctgacatcggtctccttccgttcacggaaaccgctgtcatcacggtgctccgggagctgagggagcatccgatcaaggctctcgccttcttcagatgggctgggcggcagcagggttacacgcacagctccgtgagctacaatgccatggcaagggtgctaggtagggaggagtcggtgcccgagttttgggagttgatccgggaaatgaagggtgccgggatgtacgtggatattgacacttacctcaagctgtccaggaacttccagaagcgtcacatggtccgggaggctgtggagctgtatgagctaatgatggatggccctttcaagccgggccagcaggatggacccatcatcatcaggcgcatctcgctggggccgtcgccggaccttgagcttgtcaatcgggttgtcaacaagtttgaggccgtctggggtgtcaagaccaaggagttgcttgatggggtccatagggcgcttacaagtaatgggttgttcgataaggctgcagagattgtgcaaactatgagggaccaaggccaccagccggacaatgttacatatagccagttggtgtatggtctttgcaaggccgacaggctggaggatgctcgcaaggtgctcgatgaaatggaggctgaagggtgtgccccagatttgaagacttggaccctgttgatccaagggcactgtgtagctggggatgtggacaaagctgtgcagtacttcaccgagatgattgagaagggcttggacgcggatggcgatttgctcgatgtgatattgaaaggtctgtgtagccatgaaaaggttgaagaggcttactctttgtttgttgagatggtggataaggctgagttgaggccttggcaaggcacttgccagcatttaattggtgacttgctgagggtaaacaaacttgaggaggccctggcccttctcaagacaatgaaaacctgcaagttcccaccttttgcggacccgttccctccttacattgccaagtatgggacagttgaagatgcaaggaactttttcaaggcattgacagtgaaaacttctccagcacctgctgcctacctgcatgttctcaagttgttctttgcggagggaagatattctgaagctcaagatttactgtacaaatgccctatttacatccgcaagcacccccacgtcgccaaactgtttgaatcaataaaaattgagagtgcctctgcctcttgtttgggttcaaccaagcaatgattggtgaggctatggtgaacccttacctttgcttgctagctagctttctgtttttaagtagccttggtattgggtcttttaaagacatatggttcaactaagtcgaattttagtatatgccacttccagcccatgacctgctggcatattcccctataacttattagcttaagaggaaggtgccaactggcacgtccttgagactttttttttgttgttgtaatcattgcttctgcttgctagatcgttatacagttggattttccttc

SEQ ID NO: 33837 - DNA, 2792 bp, Zea mays
  Clone ID: UC-ZMFLMO17192B10_FLI
gcgtctgccagtgcgccgcccaccccggtcgcggtcatcgcagacaattggggcgggtgctttgacgacggcgagcagtaccgcactaggccatccgtcgtcgtcgacaactggggcggattcttctatggcgaggacgtcgctccgtcagacaaccccacgagattcgtcctccccgttgcctccaccgacgagcccagcatcgacaccgcgccggcccgcgccaactctggagccgcggatgactccgtgtttgtgaccgccgaatcctccggctacgaggaaccctccggctacgacgagatggatgctcgactcgacctgcgcttcgccaggctgcagcagctgcaagctgaggaggtggacgagccgtaccgtgacgcggtgagcccactgcctcctctacccgtcgtctacgagccgtaccgcgaggcaagccatccgcctcccgtccacgacgacgttgcgggggtggtgtccacgggctcggatgatgacctcgacctgcagcagatcgccaaggagccgtccgtgtcgtcgccgccgcgtcacagctcgagagacgccgtccgaggtccttgccctcgtccactgcatcaccagctaactattcccatcgcggccaacctggaccaaatctgccgcctatccaggccctgcgatgtggccgaccggggtctcctctgtgacctgctctggtccgacccttcttccatggaggacagagagtgggcggacaacaaggatcgatacgtgtcctgcaccttcggcgccgacgtcgcgacggactgccgccgcgcgcaggacctggacatcgtttacagagcgcaccaggtggtggaggacgaatatgagttctctgtcgaccgacagctcgtcaccttcttctctgcccccaactaccgcaagctcggctgctccttcaccatcatcaagctgaaggcggacagaaacagcagctcgcccctcgggtgttcgaccaaatgtcccagccaggcactgcaccccattgtcaagcccaatctagtagtcgtgctgaatattgcaggtgctgggggcaagttatgtggaggatttgatatcaaagttttcacaagggttcatcagactggggatgtatcgcttatgccaaacgtatccattgagcttgtgtcaaacatgatggaacagggcaaacaaccttctgttgcagccattccaggtcttgcattgggtggtggcctagagttgactatgagttgtcaggctcaaatacctactcatgttgctcacaccatctgctcgcttgttaacaacgttatggcatcgcaggctcatgtcgtcggacaagggatcgtagaccgcgccgcgttcggtggcgatcaccaatggatcgtccaaggtactgccaatggtcacgggctctcctccaaggttgctgctgaggtgaacaatcagtttagagttggtattcagactactgcgattattcatgtgctgccaaggggtgtcctacagtttggctctactggtttggctttgggaaacaaaaaaattgtgatgtttgcaaagacgttgtgttctcagctaaacaatcgttcaagcctagctgcatctgcttcggctaaaaacacttcaagacagcatggccagtcacttattgataatgcaattgtgtcaaccagtacaccaccaaatgtattgttgattgcatctttgctttgggctgcacaacagaatggtcaccctgagctcattggaaaaacaccaatagtgaggccatcattagatgttgagagacacattcttctgaaaggagcttttgataaagctgaggaaatagtcttgagaatgaagcaatgggatggtactgcgggacttgtttggcagaaggatagcttaatggtgcccaagtggcttactgacagattgatggcatttctaatattctatagtgaggccattacagctcttctctgttgtgcactcattcctggcctgttattgctagaattagtcaagttcacagagacttggcaagggactgtttgctgggagccaacaatcctattgttgacgcggagacacctttacaaacagaatgagttgtatgcgacactttttgagggagctatgattgggtacactccaggaggaatgcaatttgctcaagaaactatagagacgatgatttcaagcaatctcttcttgactgccgagatggccaatactctatctccatggccatggttcaattgcgttcaagagtgtgtgctgtggcagtttgatttattggatatatcggctcttcatgcatcgagaattggtttttcatttgtgattatactgacggaatctatcaaagtgctcaagatgctgctagtagaccaaggtgctgcaggacatttctttgtcatgatttgggatcctggtggaattgatgccatgtatcggcttgagggcaagccgaattttaagaaggggagaatgtcagcagcccgccatctgaaccatgagccactgtcactgtctcaacaaggaagctggaccaagacgagcaagtagctgatgaagatactttcagagtccggcgatagtttctgttgtgcaaaataccagtgtgcaagaggccgagcaaatgtaacgcatccaaaggcccacagtccgcttcgtcttggcccagaatagcgtgtaaaggttgcgtgtgtctgtgttgggctgtggcgctgaataagtacgcgcgccgtcaagatccttgtatcgaacaactgaacaaacaattattctctagaaatcacatctgttcttctcct

SEQ ID NO: 33838 - DNA, 1842 bp, Zea mays
  Clone ID: UC-ZMFLMO17199H06_FLI
gttcagtcgaatgaattattatcgctggctcttggtttctctgtcttctctctcttaagtcgagcagcatggctgtccaaggatgttgtgtggttatctgcagactcacagtttggagagtatgctgcagtctctgcatggctaaaccagtatcataatcccgtgtttttgagtcactcagtggtgtcacataccaagatgtacggtgcaaacaatatatatgatggtaattcagaaaaaacagaagccacggctttcaaacgtgctggaacaatggctgctgctctcatatttaaagttggggaaaccagaagatacagtgacagggatagtgttacgatttatgcagaggcatctaatggacaaatgccaaacttggaccttctgaatgtggtgcactatttggctgttcacagacaaggttttcgtgtgaacatcgctgcatttagttctttgttgagctctgcatggctcagggttattgctgaaattttgcatactattggtagtgtgttaagaaaaataaatcctgactggaagcttgatattgcagtccctgattatgtggaagggactgcaaatctagctaactctatgtacaaccaggctcttggagtgcccacagggtcccatggtgctttccgtgattatcaagttgatgcggtttctttagaattttcaccaacatttcatgtcaaaaatgagaatgctaaatctttgtttcttctgaagggtggaaggttaattgaaggagtggcacgttctgtgaacaatctgcttgagaagttccatcagtcctttttcctgtacttccttacaggtccaagcaagttcatttcggttggtgtgtatatgattccgtttgcattgcttttggcacctctcccaatagttgctgctgcccttgctgatggcagtagaagcatggaaaaaacagcggataagttgataggcgacggtaaaacagatggcattgctgatatttcgcagaacaagggtggatcatggaaatggcttcgagctgcaaaagtattgcttgttgtccaattatgggcagtacttgtttcactacttccatattacattactcagatacctgatgccacacctacgcaaagcacactcatttgggttgtgctctccatcgtcgtactgatctccctatctgtcttgtttggctcaccatactcaactggtgttgaatggaaacttctgaaggctaccatgatcacttccatctccatcggattggggcttatgtcgataataaatttcgccactgctcagcttggtgctctgatagtgatcccaatgtgtttgttttctcggcctctgaaggcatcagggatgaatttccttcctcgggcagttttgttggcttcaaatgtagcttttgctgtgttgggttttcctccagttgcgttgctgattatgaaaggagtgtccaagggatcgaggtcgtggacaatagatgttggagatttctgggtatggatggagttcctgtgggaaaggagcagcgcgacgtatctttacctatttcttgtacatcttccctgctggcttttgtgcgtccttgtgttcctgcacccatgtcaccaatcagaatataagctgaagcaggaatagctgtttggcatccatagtcttgtctttttggatggtaaatcttgtagactagtgtagaaatttctcactttcacaaacttttggttacccataattcggaaattattcacccagttggagacgacttgtagacgatgtatcctgcctaatgtactgtctgcaacattttcgaaggcatgtttttaaagctgcttgttgcagtaattgatttct

SEQ ID NO: 33839 - DNA, 1873 bp, Zea mays
  Clone ID: UC-ZMFLMO17199H07_FLI
tatggacaagtggcataccccaagcaccataagcaatctgaagttcctgatatttatcgtttagctgcgagaacaaaaggagtttttatcaattgtgcattggttgaaccatttggactcaccttgattgaggctgctgcatatggtctacccatggttgccacccgaaatggtgggcctgtggacatacatcgggttcttgataatggaattcttgttgacccccacaatcaaaatgaaatagctgaggcactttataagcttgtgtcagataagcacttgtggtcacaatgtcgccagaatggtctgaaaaacatccataaattttcatggcctgaacattgccagaactatttggcacgtgtagtcactctcaagcctagacatccccgctggcaaaagaatgatgttgcagctgaaatatctgaagcagattcacccgaggactctctgagggatattcatgacatatcacttaacttaaagctttccttggacagtgaaaaatcaggcagcaaagaagggaattcaaatgctttgagaaggcattttgaggatgcagcgcaaaagttgtcaggtgttaatgacatcaaaaaggatgtgccaggtgagaatggtaagtggtcgtcattgcgtaggaggaagcacatcattgtaattgctgtagactctgtgcaagatgcagactttgttcaggttattaaaaatatttttgaagcttcaagaaatgagagatcaagtggtgctgttggttttgtgttgtcaacggctagagcaatatcagagttacatactttgcttatatctggagggatagaagctagtgactttgatgccttcatatgcaacagtggcagtgatctttgttatccatcttcaagctctgaggacatgcttaaccctgctgagctcccattcatgattgatcttgattatcactcccaaattgaatatcgctggggaggagaaggtttaaggaagacattaattcgttgggcagctgagaaaaacaaagaaagtggacaaaaaatatttattgaggatgaagaatgctcatccacctactgcatttcatttaaagtgtccaatactgcagctgcacctcctgtgaaggagattaggaggacaatgagaatacaagcactgcgttgccatgttttgtacagccatgatggtagcaagttgaatgtaattcctgttttggcttctcgctcacaggctttaaggtatttgtatatccgatggggggtagagctgtcaaacatcaccgtgattgtcggtgagtgtggtgacacagattatgaaggactacttggaggcgtgcacaaaactatcatactcaaaggctcgttcaatactgctccaaaccaagttcatgctaacagaagctattcatcccaagatgttgtatcctttgacaaacaaggaattgcttcaattgagggatatggtccagacaatctaaagtcagctctacggcaatttggtatattgaaagactaaatctttgatctttgctggtcagcagaggaatcaaagcagtaggaatgtaggatcgaggagagtgacaggacttcccctctgtgcacttcgccgaaaagtaataatgggattgctatgcatggcccttgttgtacactagaaaattgggcacgcaaacttgtgtcagtttttccgctgttgcgaaattcagtgatggtgtttttgtaactataccaacctgtgtcagttttgccgttgttgcaaaactcagtgatggtgttttttgtaattattatacatccgaataataagactggtgtttccagacagactatgcaagctaaggggaaatcacgattttcctagatcaaatatgtaatatgttcttttc

SEQ ID NO: 33840 - DNA, 867 bp, Zea mays
  Clone ID: UC-ZMFLMO17199H10_FLI
gccagccggcgccatgccgggacctgctgctgggttctaccaaggtggcggtggtgcagccggcggcggcatgccgtccgggccagagatgctgcaggcggccgggaaccccatggccatggcggcgcagcagcagcagtacatggcgatgatgcagcaacagcagatgatgaatggtcacggcgccggcgccggcgggtacccggcgatggggtacgggtacggccggccggcgatgcagtacccgccgccgccgccgtactactaccacccgatgccgcagcggcacccgcacgacaacatgttcagcgacgagaaccccaacagctgcacggtgatgtgatcatgtccctgtcatgcatgcgaggaggcaaaggtcgctgcggcctgtcgaagctttttctcctgctgcctgctattcttccggaggagggagagaccgatcatgggtcagcgtcaccatggttggaacaaagtccccggattggattggattggatctcagtatacatgagacatgcatgagaagccccccctaccccttttttcttcttttttttttctttttcactactactactagtatttctcttttttttctagcttgtttttcacctttactttctttggacaaagagggggaaaaagaagcaacttccttgaaggcgaaggtaggtatagtagtaattatcaatagtggtgggcataagacatgatggtggtggtggttcatggggtttatagtaaggagtagctcaagaagggtggctctcatggctccccccttcttgttgctccacaatgtgatgatggtatggaggtggcatggtagaaaagcttggtgaatctcaatgtgctttcgagtgc

SEQ ID NO: 33841 - DNA, 1310 bp, Zea mays
  Clone ID: UC-ZMFLMO17201A01_FLI
gtagcgccagcgcaggcgcagcagccccggcatgggcgacgacgccgagctcgaggagggggaggcctgcggctgcggggacgacaccgccttcgtcgaccccgacgtcgcgctctcttacattgacgaaaagcttcaagacatacttggccatttccagaaggacttcgaaggaggcgtttctgcagataatctagggtcaaaatttggtgcatatggttcatttttgcctacgtaccagcgctctcctcttcctcaaactagaagtccccctaaggcaggaaatattacctcaaaatctccctttcaccagtcgaatgaggacttgtctcagaaacctccagctgtggcagtttcatctaccccccaaagtaatggtcctgtggtgcctttttctggtgattcaactaaaaaggaaatacgcccatccacaaagtctgaaaggggttccgtctcccatgattcatatgggccgtcaaaatgtagtgaccaaaacagacttaaagtccggataaaagttggctctgataatgttttggcaagaaataatgcagctatctacagtggcctgggccttgatatttcttcaccttcatcaaacgaggatagccctgatggccgtgggagcctgtcccctgaagttaacaatgtgccacatgaatctccacaaaccattcttcagatcatgacatgcttttcagttcctggaggcttcctgttatcccctctaccagccaatatcttgcagttgacaaaaaaggtcgtgtcttcatcaaagaagtgggaatcaaatgtggatgtagaaaatgtacaagaatcatatgaaggccatgtggctaaaaaggtgaaatctgatggtaacaaaaagaggctgatagatgcaaaaaattcaaagaacaaaaatgatattagcgcagttatgaaaaaggagattgatatggaattagttgctggtcaaaagatagtatctgaagctctcaaaatatcattgctgtctgaccccagagctatggatgcaaaaggtgagaatcgtcttgaagaggagccagcagaaaacaacttggttggaattagagatgctcgattgaaagagcggtgcaccaagactgactccatgacagtcaaagtggagcctgccaaagcagaggcgatggaatgtttagagaacagtagttttggcagttcggaaatggatctttcagcagtgaaagggaaatcaaaacccaagacagaaaagggtgaggcaactttagaagataggaatacaactaatgacaaagacctaatatcagataggaagcaaaaaaaat

SEQ ID NO: 33842 - DNA, 1020 bp, Zea mays
  Clone ID: UC-ZMFLMO17202A10_FLI
ataatgtaccaggagtctgccatagggatgtgaagccacaaaacgttttggttgatcctctcacccaccaggtcaagctctgtgactttggtagtgcaaaagttctgattcctggtgaaccgaacatatcgtacatatgctctcgttactatcgtgcccctgagctcatatttggtgcgacggagtatacaagttcaatagacatatggtcagctggttgtgttctagctgagttgcttcttggacagccactatttccaggagagagcgctgttgatcagttggtagagatcatcaaggttcttggtactccaacccgtgaggagatacggtgcatgaatcccaactatactgagttcaggtttcctcagataaaggctcatccatggcacaagattttccacaagagaatgcctcctgaagccatagaccttgcttcccgtctccttcagtattcaccaagtcttcgttgctctgctcttgacgcatgtgctcatcccttcttcgatgagctgcggacaccgaatgcacgcctaccaaacggccgcccgttccctccgctctttaacttcaagcacgaactagcaaatgcctctccggacctcgtcagcaggcttgtgccggagcacattagacggcagatcggtgtcaacttcgggagcagctaggagggcaggggctgcgatggtcgaagttttcggtcttggtttccccttccggagagtgggaggggctcaagcagtacctgagaaaagtagtgaaaccgtgtaaattatctgaccgtgaaggagtactaccgccagtaactggcgcatgttcgtccagtagttatggtaagaatgtaggaggtggagactggttaatgtgtagggtcgttttttttgtttgttattactaccattttgttgtaatgttcgtcggtacttccagcagtagtgtagctggccacgttttgttcgtccgccatgatgtaaatgatcatcacccaactgtaatgcatgtgctctctgatcgtttcgt

SEQ ID NO: 33843 - DNA, 1942 bp, Zea mays
  Clone ID: UC-ZMFLMO17207D05_FLI
gccaacttccctctcattcgtcttccacaaaccctataaccctagcaccgccgccaccatgtcctcgtctccatcttcaatgaaccgccgtcccccgggcccgctagcgttggggctggagtccttggcgaagaagaagacacatacagccggtgctcctcctctggatctggcggtcaactccatcacccgcagcttctatggcacctcccctagtccccctccatcgccgccttcacccaccgcttctatatcgccacctctctcattgtagaagaagacactgaggatctgggaacctatgccccacaggactgcacaacacgtgggataggtaatgcaggtattgcccccgctggctgtggctggccggtgtgcaattcaccaggctgccaaacgagccctaaaggccccagcatgggcgaccctctccagagtgattcttatcaatcttgcattggaaaaacacggagcctattattatcagggaagcatttgagccaaagtactatgtacatcaccatgcttttatgtgactatatatataaatataacaaataaagttttattggaccagttctttgaccatgccattggtatcaacgttccaaggtcccgcttcctaccagttaaggcgacatcagatttgcagctagtacagtctgatctatataccttggttgatggcttcgttacacgtaattcagccagaacaaatccatcaaatccctcaattgaacttggtcctgagttcaagaaggttgggagcttccttggtcgcttcaagtccatacctagcattgttgagcttgacatcttgaaggtttccggtgatgtttggttcggttctggaattgtactgaaggggaaagtgaccatcactgcaaaacctggcgtcaagctagaaatcccagacggagcagtgattgggaataaggataattttggaaaaggaaagagaaaacaataccagatgccttacaacctgaattagggatgaaactgctaattgcacatggaagtcaccaagaacttggtaaaggtgattcaatgacaaatctaatgattaacatgtgcgatgtggttcacatgttaatgcatgcaactgaagtgcattaccaatgtcccaagagggtaagggtacagtctgatgtatctgaaaggattgctaatggaactagtgttcatgtaaatactcatgttcaaaatttgaatctggatattgaagagcaatcacacaaacactcgatttcacacatcgaggagccaaacactaataattcagaaggatccctggctagtgctgctgtctgggatgtatttcgcaggcaggatcttccaaagcttaatgaatatctagctgttcatcgggaagaatgtgcagctagatgtcaagcagtgtcttctgttaaatattctatttatgatcaaacagtgtaccttaacgattatcataagaagatgttgaaggatcaatatgagggactgaagacaatcgagcagattacaatggactcagcttcggtcgagaccaatatgttcaagctctgcaaggtgaggtttgttcagtttggccaaaaaggcatcccctacctgaacacctacgacggtcgcgctatccgctacctcgacccgctcatcaaggccaacgacaccatcaagatcgatctgcagaccaacaagatcatggacttcatcaagtttgacgtcgacaacatggtcatggtgactggcgggaggaacaccaggcgtgtaggagtcatcaagaacagggagaagcacaagggcagctttgagaccatccacgtgctgcttggagctttttgctatgtctagttttctcctatttgttgtacaggaaaacttagaatagaattcaaatttggtggtcgcaaaagtgtggagactttaattcatataaagttaggcttaacattagtgc

SEQ ID NO: 33844 - DNA, 1338 bp, Zea mays
  Clone ID: UC-ZMFLMO17212B02_FLI
aatcccaccggccacagcacagaccaggccgccgccgccgccgccgctctgccttgttcgcagctctgttggccgctcgctttcgcaacattattatacccacccaatcgaccgacgcaatcgaaaccgcctcccatctcatccgtctctctcgaatcccaccgtgcgctcactgcgatggacggctcatccaagcggatcggcggtggcggcgacgacatgcccagccccgaccacgaccagaacgccagccccaacgtcccgccgtccgccgctggtgacggcggcgcatcagccactgcggcggcagcgcccgccgccgggaggcggccgttcaccagcctcagccaggaggaggccgacctcgcccttgcccgcgtcctccaggagcaggagcgggcgtacatgatgctgaccggcggcgagtacgcgatctcggacgccgagagctacgactacgacgaggaagacggcgatgggagcgactacgaggaggaaggcgaggcgctcgacgaggacgagcaggttggggacgcggaagcggagggggctgagggggacctggacctggacccttctcagtacgaggacgacggggagggcgacgtctccgacaggctcatggcgctcgtcgggatcggtgattggcgagcaatggagcaggatgatgctggggacgaggaggacgacgaagatgctgaggttcatacacagggtgcatgggaagatgttgacccagacgaatactcttacgaggagctaattgcgctgggtgaagttgtcggtacggaaagcaaaggccttgctgctgacactattgcctcattaccttgggtgacttaccaggcacaagacaagcaagatggcaacatggaacagtgtgttatttgtcgtgtggaatttgacgagggcgagtcattagttgcactcccttgcaaacatccgtaccattctgagtgcataaaccagtggctgcagctaaacaaggtatgcccgatgtgcagtgctgaagttcccacttctgtgaacaagcaggcatgactactcaacctgaagaagatagcggtggcttggtatttatctgccattgatggaatgaaagaagcgccaactgttaaattgttcagggaagcaagggaattggctgggttctgattccctgttttcttcagttcttatcccccctcccctgtacgcatgctaattctatggccataccgctggttatttatgcattccattagatgcggaggattcattgcttgtagatgtaaatcaacaatcataccaccatagtcaatagctgttgttttaatgccaatagcaacgttcatgttt

SEQ ID NO: 33845 - DNA, 1454 bp, Zea mays
  Clone ID: UC-ZMFLMO17175H04_FLI
atcgtctcccggcaggggaacgagaagctggacaggatgctgcggcaggggaagccagaggagaagaagagcatgctggtggtgtccgagttcatcggatgctcgccgtctctaagcggcgccatcagggtgaacccgtggaacatcgaggccgtggctgacgccatggagaccgcccttgtgctgcctgagaacgagaagaggctgcgccacgataagcacttccgctacgtgagcacccacgacgtcgggtactgggctaacagcttcctcctggaccttgagaggacctgcaagtatcattctcagaagaggtgctggggcattggcttcggcctgcggttcagagtggtctcgcttgacctgaccttcaggaagctttccttggagaacatccttatggcataccggagagccaagacacgggcaattctgctggactacgatggcacgctgatgccacaggcgattaacaagagcccgtccactgaatctgtgcggatcctcaacagcctgtgccgggacaaggacaatgtggtgtacctatgcagcgggtatgaccggcgcacccttcatgagtggttcccttgtgagaaccttggcatagccgcggagcatggctacttcctgaggtgtaagagggacgcggaatggaagacctgtgtcgctgccacagactgcagctggaagcagatcgcggagccggtgatgtgcctgtacagggagacgacggacggctcaaccatcgaggacagggagacggtgctcgtgtggaactacgaggacgcggaccccgacttcgggtcgtgccaggccaaggagctcgtcgaccaccttgagagcgtgctcgcgaacgagcctgtgtcggtgaagaccacgcctcactcagttgaagtgaaaccgcagggcgtgagcaagggcttggtggctcggcgcatgcttgtgtcgatgaaggagcggggccagtgcccggacttcgtcctgtgcatcggcgacgacaagtccgacgaggacatgttccagctgatcgccaccgctgcctgcggggactcgctggcgtccaaggcggaggtgttcgcgtgcaccgtcggccgcaagcccagcaaggccaagtactacctcgacgacgcggcggaggtggtgaggctgatgcaggggctctcctacgtctccgaggagctggcgctggcgaaccagcgggatgaagacgaggactcctctttggacgacgtgtgggaataggaaggagcgttcccttcccgtgctgctcctgcggtaatgtctgtttgtgttgttggctcggctggagctttcgccgagtagtttaggtgtgtaaatgaggtatgcttttcagcgtaatgtattgccagtggtctagtctcgagagctggcttgaatctagtgatgctctagtactttggtttgtggtgctatttacctgatccgtggaaggc

SEQ ID NO: 33846 - DNA, 3030 bp, Zea mays
  Clone ID: UC-ZMFLMO17175H08_FLI
ctcccgcacccactcttccaccgcacgcacgggcgagtgcggcagatcgctggcggatccaatgctgctgccctggtagctgctagcctgctgcgccgcgcggctgctggtttggtgcccttcggctgcggcgccgggtcactttcgatgtgactatctgaggaggaaaggatggcggcttcggcggcggcggcgcctgggtcggctgagaggcaggcgcgcggcggcgcggcgtcggcgatcggcaacgcggtatttaagagtggccctctcttcatatcatcgaaaggaattggatggaaatcatggaaaaaacgttggttcatcctcacacgaacgtcactggttttcttcaagaatgatcctagtacattaccacagagaagtggtgaagtgaaccttacattggggggggattgaccttaataattctgggagtgtagtggtcagggaagacaaaaggctgctgaccgtcctttttccagatggccgtgatggtcgcgcctttaccttgaaggcagaaagttctaaagatttgttcgagtggaaaacatcactggaagaagctcttgcacaagctccaaatgcagctcttctgatggggcataatggaatatttcgcaatgacacaacagatgtgtatgaagaggctattccaaattggagagagaagagacctaccaaatcactagttgttggcaggccaatactacttgcactggaagatatagatggcagtccttcttttctggaaaaagctttgtgtttccttgagaaacatggaataaaggtggaaggaattttgcgtcaagctgcagatgtggaggaggttgacaggagattgcaagaatatgagcaaggaaggacagagtttgcaccagaagaggatgctcatgttgttggtgactgtgtaaaacatgttctccgggagcttccatcttctcctgttccagcttcctgctgtacagcattattggaagctttccgtctggacatcaaggaatctcggatcaaatctatgcatgcagcaatatctgaaacatttcctgagcctaataggcggctgctacagagaattttgaaaatgatgcataccgttgcttctcatactgccgagaatagaatgactccatcagcagttgctgcatgtatggccccactcttgttgcgtccccttcttgctggtgaatgcgagctggaagatgattttgacatgagtggtgacagtgctgctcagcttattgctgctgcaaatgctgctaacagcgctcaaggcattgtaactactctattagaggaatacgagagtatattcaatgatgagcactttaggtgctccttatcacctgattctcaaacaggagatagtggaagtgaagaatcaactgatgatgaaactgtggatatcaaggataatgggtttcatgatgcagaaaatgatgtagatcaagaattagatgatgccgagcgagtactgagtggaaaattgagtgaaaccagtgcatgtgtccatgctgacctccatgactacaaggaagttaatggcaatgattcagacgctgagctctctgttgaggataacacatttgaaccaaatgtaaatttaaatgatactcccctaagtcgtttaatagaaaatggaaagaaaccatcaaatctggcgtccagtcatgaaactccattatcagtgggagaaattcttttgtctttggatgctggagttccattacctggtcgtgcagctgaatattccaaggacagacactctagcaaacccaatggaattcagcagcatgtgaagcgtactaacttatggggacggagcaatgcaagaaagggccaacgttcagagttagttgatccttcaagtgaagaagagcttgctattcaacgacttgaggtaatgaagaatgacctacaggtcaggattgcaaaggaggctagaagtaatgcaatcctacaggcaagtttagaaagaagaaaacaagcactacatgagcgccgtgtggctctggaacaaaatgtgtcaaggttgcaagagcagctacaggctgaaagggatcttagagctgcactggagattggattaagcatgtattcttcacaattttctagctcgcactccatggactcaaagacaaaggcagagcttaaggaaattgctctcgcagaagctgatgttgcaagattaaaacagaaggttgcagagctgcatctccaactcaatcaacagcgccagcaccagtatggctcttcggtagatgcaaatgattgtcctccgcacattccaaatcatctctcacagaacactgtccaaactggattcgataggaccgttgctttttgtaatcaagagaagcaaagaaatgaggagagcttgccgtgcacatcccactggagaagcatcaaacagcatgtgctatctcagggttcttcaaggcctttctcccgaaagcattcctcagacacctccttgagtgattcaagggaggcatcaacaagtgtgcttgcagagggcgggccactgttggtgaacatcgccagaacaacagaacagggtgttgaatacgggagacctccgactgtgccgtcatctactctagttgaactaacaaccaggctagatttcttcaaagaacggcggtcacaattgatggaacagctccacagcctcgatttagggcatggatccgcgtcccatggtttcccatacaaaccttcatctccctggaacagcccaaggtagggggcttgttcagttgctgcattaccgcgcatctgtatagtcttggtatagaatatcttttgtttcactttatctctgtagaagttggtctcgtttttgtttcaattgttatgtctgtagaagctggtagtgagaatgtatatatcccttgcctgccttcacttgttttgctagtgcttccagcggacatttttcgagcgtgatttttgttttgcttttgtatttactgtgttatgtaatgactcaaggggaaatatatagatgcgtctttttttcttggggat

SEQ ID NO: 33847 - DNA, 1482 bp, Zea mays
  Clone ID: UC-ZMFLMO17176A05_FLI
aagggctctgatgatgaggaatatagaatggctgaaacaatgactacaggacgggggaataagttctcagaaagagatagcttgccatcttcaagagatggttttaatgattttgatgatgaagatgatgacattgacagttatgaacttgacttgtcaaaaggtagtcacacaggtggagtgtcaaggatgagttattcggatcttgagagtgcttctgattcagaaggttttagtgaaattgataatagtagagagtccagatatggtaatagtaaagagtccagatatgataatggtagagagtccagaaatgataataatagagagtccaaatacgcagccaaggttgaggatgaatttgaggatcatcattccctgagatcgactcatcttgctgattcctggcaaaaaaaccagaggtcggagtggttcgaatgactacagaagggcatcttttggatcagagagtgatgatgagatcaattcttatccggacgaggacattgacaaaggtcctagaaataatggaagccgtagtcagggaagtaccaacagagcttctgttaggcacaatgcacttgcctacagtgatgatgaaccattttctgatgatgtggattctggtatggctgatcggttcgggcctaggcagactaagtcttccacgaacatcaaggataacttccgtgacacaaggcgtaacttgaatggaagacgttctagtggggaccgttatggtagaacagaacggaatgagcgggaccgttatggtagaacagaacaacggaatgagcgggaccgctatggtagaacagaacggaatgagcggttcaacaattttgacatgcaccgtggcggttcagtcttggataagggccgtggggctaggggtaaccagttagatagtggttcaagaggtttacaaagaaacgcaagaagaaattgggatagaagtggtggctttgacggcaggcacaagggtgtttaaataataatagcaagagtggtatcttaagtaccaaatggcaaccagtgatatccttcatgtgaccttatccaatgccgagggtatttcaatccagctgagcatggctcttatgattccaccatgtgtccatgaccactcttccataatgctacttcaccctgcgacagaggctatggcgattcctctccatctgcacttccatttcaagcattgcacctctctgtctgcttgtttgttacatgtcattgcatcagtcagagcggtcgaacctgaagagctctggaactgggttcgttatttggttcactcatgccgcacaggtacaattttagactactagttagtctccatattgttttgcagagatgcatcaacaggattgtacctcgaattatgagagcaataaaactatacacttcaaacttaatgtgataccaaatgtaacgatgttgaagcgttttggtcgagttatagattctcgttgcaatatt

SEQ ID NO: 33848 - DNA, 997 bp, Zea mays
  Clone ID: UC-ZMFLMO17176A11_FLI
ctcctgtgtacaccactcccgccccgcctaccattttatccccgcctctcctggcctctgccgccccgtcgcacagaatcgcttggtgcaccctgcgagggcctcctcgaaaccctagcttgcccagcccctccgggccatgggcaagtacatgcgcaaggccaaggcttccagcgaggttgtcatcatggatgtcgccgccgctccgctcggagtccgcacccgagcgcgcgccctcgcgctgcagcgtctgcaggagcagcagacgcagtgggaggaaggtgctggcggcgagtacctggagctaaggaaccggaggctcgagaagctgccgccgccgccggcgaccacgaggaggtcgggcgggaggaaagcggcagccgaggccgccgcaactaaggaggctgaggcgtcgtacggggagaacatgctcgagttggaggccatggagaggattaccagggagacgacgccttgcagcttgccaccgcagggtgaacgctcctccggtgcacgccgtcccaagttctagggagatgaatgagtacttcgctgccgaacagcgacggcaacagcaggatttcattgacaagtacaacttcgatcctgcaaacgactgccctctcccaggcaggtttgagtgggtgaagctagactgatggattcagagggacgagagagcagcaggcatggaatggaactcaccccccgctccctccacaccaccccagcgttgtggcagaggcgcataccgtcgtgttagcttcgtttctgctgtaaaaaaaacccttagtgttttatttagcatgtagccttaactggtcgtgtgttacagtacagaactgatgctgagttacaacaccctgatctgatccctcaactccaatgtaacccttaacagctcattctgtaaggaacctgtcaccctgttacctgttgctgaactaatgaagtagagctagataatgacgttttatcgtagttattattaataact

SEQ ID NO: 33849 - DNA, 1371 bp, Zea mays
  Clone ID: UC-ZMFLMO17176B07_FLI
cgcagctcctggataaatagagagagggggtgcagcccctagtggcggccaaccctaggtcgtccactatgggccgtagttgggctggtcatctattcttctgggccctcattcttcagtagcatgacgaagttaagatctctggcacaggcccgagtgactagcccggctaatgaaggaagtggcgcttgatgtggaggtgctgctggtgtagtcgtactcatgttgcaggtgatgtcctcatcaataaccttgggaaagccaagccccaatccacttttattttcttaattctttttctttttcgcttacgcttacccttacacagatgacttctcacgagtcctcggaaggagggaacgcacattcccacacggacggacttgcgcaagagggttttccctgcattttgtgggaggtgctgtagggagccggttatctggtgcagttgttcgaggagcaccgggtaccccgctgtagggtgaggatgaccttggagcctcatcccttgcagctgggctggcgttcgttggactccgagtctttcggataccgggctgaagacactattgaggccattgctctcctcgggctaacgaccttttatggctttcaccccttggagctgtccactcatcccattggcttgttccccgctgaaaaggaggacaagccaatgtggaaggatcgagtggtgcatgccaaggatgtgtgggctctttacccagagcagactgctcacctgacggtgcgatgcatgaatgccatgtaccgtctgcaagcagtgcgaggtgaggcaatgtcctagctgatgagcttggtggaggctaccaagatcaccctggataacagggaggaccttatggtagacctatccactgagctggtggagaaggacctcctggtggagcagatggccacccagatccaagagcttgagtagctagtaggagccagggagaacaccatcgaggttctcgaggatcaacttctgaacactcagcagcaacttgaggaagccaaccagcacctggatatgcaccatcaggagatccaggacatggaggccgaaggggccgacgaggatgttgacatcgagggaggagaggagccggagcctgcatccagcttggacactgctggctcaggaagaccaccttcccccaagtccagtgttgccttgtttgtccattaggtttcagaaatttggatagaagtgtgcagcagtagaactcctcaaagctagcttagcttttgcacctttggggtactaggctaggaagagttgagtcttttaagcactgttgtaaccgttagaaaactcttttggatttatgaatgatggatgatgtcgattttaagttatgaagg

SEQ ID NO: 33850 - DNA, 1238 bp, Zea mays
  Clone ID: UC-ZMFLMO17176C02_FLI
ccaccgtccgcgatcctcgccctctcgagaccaccgaccgctcgtcctcatcccgtcatccgtgcccgcatctccgcagtcgtcgccagtcgccaccgctatccgagctcccccccccccccccccccaaccctcgcaacggacacacgtcctcatcctcgaaatgcctcgcagtcatcgttccaccgcaatagagcgcaatggctgtgcccgacgcaactccatgccgcactatggctcttgcctcgaatccgcccactccccacatcgagaacagccatcgacgccgcaagaggagacgcacccaagagagaggaggcgaccatgagggccaaggtcccgaagcgggagggttggtgggggaggaggaactaacgatagccatcgccatggccaccgacgacgactgataggactgcctcttcttcatcgatgtggtaacgacagaaatcaagtaatggggacggggctctccaggccatgcgggtcaaacgactggaacacgtccccttagcctccgaacgggaaccccgggctggagctctacagcgagaagaccaagcttgctgaagggccgcaggcttggaacatctagattttgttttgctaaggggagcgctatgtgagggtgggcaggttgctcaggtcaagtgggttcacggctgcgagcttcatggagagactattgatagcagttgtgtcctgcatcattctttgatcaagattgatgagggaaagatcagtatgccgaggatgggaccgggttgtagcttgcgatgctagatctgctcatcatgaaacccatcatgactaatgcatttatctgccatttaagtgtacaccagattatttgtatgtttgctgcttactatgcaaaatggcagctaaaagaagccctaaagcatgcgagctgcacctctaccggtttagtggccaaactggctgttactacgtttcaggtgttttatctgtaacttttattttgttctttttcttgttactcacttatttctgaataattaagtatatatgtcacttaaaaaaaaaaaaaaaaaataaaaaataaataaaaaaaaaaaaaaatcataaaaattaaaataaaaaaaacaaatttaacacccccctcctttttcccaattttattttatttccaaaaaatttgggggggggccccttaaaaaaaatttattttttacccccggggggaggaaaaaattttttttttttctggcgccctt

SEQ ID NO: 33851 - DNA, 1490 bp, Zea mays
  Clone ID: UC-ZMFLMO17176C05_FLI
atcactctagcactcctaggagtggtaaactgatgttattttattcaatgaagtgtgtggtccaagattttatttttaaatgaaatgtgggcagggtctatatatgcttggaagttggaacaatggtcagcatactttcacattaataactctactgttcatgaaatgcattagcttgttctcctaaacgattggacatgtgcctgtcgaatttcattagtttcttggactgaaaactgctgatggaagagtgacatgatgttttaaaaacataggctgctcagaagggtaaggtcggaatagtcctggacttcaactggtacgaggctcttacaaactcacctgatgaccaagcagcagcccaaagagccagggacttccacattggctggtttgttgatccattgataaacggacactatccacagataatgcaagatctcgtgaaggagaggctgcccaggttcactcctgagcaggctaaactggtgaagggctcggcagactacatcggtatcaacgagtacacatccagctacatgaaggggcagaagctggtccagctggcgcccagtagctactctgccgattggcaggttcaatatgtttgtgagtttaatttcttgtgctttaaactcgatatttcgaataaatatgtatttgccttggatatatatttttttcaccaaacctaaacatccgtcccataaattctgtagttgcacgcaatggcaaaccgattggaccacaggtacgctgctcctccatctactctctctctcatcgttgtttgcactgcatagtgcatggtatgctaggtagcatcagctacgaattctaaagtactgcaacaagagaatacttgctaaccaaacgcatggacacgtaggcgaattctaagtggctctacatcgccccgacggggatgtacgggtgcgtgaactacctcaaggagaagtatgggaatccaacgatctacataacggagaacggaatggaccagcctggaaacttgacccgagaccagtacctgcgcgacgccacgagggtgcggttctacaggagctacatcggccagctgaagaaggccatagaccagggagcgaacgtggctggctacttcgcctggtctctcctcgacaacttcgagtggctggcagggtactcgtccaagttcggcatcgtctacgtggacttcaacacgctcgaacgccacccgaaggcgtcggcctactggttcagggacatgcttcagaagcattgagatctccagagccgagcctgagcacggaaggtaccattttgttcagcttcgcctagtgtttgggatggcccaatggttcaaatccggctcagtgcctggctaccaaaatgggaacaaaggacagctaccccgatcaattgtgatgttgtgtgtttgtgggtatgttctctctggagtttgagctgtggttattttatcgtgttggttgatcgtgtttgaaatgctt

SEQ ID NO: 33852 - DNA, 1600 bp, Zea mays
  Clone ID: UC-ZMFLMO17176C12_FLI
ccgcggtggagttcaagggaggaggaggaagagggtgtgaggcgctgcataactcctgtggatcggtgagccgagggcgatatggggatgttcttcagcaaagcggaaccgccgccgcccatggtgctggtgccgccgctcttcgactaccctcccatcgctgcccgcaccaggatggcggtgccagcatatgagctaatgtttgggaaagtctccctgcacaatctgtttgaggactactttgaccaagctgggaatatgacctcaaggatcatgttgaagccgcttgaagatcctcacgttgatttgattgctactgtgtctgctgctgctgatagaaacagtggaacagaagtaaaaggggatgctttatttcgctggcagagagagctggatgacccccatacctttgtggaccttcttgtgtcaacttcaaatcccttgctgcagctgagattatgtgcatatcatcctaagtatcgtattggtgcctttggaacattacctttgctaatggggaacagggtgcgttcagaagactatggggtcatgggtgtaagatatggttcagagaatttatctgttggagcatcctttgtgccaatttccttatccagtgaggtaccctttggtgcatggttggttgggagaaaagggagcttatctgcaggagtacaatacaagccacttagtggcagcaaatatcctatgccatttacagaattggagaactggaattatgcaatcagttatggtgttggctcaactagcccgctcagcccttcattcattttctccctggaacttgccagaagcacacagctaaccgcatcattctatcagcacctggttgttcaaagaagggtaaaaaatccttttgaagatgatcaggttgttggcattacaaactacatcgattttggacttgagttggctgccagggttgataaagataaagtgagtggggatggcaactcgtttcagttggctggaagttggcaagctaacaaaaactttctgctgaagggaaagcttggtccttccacgtcctctgtagctctggcattcaaatcatggtggagaccatcctttacatttagtgtaacagctgtgaatgatcattcaaagggcacaacatcgtatggatttggcctccgtgtcgaggaccttagacgagcgagttaccagcgcgctgatccaaactacgtcatgctgacgccaagcaaggagcacttggcaccaggtgttctgcgggagtacgggaagcggcccatgttccagacacaaatcgattcgggcaactacgaccatctgcctacagagctgaagcctcttggcaggattttctaactgtaggctggctgctcgtggtcgtctttcgctaggagatttttctttgttgttgttgtagatcttatccgtcttggtcctttagacatgctgctgtaacttgcattgacacgtgagcggattgcgtcatgatagctgcatggcttttggaagccagaaggatcatccaacgcttcttgcattgctatgtacttgggtggatatatataatggtatggtgcagtggacaggcggtcttgaatccttattc

SEQ ID NO: 33853 - DNA, 909 bp, Zea mays
  Clone ID: UC-ZMFLMO17176D03_FLI
ggcacgggcacggggcaccgaagtgttggtatacgcggcagccgggatagcgagcgtatggccacctacttcgtcctcaacaccggcgcgaagatcccgtcggtcgggctcggcacctggcaggccgacaacgggctcgtcggcgacgccgtctatgccgccgtgaaggcaggttacaggcacattgactgtgctcaagcatacaacaacgagaaagaggtcgggtttggtctcagcagatgattgatacatctggacgtgggccgcgatggaggagctgtacgacgccgggaaggcgcgcgccatcggcgtcagcaacttctcgagcaagaagctggaggacctgctggccgtggcgcgcgtgcgccccgccgtcgaccaggtggagtgccaccctgtgtggcggcagggcaggctccgcgcgttctgcgcctcccaagggatacacctctccgcctactcgccgctgggctcgccgggcacggcgacggtgaaggcgggcgcggtgctggagcacccagccatcgtctcggcggcggagacgatggggaagacgccggcgcaggtggcgctgcgctggggcgtccagatggggcacagcgtgctcccgaagagcaccgacgaggggaggatcagggcgaatctcgacgtcttcggctggtccttgccggaggacctgctcgccaagttctctgagatcgagcaggaaaggctgattcgtgcgggcttctttgttgatccccacggcgtgttcaaatccatcgaagagttttgggatggcgagatctgaacaactgtcctgactgggaggagctgagtgacggaatttggccactggcaaggcgtactgtgcctgtggaagaataaatttatgcgtatgaactctggaaggcagcgtagttttcaggt

SEQ ID NO: 33854 - DNA, 3285 bp, Zea mays
  Clone ID: UC-ZMFLMO17176D04_FLI
ctgagttttctcgttgacgcaaagtagaaatgtacaagtttctctactccgaacgcatttcatggcaaacgcgggccgcggcctaccgcgcacacaaaaaaatcacaaatcaaaagcatactatcagcgcaaacgcgggccgctgcctaccgcgcacacaaaaaatcacaaatcaaaagcatactatcagcatagaggcatggttcctggggttcttgattcgaaatctccatctcatcgccatgcacacttccttctgtgcagcatcttcatattaatctcctccaacacagcaacgctatcatcagcgcaggccagcaataggtcagaggatgatcggcaagccctcctttgcttcaagtctggtctctccgggaactctgttggtgtcctaggatcatggagcaacgactcactgaacttctgcaactgggaaggggtcacctgcagcacggccatcccaatccgcgtggcatccttgaagctaaggtcagtgcaactcagaggaaaactgtcaagttgtgtagcaaatcttacttccctagtgcagatggatctctcaaacaattcgatttctggggagatacctgatgaaataggttcactacccctacttcagactttgattctctctgccaataagtttgaaggtagcatccctccatcattgggcatggctgcatctaacaattcattgcttaccactctaatcctctcgaagaaccgcctatcaggggagattccacatttccataagatggcatttctgcaatctcttggccttactggaaatcttctttccggaaacattccaccgtctttgggaaatatttcctccttaacttccatcctactagcagagaatagtttaagaggaccaattccagaaactttggctcaaatccccaagttggacattctagacctaagcaacaacatgttgtcagggaacgtccctgacctgctttacaatgtctcatcactcacatccttcaatataatcaataacggaattggtggaaagataccatctggtattggccgctcacttccaaacctcgtgtcattgatcatgggtggcaacgctttctctggagaggttccagcttcattggccaacatttcaaagctccaactgattgatctctcaagcaattacctaaggagctcagtgccatctctcggatccttgacataccttactcaactgcttctaggaagcaacaagctagaaactgaagactggacgttccttacatccctaacaaattgcagacagttgttaaagatatcactggatgggaatgccttgaatggaagtcttccaaaatcggtcggcaatctttctacaagtatacaattgctaagcttaagaggcaatcaaatttcaggaactataccacctgagataggaaaccttgtgagtctcacaaaacttgccatggaccaaaacatgctttcaggaatcattcccttgactattgggaatttaacaaatttggttgtcctggcactgtccacaaacagattgtcaggtgaaatcccagccacaattggcaatctccctcaactgatccagctttacctggatgacaatatgttatctggacgcataccagcacaactagtgcagtgcacaaggttgactatgttaaatttatcagtcaatagccttgatggatccataccaagtgaaatcctcagtatttcttcgctttctttggggttggacttatcaaacaacaatcttataggaacaataccatcacaaattggaaaactgatcaatcttggcctactgaatgtttccagcaacaagttatctggtgaaataccatctgaacttgggcagtgtgttttattgttatcccttcagatggaaggcaacatgctcgatggggttattccacagtctctcaagacgctgaagggcatacaacacatggatctctctgaaaacaacttatctggtcaaattccagatttcttcgagaacttcagtaccttatattatcttaatctatcatacaacagactagaaggatcaattccaaccagtggcatcttcacaaattcaaatgcagtcatgttagaaggtaacaaggcgttatgtcaacaaattgacatatttgcattgccgatctgccacatcacatctgcaagaaaaagaaaaattaatgaacgcctactgctgataacagttccaccagttattatcgctttgttgtcatttttatgtgttcttaccactgttatgaagggaagaataacccagccatctgaaagctacagagagacaatgaagaaggtgtcttatggagacattcttaaggctaccaattggttttctccagtcaacaggatcagctcaagtcatacagcatcagtctacataggtagatttcagtttgatacagaccttgttgccatcaaggtatttcatcttgacgagcaaggttcgctcaatagctttttggcagagtgtgaagtgctaaaacatacccgccatcgcaatctcattcaagcaattactttgtgctcgacagttgattttgagaacaatgaatttaaagttctagtatacgaattcatggcaaatggtagcttggacatgtggatacacccaaggccacaccaacgtagccctataagggtgttaagtttaggtcaaaggattagtattgctgcagatgtagcttctgctcttgattatatgcacaaccaattgacacctccattgattcactgtgatttgaagcctagcaatgttttgttggattatgacatgacctcgcgcattggggattttgggtcagcaaaatttctctcttcaagtcttaatagtaccccagaagggttggttggagcctcaggaaccattggatatatcgcacctggtaagttgtacgcctcatttgtttatggactattaaacttttcttttactagtttatgaataaataatgttatttactcctgttttgccagaatatgggatgggatgcaaaatctcaaccggtggtgatgtttatggttttggggtattattgctagaaatgctcacagcaaagcgaccaactgacacgctgtttggtaatgacctcagccttcataagtatgtagacttagcattcccaaacaaaattaatgagattttagatcccaaaatgccacatgaggaggatgttgtttctaccctttgcatgcaaagatatatcataccgttggttgaaattggccttatgtgttccatggaatcaccaaaaggtagaccaggaatgcgac

SEQ ID NO: 33855 - DNA, 1513 bp, Zea mays
  Clone ID: UC-ZMFLMO17176E08_FLI
ggaaaacggaagaaatcttcatcaagcaacaggaagcgagagcgtgcgatttcttttttcttcctttccggtgacgccaggtgaatcaccagccggccggtgcgccaaaggctagggttccgcggggcgcgggtgcgggctcgactttcgtagcctcgccgccggcgcgcgggaaccggatgctgctaagctgcgggtcgctctcctcctgggtgcgccgcttcgtcgcctgcgttggagcagtggttgttttggttgtgcccagcctactccgataatagctgttgatgagcccacaaaaggtttaagaattcaagggcgctcagtaaaaagacacaatttatctgacgacttttggagttcaagcccgcacgaaatggagaacagtgccttgcaatcccgacacagtatgtcctcaatcagcactgctgcacaacctaatgatcagcatgcttctggaagtagcagctccccaaatgaatttgtaaatcaaggtaaattagttgccatatatacatgtccagaacacgtggtgcccatgtcgatttatggtgcactaatttacaatgtttggttatctgttccatgcttccttgagttttcacttttcagaaagcgttaaaccaatatttgtttgttggagttctgtttattcttattgaaactgcatttcagtatggtgtgtttgtgctccagaaaattcagcaaactggcaattttacaagatgcaatgcgatggacattttatgcaaattattacctagcatgactgtatgcagtatcagttcttagaactcatctatgctcctataatcggtaactaattagtgttacctgtctataatctagcaataagcaatctaaatcctttttggtttccaattttccatagcaggaaataatatattatgacagagagtctctcacgtataggccaactcctgaaattggtcacacacatggccagatgtaaactatttgttcttatggctcccgaattccaaccctatagggtaggcgccgagggagaaccactggtggttcattgcctcatttttatatgctaaagcaataaaaccactaatggttcattccctgacattatgtccctcatttgtacaaacataggtcttctactatggcaccagactagacagcagtggattggaaaacgaagacataattctcagggtcaacaaagtcaaggaccaaaaataagttgtaatgctacatacgagagcctgctcgggagctcgaaaccatttccacaaccgatccctcttggtgaaatggtgggtttcctcgtgatcagctgggagcaggaaggcctatacgattagagttggttattggaagtgtgctgtttcaagtcatgaatcgctgaaatgtacgcaacttctaggctgcgaaagcttgtgacctcatggatgtggactgtctcggagacaggatgacatccctcttatgcaaatgtaaaatattctttgttattttattactagtaattgtgttt

SEQ ID NO: 33856 - DNA, 1832 bp, Zea mays
  Clone ID: UC-ZMFLMO17176F02_FLI
ccggttgtggccaaatgggtatcgaaatattgtgcctaatcttcatcttcctcctcctcatccgcgtgctcaccaggagctacgccgcctccccatcgccgcccgccatgtccgcggcggcggcactccggctgccaccggggccatggcagctgccgctgatcggcagcctgcaccacctcctgctgtcacggttcagcgacctgcctcaccgggcgctgcgcgagatgtccggaacatacggtccgctcatgctgctccgcctcggctccgtgcccacgctggtggcctcctccgccgaggccgcgagggaggtgatgcgcatccacgacgtggccttctgcagccgctacctgagcgccagcctggacatcatcagctgtggcgggaggggcgtgctcttctccccctacaacgaccgctggcgcgagctccgcaaggtgtgcatgctggagctcttcaacccgcggcgcgtgctctcgttccggagcgtccgggaggaggaggtggcgcgcctcctgcgctccatctcggaccagtgtggcggtggcggcaggcacgccgccgccgtcgtcaacctcagcgaggccatctgccgcatggtgaacgacgtcgtcgtgcggaccgccatcggcgacaggtgcaagcaccgcgacgagttcctgcgcgagctcgacgaggcggtgcggctcaccggcgggttcagcctcgctgacctgtacccgtcgtcgcgcctcgtgcgctggttcagcgcttccgccagagacatgggaaggtgccagaagaacgtgtacggcatcatcgggagcatcatccgtgagcgagacggcgcgcgcgtgcctgggcggcgggaggacgacctcctcggcgtcctgctgaggctgcagagggaaggtggcctgcagttcgcgctcaccgacgagatagtcatcgccgtcatcttcgatattttcgctgccgggagtgagacttcatcgacggtgctagcgtgggccatgtcagagctcgtcaggaacccacgggtgctgcacaaggcgcagtcagaggtgagggagacgttcaagggccaggaaaggctaacggaagacgacatgcccaggctgagctacctgcacctggtgatcaaggaggcgctacggctgcacgcgccggtgccactgctgctgccccgggagtgccgggagccgtgccgggtcatgggctacgacgtgccggagggcaccagggtgttcgtgaacgtctgggcgatcgggagggacgacgggttctggggcgacggcgaggtgttcaggccagagaggttcgacggcggcggcggcggcgtcgacttcaggggcaacgacttcgagttcaccccgttcggggccggcaggaggatctgccctggcatcgcgctcgggctggccaacatggagctcgcgctcgctagccttctctaccatttcgactgggagcagcccgcggacggccctggaactggaagcagcggcagcctcgacatggcagaggccttcggtataacgctgaggaggaagtccaagctcttgctcaaggccacacctcgtgtcgaaaccaagtagttgttctatgctagtactatgatgcatcggcagggcagtccgatccgtttgccgcttctacttgtagtagagccaatggatcaaagacactgcttggttgggaccaccacgtgtgtatcgtttgatatttaagtctcgcgatcgagtacttattagagcaaggataataagctagccggctgccggtttgtatagtcttgacacgttgcttaaaacaaatgcttatataagagcatctctaagagactcttc

SEQ ID NO: 33857 - DNA, 1284 bp, Zea mays
  Clone ID: UC-ZMFLMO17176G04_FLI
gggttacaaaggaagcttttgaatgggttattggtgagattgaatcgaggtttcttcagtctttggtggcccctggcgagatgattggatgtgtggctgcacaatctattggagagaaaggatatagccctctctctccatcatatagccctgcatcaccaagctatagtcccacctcaccgtcttacactcctggctctcccacctacagtccaacaagcccgaattactccccaaccagcccgacgtactcgcctaccagcccatcgtactcacccacatctccgagctacagcccaacatcaccaagctacagccctacatcaccaagctacagccctacatctcctagctatagtcctacatcaccaagctacagccccacctcaccagtttatagcccaacctcaccagcatacagccccacatcacccgcttacagccccacatcgccatcctacagtccaacttcaccatcttatagccctacatcaccttcatacagccctacgtccccttcatacagccctacctccccctcatacagccctacctctccctcctacagcccgacatcacctgcttacagcccgacatcaccaggatacagcccaacgtcaccgagctacagccctacatctccgagctacagtcctacatctccgagctacaatccttcatcagccaagtacagcccttcacatgcatactctccaagcagccccaggatgagtccatacagccagacttctccaagctacagtccaacgtcaccgacttactctcctacatcaccatcatattcacaaccaagtccatcgtacagcccaacgagcccgttcaacacctctggaggacccagcccagactacagcccgacctctccaaattacagccctagcggaagctactcccccactgcaccgggctactccccgtcgtccacaggccagggtaatgacaaggatgataagagcgctcgttgaagaggcacaggagaacaaggcgctctagagcactcgatgaaggcactcggtgatggccacatgggaagatcgaggcacttttttttcccttgagtttttgtatggttgatgaactctgagagcaaacttgtatttttccgagctgctaatagcagaaatagttgtttatgtatgatactagaactaaggactggactgtgctgcgacttgataagtggttaaccgcgtggtcgcccctcagagagtaacacatgtagtaatgtttaatgataatatcgtgactgtacttggtactact

SEQ ID NO: 33858 - DNA, 658 bp, Zea mays
  Clone ID: UC-ZMFLMO17176G11_FLI
taaaaaatgatttaattgaggccaagcttgtccatgaacagctgtgtgtgatgcttgagcagtctgagagggagcttttgggtcataataatcagtatcttccaaagattgtgtctgtttttgcagagatattatgtgcgggcaaagatctagcaacagaacagactgccagcaggatggttaatctactaaggcaacttcaggcaacattgcctccttcagtattagcctcgacatggtcttctctacaaccacagcaacagctcgctctacagtccgtgttgtcgtcatagctaacctaaaatagcctcaactgtgtaaagcatatgagtcttcacagcttgacctttcgtgttctatttatgcgcttttgagccagagccagggttcctggggtttgctttcgcgttcatgtgcccttaggttttgtacaaggggcactgcttgcatccggtgtgtaatatcggctgcagttgcagaactgcacggatgtgtacgagactgggctctctccacatcgtcgattaagttgtaaagcagtatatcttgctcgcttagtaattttagttgggttgaaagaattgtaaattaaaacaattttggtagttgattttaatgtcgtatttcttataccatcagcatgggaaattttgtgttc

SEQ ID NO: 33859 - DNA, 1057 bp, Zea mays
  Clone ID: UC-ZMFLMO17176H02_FLI
aacccacctctttgtctgatgatgggacgagcacgcggcccagcccggcccgcttttttcgctttgctctagtcgtctgctccgctccctgggtgctcgacagtttaacaacctgcatttcttgagttagtatcgcccgccttgcgaagacgcgcagagaatcatgccgacgacgacggtggccatcacgttggacctgggatgctgccgctgcaaaaccaagatccacaagatcctctgctgcctccaacaacggtgcgggttcgtcttcgacaaggtggtgtacgacaaggacaaggtgctggtttcggggaccttcgacgccatggacctcgtctgcaagctccgctgcaaggccggacatttcgcaaccaaaatcgagattgtgcccccgcccccgccgccgccgcaacagaaaaaggatccaccaccagcacaaacggcgcctgcagctgccgtggggagcccccaacagcccgtagtaacgagcaacaggcccgatccgccaccaacgtgcacaaaagcgctcatcccgtacccatgcccgtacccgtatccgtacccgctcccgtgcccaagtccacagccgcgctcctgccactgccactcctgcaagccgccgccatgcccgacaccaccaccaccaccaccacggccttgtccgacaccaccaccgccatgtccgccacctgtgtccgtgtgcaagtgcccagcatggacgccgtgccagtgccgcggccacccgtgggtcgtctgctgcgaggagaacctacaacccgacggcccctgcgctgtcatgtaactgcaaactgttgctgcagaggcgggcgggcggggacggcagcgggttgttgcaactgcaacctctcacgaccctgccatttcatatgcatgtgtgctagtgcataaaagatcagtgaaagcgtcccgtcagatggacggctgcttctgcatgcagttgccattcatcagctgcagacctgactcgagtgtgcgtgcatgtgtccttgttgttgttgtacatgaaaaaaaaaagaataaatttatacgttttgtc

SEQ ID NO: 33860 - DNA, 1530 bp, Zea mays
  Clone ID: UC-ZMFLMO17176H05_FLI
gaacaagaggtgacaagttgtgttgctgaaatattatcagaaaaagtgcatgcttctgaaatggtaggcactgaaggttctgaattagatatatcaactattattgctgacttatttgaccaaaaaggtgggcatcttagtcctgaagcattgaagcattacttatctgctggggagaagctctacaaaatgtccagcaagatttacaaagaaatctgttatttcgaggcatccataaaaaggcctttttttaatgtcaagacacttgatgatgatcagcttgaaaactggcaccagtatcttgactttgttgagaagaatggggattttgactgggtattttttttggctgtaaaactttatgagaggtgtttgatcccttgcgctaattattcggaattttggatccgctattcagagtatgttgacgctaaaggtggccgagaaattgcaaaccatgctctgggtcgagcatcatcatgttttgcgaaggcaggttaaagtattgaggaggcaggtaattgctcaagacagctgaagcctcatgcatgcatgggggcctagcaccgaagtgctcgatgctctcagaacaagttgatttggtggaagagttagggaagagtttacaaacacaggctgagtactgcgcaagaaacatactgtctccactagaacagtggtccaggctcttgaaggatggcattggatcagtgacatcttgacacctctttcctgggctgggatccaacagtttttgctgttatgggatgctgtaagaagagtagtgttaacacaggaggctgatacacatatctgactgcatacttcttctggtcaattctcctccaagtcttgttacaaggccttttttatgggatccattacttttgaaccttggaagaggctgtggaaatcttgggctcctccaaagtgtaagtttttcttgtggctggctattcggaataaatgttggacatctgatagattggaaaggagaggtctggaccacccagagtcttgccttttatgtgatcaatcacaggaaaccatccagcatcttttgtgtacctgtgtctttgcaagacatttttggcattccgttcttttggccttgggtgttggtaatctctctccgtctggagatgagacctcctttgccgattggtggcgaaaatcaagtaagaagattcataaaagcaagagaaagggtatgaacaacatcatcattctgggggcctggtgtttatggatccaccgcaacaaggcagtcttcaatggggagaccccttcgctgagctctatcagatgcgtctttcttgatgagatgggatgttggattacgactggagctaaacatcttcagagtttcgacattgagatcacgcgtaacttacacagggcctaatttgttgggggaggatgtagtgtgtgagtgggtgttttgttgggcctgttcagggctttgtaccttggtccattttggaccttttcttctctaattaaatgatgcgcagttctcctgcgctttcg

SEQ ID NO: 33861 - DNA, 672 bp, Zea mays
  Clone ID: UC-ZMFLMO17176H10_FLI
gcgaggttttccgtgatgcccaagagaaagctcttccgtacgtggattacatctttggaaatgaaactgaggcgaggacctttgctaaagttcgaggttgggagattgagaatgttgaggagatcgctttgaagatctcccaattaccgaaggcttcaggaacacacaagaggattactgttatcactcaaggttgcgatccggtagttgtggctgatgatggaaaggtgaaaactttccctgtgatcctcttgcctaaggagaagcttgttgacaccaatggtgcaggtgatgcgttcgttggaggcttcctgtcccagttggtacaagagaagagcatcgatgagtgtgtcagagctgcctgttacgccgccaatgttgtcatccaacgttctggctgcacttaccctgagaagcctgacttcaactagagccatttcagaatttagagtcttatggcatctggtctgtataattagtcgggttcgccttggtctgtttacggcacattctagtgtcaccgtacaggtcaaatgttcatgcgtgtaaggcgtgtcatactgtcatggcactctacaagtgcatgtgccagaaacgtgcatgcgtctctcggttacggactctttacagttgcatctaaaacaattcaaagcaccttgcggtgcatccttg

SEQ ID NO: 33862 - DNA, 1187 bp, Zea mays
  Clone ID: UC-ZMFLMO17177A10_FLI
gtagctgccttgtggcatgggattcagtcacaagacctttgaagtatggtgggcttgggatccctaatttacaacacatgtgttgggcccttcaagccaaatggctttggcttcaaaaaacagatcgggataggccttggcttggcttatccatcccctttcagcaacatgttaaagacctttttgctgcatccctgatttctcacgtgggaaatggctctaataccttgttctggacagataagtggcttaatggatgctccatcagagatcttgcttcagaagtggtgtccaaggtggctaagcgagctcttacctctatgacagtggttcaggctcttgaaaacaggcagtggattgcacatatcaaccccccccctttccttgattggaattcagcaatttcttttcttatgggatactttaggagatgtgcagctttctcaggaggaagaccgccatgtttggagacatgagacatcaggggtgttctcctctaaatcctgctacaaggtccttttattaggttctactgtttttgagccttggaagagattatggaagacctgggctcctcccaaatgcaagttctttctttggttggcaataagaaacaaatgttggacagctgacagattacagttgaggggactgccacacccagatgtttgcccaatgtgtgatcaagcccaagagacaattcagcacctccttactgcgtgcatttttgcccggcaattttggcatacaattcttgctgctattggcttggggcatctcactccgactgctgatgagggaaatttttcagaatggtggggacaggtgtgccttagagttaccaagacaaggaaaaaaggacttaactctctgataatcctgggggcttggtgcctatggcttcagagaaacagagcagtgtttcatggggagtctccttcattgcccaggattcttagatgtttctcagatgagtgtgtttgctgggttttagcaggagctaaggaggtcggtagtatgggcttagttgctgccctgggcgaggtcgggtctagtttcagtacttctatgtaatttctttcggaattttgtgggtctttgggagatttgctttgcaacatctcctcttttgtaatgtttctcttcctctttattatataagatgcgcaattctcctgcgcgttctc

SEQ ID NO: 33863 - DNA, 1780 bp, Zea mays
  Clone ID: UC-ZMFLMO17177B06_FLI
cttggacgtctggctctggaggtcccaagttcccaacgcttgctggagttgagatctggtgggcttccggaggagacgccgacggtttgcgaggtttgctggctccgtggcgtcgcggaaggtcatggagcaccgcgccttcgactgcagcgggagtgatgatgatctccctccaacatatcaaattagagtaccgagaatgcatttcagtgggaacagaaggccattagcaggcgcattttctcagccaagaccacacaacaagttggatagcgatatacatcagattgagcaacaggcatatactggtgttcttagagcattcaaaatgcaatcggatgccctgacatgggaaaaagaaagtctaattactgaactaagaagagagttgaaagtctctgatgtggaacacaggatgctattaaacatggtcaatgaagaggaggctatccatagaataaggcagtcaaggcagggatgtggaatgcaatctagcttgccttataatagcgtagttgatcacaaccttggacctatcaagcgtcagaagaaatcacatcccatctattcactccctgtggatcctcattcacccagcatgcctttgaaagcattggtgggcaacaaggcatatacagtaggtttggagtattcctgatcctgctttttgttcaccatcaagagtgtgcttatagttcttaatagctgacctcctgtcaagcgcgaaaaacatgccagttgcaaacaaattatgttcaagtggcacacgcacatacacacaaattgaaccaagatgaaaaattaatcttttgaaaaataggcaagtcaggaaaggtaatatgaaagcatgttgtggcatcctatttcattggcaatgttttgttgacgaggagccagaattctctacctgctggtttaatgttctaatacatttttagtcaatgcttgatcaagcattgccctaacctagcatctgatattttgcttaatgagttgggttcaacgcccattttattgtttcaaaatcttaatcatcattgaacactcatgtgtagttagtgtagcatgctttgtgtcgcactggcagttaaaaagtccccccaccccccaccccaccccgacagctggcacctgaaaacataagacggggatctgcctatcaaacccttccacatcaggttggttggctggcatctgatggtgctacgaaaggtatggatgggagaagcggaaggtatcacacgaacgagtattatgcttcacataatgacatggggcttttgaacttcaatcgtactgacatacctgatactgaaactcttgtgaaaaaggtggagagggtattatcccggccagatgtgtattcaattgaaagggcaaaggaactgcttataggccaagagcagtcattgcttgatgcaattgccaaacttgatgaagcatctgaccatgaaagcgaggatacgctcgttgggagccggatacacgccgccatcgggtgacactggcggcacgcctctgacagggggcgatgttttggagttcagacctctggcagcaggcggagaggcaacgatatgtgaaatagtgctgtgtaagtaaaacgctacttgttgttagtccggtaggttaagttcttttggcagccaggcaaatctgtgcatgcaccatgcagtgtgatgggaatatatttcttgagcaccatcacatgtgatgtgatgctgtctcgtttcatcttcaacgtgagtaagctcgactcctggaaacatgggtcggtttc

SEQ ID NO: 33864 - DNA, 1373 bp, Zea mays
  Clone ID: UC-ZMFLMO17177H11_FLI
tgagaagggaaaggaacagagccagctcttaccaacattgcttattcagtactcccgtttcttatttttggtcatcagagacttggagaaggcaagggagatattaactgtgctgcatgagcagttaaatttaacaaaaccagtgcttgaggctgtcatccatctagagtcgatttttccatgcgaaaagcgtattgaatttttagactcacttgtggagaagtttgttacacctgaatcatctcagggagagttggcaagtctagttgacaaagaagaaatatcttccatatttttagagtttttggatctctttggtgatgcaaagtcaatcaataaggcttcaactcggcatacaacttttttttcatgtaagagaagcattctgccatcaaagaaacggaaggctgatgatgctgttctgtcagacagggacaagtttgctaaaactgggtctgttcagtcagccacaggaactgatccaaatgcttccaatcctcctgtttggcctgcgacttctgaaacatctggacatcaatggggagcttcttatgctcagcaggctgcatatcctgcatatggaacttatgactacagccatcaaatgccacagcctgctcctcaaacagctgcctatggtgcttatcctccaacatactctgttcaggcctatacacaacaaagctacacacaacctgcagcaattccggcagcaccagtgccagcagtggtaccagcacctacaccggcgtcagcttaccctcagcaacctgcggcagctcctcaaccttattatggaacaacctactactgacaagtagagtaatcttcgatggcgatctgacgagcctgttaatcagcaggtttgtcgatacgaggtcaaaggcatcgcaaaaccctctgtactgccattgtttagccccccttcagacagatgccgtcgacgagatgatcgcttgagaacaaatttgagattggtatagtctgcatttttgtcgttagcatgtgtcgctagggattgctattgtttttcttgtaatagcataatctttactgtagaagaggcagcgggtgctaaccaatcctatgaacatataattaacattattcactgtttcatgccacctttcggagtgcttttttttttcaaccactgatgatagcgggattcctgtcaagcacgctcactggtgaagtcctcggaacaaaattgtcaagatctgcgactacacagttcactgatttctactgtcactgtaggtcaaactatcttgatttgactaatttggaagggagattcggtaacttagtaacaatatatgaccaaatgactattttctgaaaatgcattttgtttagaatttatcaaattt

SEQ ID NO: 33865 - DNA, 2031 bp, Zea mays
  Clone ID: UC-ZMFLMO17179A01_FLI
tccagaggaatggaagagagggaactgatagatagttttctaaagatggcactaccaggaacaagttctggtttgcacattgtccacatagcagcagagatggctcctgtcgcaaaggttggtggtctggcagatgtgatctctggtcttgggaaggcacttcaaaaaaaggggcaccttgtagagattattcttcccaaatatgattgcatgcagcataaccaaataaataatcttaaggttctagatgttgtggtgaagtcttactttgaaggaaatatgtttgccaacaagatatggactggaactgttgaaggtcttccggtctactttattgaaccgcaacatccaggtaagttcttctggagggcacaatactacggagagcacgatgacttcaaacgtttttcgtactttagccgtgttgcactggaattgctttaccaatctgggaagaaagttgacataattcactgccatgactggcagactgcatttgttgcacctctttactgggatgtatatgcaaacctgggcttcaactcagctagaatttgttttacctgtcacaattttgaatatcaaggaatcgctccagctcaggacttagcatattgtggtcttgatgttgatcacctggatagaccagacagaatgcgggataattcacatggcagaataaatgttgttaagggtgcagttgtgtattccaacattgtgacaactgtatcaccaacatatgcacaagaggttcgctcagagggtgggcgtgggctccaagatacactcaaagtgcactccaagaaatttgttggaatacttaatggcattgacacagatacttggaatccgtctacggataggtttctcaaggttcaatacagtgctaatgatctatatggaaagtcagcaaacaaagcagctcttaggaagcagttgaagcttgcttccacacaagcttctcaaccattagttggttgcattacgaggctagttcctcaaaagggtgtacatctcatcaggcatgcaatatataaaataactgagttgggtggacaatttgttctgctgggttcaagtccagtacagcatatccagagagagttcgagggtattgcggaccaatttcagaacaacaacaatgtcaggctgcttttgaagtatgatgatgctctggcacatatgatctttgcagcatcagacatgttcattgttccttctatgtttgaaccatgtggcctcactcagatggtagctatgcgatatggttctgtgccagttgttcggagaaccggcggtttgaatgacagtgtcttcgatttggacgatgaaacgatacccatggaggtgcgaaatggcttcacctttttgaaggctgatgagcaggattttggtaatgcactggaaagagctttcaactactaccacagaaaacctgaagtttggaaacagttggtgcagaaagacatgaagatagatttcagctgggatacttcagtttcccaatacgaagaaatctatcagaaagcagccactcgagccagggcagcggcataaacagcagagacattgagacagttccctgctgtctccatgaagtctcctagatgctgtgtatggtaaacaaatatggtctgtatcagctcagaattaagcatctgccgaggaagcgcggtccatcccgacacgggtgtacaaagggcgacgtggcgttacgtgcagtccccaacgaagcaaagagacagaagaagtacagttgtacagaacggatatcttgtgaagcacacattgggatcaggacgtttggtgctgcagctactttcggtgcagaagcacatatatacgagacctgccagggcgagcaaatacccagttatacacgcgattgctcagctctatcaagctgtgaattgaaagatttctatagtgtattcacgcaacgttttcataaactagtgagttatgtatgaccagtagtgcgaagtctgtataaaatgctaaaatgacgtttaagacgagaggggtttttag

SEQ ID NO: 33866 - DNA, 2076 bp, Zea mays
  Clone ID: UC-ZMFLMO17179A04_FLI
ctctactcccccggtcccccccccccccctctccgccttctctctccccgcaggcggtatccttccttcctcggttcctctcctctcccccaccagccccaccccagcgccccaaatgccgctccaaccctagcctcccgccacgcctttcgatctcgggcggccatgggcaactgctgccgctcgccggccgccgtcgcgcgggaggacgtcagctcctcgcacttccccgcatccaacgcgaagaagaagccgcaccaagcgcggaacggcggcgccggcggcgggcagaagcggctctcggttctgggcgacgaggggtgcgaggtcgtcgggatcgacgacaagtacgtcctggacagggagctcggccgcggggagttcggggtcacgtacctgtgtatggatcgggacaccaaggagctgctcgcctgcaagtccatctccaagcgcaagctgcggacggccgtcgacgtggaggacgtgcgccgggaggtggccatcatgcgccacctgcccaagagccccagcgtcgtgtccctgcgggaggcgtgcgaggacgacggcgccgtccacctcgtcatggagctctgcgagggcggcgagctcttcgaccgcatcgtcgcgcggggccactacaccgagcgcgccgccgccagtgtcacccgcaccatcctcgaggtcgtccagctctgccaccgccacggcgtcatccaccgcgacctcaagccggagaacttcctcttcgccaataagaaggagaactcgccgctcaaggccatcgacttcggtctctccatcttcttcaagcctggtgaaaagttttcagaaattgtgggaagcccctattacatggctcctgaagtattgaagagaaactatgggccagaaatagacatatggagtgcgggagttatcctgtatattttattatgtggagtccctccattttgggctgagactgaacaaggggtggcgcaggctattcttcgtggaaatatcgattttaagcgggaaccctggcctaatgtttcggaaaatgcaaaagatttagttcgacacatgttggagcctgatccaaagctcaggctaactgcaaagcaggttcttgaacatcattggcttcaaaatgcaaagaaggctcctaatgtccctcttggagatattgtaaagtcaaggctcaaacaattttctaggatgaatagattcaaaagaagggctctaagggtcattgctgatcatttgtctgctgaggaagttgaggatataaaggatatgttcaagactatggatactgacaatgatggaattgtatcttatgaagaactgaagactggaatagcaaaacttggttctcatcttgcggaatcagaagtacagatgctcattgaagctgtggacacaaacgggaggggggcactagactacggggaatttctggccgtctcgctccacctgcagaggatggcgaacgacgagcatctccggcgggccttcctgttcttcgacaaggacggcaacggtttcatcgagcccgaggagcttcgagaggctctggtggacgacggggcgtccgacatcatcgaggaagtggtgaacgacatactgcaagaagtcgacaccgacaaggacggcaagatcagctacgaggagtttgtggcgatgatgaagaccggcacggactggagaaaggcgtcccggcactactcgagagggaggttcaacagcctcagcatgaagcttataaaggacgggtcggtaaagctgggtgtcgagtgaaaaccgcaccgacgctcgttcatatgtgtgtgtgtgtggtgtgtgtgcatgtagttttaggcccttggcccactaagcagaagaactctaggcctttttttttgtcccctcgtgactgtcttgcgtggaaattttagataggtggaagtggcggaaccctccgatttgtcttactttactacctgtgtaattagctatcccggtctcgctgacaggcactgagccaaacggtgtacctaatgctgtgctcctgctctcacccgttctcttgatgccagcccgagtgctgtacgatac

SEQ ID NO: 33867 - DNA, 3094 bp, Zea mays
  Clone ID: UC-ZMFLMO17179A09_FLI
cgctttatctatcttagttaggttgcttctggttcattctgtttattgtctcattttatgattttccccgattctttttgaaaattttgtttcttttgcttattgctgccctacattgattacactgcgtcttcgctaatcaatgtctgaaacatattgttcgtgggtacatcctcagcatgcaaggggattgttatatgtgttcttccctgtttctgaacataacttattaatggttttgggcaaggttcacaactggagtatataataaagcgaagaaacatatttgtaaactaacttgttatttatcaattagccactgctaggctcgttaaatggttttgtacagaaactgcatctaaagttttgacaagtattgatttgaaattcatatgatcgtttacatcatatggaatatggatgatactattttgggaaaaaaccagagagtccttgttccacttgttctattcagtggttattgtttatttgtttttccacatagagccaattagtgtcattagcttgccaggaggactgcaaactatcctggagagcaggtgtgttactgtttaatatcaatgccctactggatataactctgtattttcacttataacatgttttatggattatgtgagctgacgtgctttatctggcatctgtatcatttcaaatttttcatctgatcctcctgtttctctggagcacaatggatacatatacattgctttctcatggcttgtttgtgagaaagaaatgctctaaacagacccaggtccccaggtgtttcggttgtttatggtggtcatgcattccaatttaggtccttctgttctagttgcacatatttagttctgatgtttatgatcactacagaggcaagtttttccttttaattcactattcccacctatacaacttggtggttgattaagagttgtattctcatgtacatagtctctgattcatgatacttattttatagttgggcccaaaaattaaggatctatattctctaaagtgtgcatagaccagtcaagaagccagttaatagtgcaactaaagaagggttgtactggggaaaataggtaaaaaggctaaaatttgggatccaaatacagtctgtgtcatgcataaattttatttggaatattcctgtatcatatatgttgaactctttcgcagcagaaggattccgaaaaccttgcatgaagctattttatgtgatatttgtgtctattatatgtaccttgtggctttgcaggttgctgcccaatcttttttttgtgcttatatagtatcatttgaatgctgtctttgatgcttcattttatttttttttcaacttcagtaaagtagcatatctgatcatcatatatcctgtcatttagcaatgaatagaatcttttagatagtagtggaagcacctttgtattatcatatatatctttggacatctattgaaactctattccatggtattgctattcaacatatatatgtatatattcgtctagctgtccaatcttcattagccccatagttttgcgcgtgggcaacggtagatgggcatcgctagcttgacgatcttgatcggtgagttgctccttccatttttcttggtggttatggaatttatctgcaatatgtcttgtgcttttgtatgtctgctatttgtgctgctattttttttttctattatgtgcactatgtctctttgtcatatacatatacagatgtgcaaactatatttttgcagaatcgtgctaggaatccaatgtctggtggctattctcagcagggatatcgccctcctcgtccccagtcaaactggggcccgccttctgtgccaccccagcagcctggctatggttatatgcagcctggggcttatcctggggcaccgccacagtatggtgcacctcagcaaccttatggtagctaccccccaacatctggtggctatcagactggatgggatcagtctcaaaaccagcaatctcatacaactccccctggtactgggtatgattattatagtcagcagcagcaacctcagcaacaatctgcccctgggacagctgcttctactgatgccactagctacaattatggtcagccttcgacgtatgcttcacagggatatgattctacctacactcagcagagtggtgggcagcaagcatatggacatgatggctacactggttaccagacccaagggcagcagcagggctactctcagcagactggttatgatcagcagggttatggcacatctgcttatggatcagctgcaaactcgacccaggatgggtccaactatggtggtcctggaggggccagtcaggcatctccagggcagcaaacatcaaacccagctgctggaagccaacctggctataccagccaaccgcccactagtgctgcagcaacttacccacctcaaggttcagctccatctggatatggcgctccaccatcccagtctggctatggcacccaaccaccacagcaaggcggatatggtcagggcgcttatgggcagccttctccacagggccagaaacctcctccattgtcaccttatggacaggctctgcctcctggttctgctcaggctggttacgggcagtatggttacagccaacctgcttacggtgcaccaccagcttaccctggtgcacccattgcaagccaccagggctatggccagcagcagtcttatggcgatgcttatggtagtgcaagctatgggcagcctccagcctactctactgaagcaacacctcctgctgcatcccaggatcactctgctgcccctgctgcggcccttggaacaacagcttcgacagctcctgaaaacagtgggggcgcccaaacatccgctgaaacttgagcttcagcagctaattgggaacaaacattttccaagaccctgccgtgtggtttcctccgcgctgttgcttaatataattacgcatctaatttagggtctacaactacaagttatttttttttctgcctgttgtttttgacaccatgacttgctgtttccttgctatattgagtagtaccttgcagttatttt

SEQ ID NO: 33868 - DNA, 891 bp, Zea mays
  Clone ID: UC-ZMFLMO17179A11_FLI
cccgaattcgctgattttggaaagctttttaagtcatctgcacctgtagaattgactgaagctgagactgaatactcagttaatgttgtgaagcatatttttgatggacatgttgtgctccaatacaactgtaccaatacaattcctgaacaattgcttgaacaggttattgtttttgttgatgcttctgaggctgatgaatttttagaagttgcttcgaagcctttagaatcattaccatatgattctcctgggcagacctttgtcgcttttgagaagccagaaggtgtcattgctactggcaagttctcaaatatcctgaaattcattgttaaggaggttgatccatccacgggtgaaactgaagatgatggtgttgaggatgagtaccagcttgaagatcttgaaatagtttctgctgattatatgttgaaggtgggagtatctaacttccgaaatgcctgggaaaacatggatccagagactgagcgagttgatgagtatgggcttggagtaagggagagcttggctgaggctgtaagtgctgttataagcatccttggcatgcagccttgtgaggggactgacgtggtcccaagcaattcaaggtcgcacacttgtctgctctctggtgtgtttattggcaacgtgaaagtcttggtgagactttcatttggaatcagtgcaccgaaggaggtggccatgaagctggcagttagatctgatgatccagagatcagtgacaagatccacgaaattgtcgctaatggctaaaaacaatagtagaatcgtttttttttactctttttttgttttgacttgcatgctacgggaagcttgaggggattcaattaattctagtatatgtaagtctggtttccagttgaatcc

SEQ ID NO: 33869 - DNA, 2317 bp, Zea mays
  Clone ID: UC-ZMFLMO17179B03_FLI
cagcactgcaagtaagcttctaaatatttagtttttgttagcgtttttctggcattacatattcacattttttcatcctctgcaaccatttcattttcagaagtttcaccctttgacactattctacatcttttacaggtactttagagttcattaaactgatcttttgatgtaaataggttgtgcatcatctaactgtgttctttgtgcagcatgcctaaagatgccactcagttatatgctgctaatgaactgtaagcatagaaactgcacaatttgtagtatcactatttgtattcttgatgtatagcttgcagtcttgcactaatgcactctaccacagtttttaagtaaattgctgctccatgttttcagatacaataaagggtggttttaccacaaagactaccgtgtctggctaacaagagcgcctaattccgcacctcttgtgaaaactccacttcactcaaaacatctagcactaatgtgaaggccattttttgaggtaatataatagaacctaatttgtgttgtcatttttgtgcatggctttatggaggtatcgacaacaacgcccaaaggaacccgtcgcaatttttattctaggctttagtacaattttttataattttattagtatatgcttccttgataaattatttcccaatttatctgtttgtgctaatatacatgggtgctctttttcttttgtttgtaagcatttttatggcctctcttttcatgatcttatttttccagacatacaagtacaaggattaacttttcagaacattctgcaggcactttcacatggatgtttaattaatttactactttaagaagcaatcccagatccacatccaattgtgcctccctgtattctgtatgatctatggagattatgttgtatcttcatggatccacaacagctcaacatgtagctaaaaatcagctgcatcagaaatattaagcaaatcagacatgcgggcctatcaacttatttctggtataaaaaactgagatccttaaaaaagaataaaatattttacttttgttgcagcctgctggactggaccccgttgtgttcttccgatgatcaatcagtcaatcacaaattcaaaccatacaaatcaagtatgtttttattttatattacggtgaaatgatactagaatttcaatgacatgttacacaatttttcttagctcaatatccagcagctcaatatccagcgtgcttttggaagtctgttcaaggggtggagtgaggagaagatatattttgctcccacatacaagtactcttgcaattcagattcttatgctggagagactgccacatcaaagaaaaagaggagaaccccagcctggtatgtactacaatgtttgagatagtttcagagagttcagatctcattctcatatgttaacactcgtcagtggctatgaagtatcctagagtccacaaacctctttgcaacccgaaaaccttgtgtttcccctttctgtaccacaagaaccatcttttgagatgagttaaatcagatttggacaacaaggtaagttgtaagcgtggggaaacacaaaagaggaatcattctcatgtgcaataaataaacaaatcaagataattcacatattcagaattcaggaatcacacttcccaaaccatgaatacataatactattaatgaccggtttgttgcaaatgttcaggtgtgaaagaatactatggcatggagatggtattgcacagttgtcctacttccgggggggatctcaattctctgaccatcgtcgtgtttgtcggacatttactgttgaggttaaaaggctagatggccgatcaatgcggcgcccatcaaacaccaacattagaatcgatgctgaagagttgttaccgacaagagacaagcataactaaggtgatctagatggatgaaattgtcgacaaggccattagcatcatgcaggttacctcaaagcatctcatgtatatccgcaaggagaagctgcacccagggaaggcattgagtgcaatagaggtgaaggaactgcgcgaagcccttgaagcgattgctgaaggtttggaccaagattcactcttgtgccagagtttggcgtagtactcgattacaaactgtgtactatgttaatgtaatgacatagtttgtatgatacagatcgtagtgatgttgtttgaagctgtttgtatgaactgtttcctactatcttgtatgaattatgatgtctgatgtagtttgtatgaactatgtcatattatgttgaatgaagctattgcatgcccttattctatg

SEQ ID NO: 33870 - DNA, 1959 bp, Zea mays
  Clone ID: UC-ZMFLMO17179D12_FLI
ccccaacgctccaggtggtcagcttcacttccgagcgcccctctcccgacagccgtctcctcctcaccgctgcttcatcacctagccgtcgccacccatcgcctacagcgacagccgtcttccgtcacagcggagcgcccctcagatccaagggacgctgcacgagcgcaagagcaggttgttgagaaggggaatataatcatggatatcatgcagactagtgactcttcacatcatggaattgtagaaaatagcccgtacagaattccatatgacagacatgcagaaggtggtcaacttggtgcttcatggtattttagtagaaaagaaatagaggagaattccctttcgaggagagacggcattgatctgaagaaagagtcttatcttcgcaagtcatattgcacatttctgcaggatttggggatgagacttaaagtacctcaagtgacaattgctactgctatagtgttctgtcatcggttctttcttcgtcaatcgcatgccaaaaatgacagacggacaattgcaacagtatgcatgttcttggcgggaaaagttgaagaaacacccagacctctgaaggatgtcatacttctttcatatgagatcatccacaaaaaggatcctgctgcagttcaacgaataaaacagaaggaagtatatgaacaacaaaaggaacttattttactcggggaacgtgttgtgcttgtgacacttggttttgatttgaatgtgaaccatccttacaagcccttggttgaagcaataaaaatattcaaggttgctcaaaatgcacttgctcaagttgcctggaattttgtcaatgatgggctccgcacttcactttgcctgcaatttaaaccgcaccatattgcggctggtgcaatcttcctcgctgcgaagtttctcaaagtcaagcttccatcagatggcgagaaggtctggtggcaagagtttgatgtaactccgtggcagctggaagaggttagcaaccagatgttggaactgtatgagcaaaaccgtgttcaaccaccaccatcacaaggcaatgatactgaaggcagttctgcaagtgttgcgaatcaacgtgttcctggtaaagttctaggagtagctgatgaacctcctgcccatgaccataaccaagcacccagaccatcgagccagcagaacatgttagaccaccgtggttatgaccaccctcacccagataagcaaaactataggatacctccaaatgatgcaagggatggcactgctaatagcaacgaaggtcccaatgtgtcgtcttcaatgatggatgcgatgaagaaggtaaacaaggataaggtgaaagcggcactggagaagcgtaggaaatcgaaaggtgatttttcaagaaaggtcgatgtgatggatgacgatgacctcattgagagggagctggaacatggcgtggagttggctgccgaggatgagaaggtcaagcaggagagaaagcagagctggcctcatcttgcacaccaccagagcaccaaccgtgagaataccgaagagggtgagctgtccatggacagtcaagaataccgttctccggagcatgacaatcggaagagaaaggatgtgcgtgagtaccggaactacgatcgtgacgaaagggaccttaaaaggctaagatcatgagagttgcacttttgtcgaagtctcatgttgttcgtgccataacatgatgtggaacctctatctttctgtcacaggtgtacttgatgcttatttggtatgctgggggatttgaactgttacatatataagtttataagatggtttccccacggtcatgtatgtgtttagccatgttggcaattgagatggcgctgtgccttgagtattccacaggtttatgctggaaacaacatttaaggaagctgcgtcctacgggtatctgaaatgtatgtattttgattccaaggtttcctc

SEQ ID NO: 33871 - DNA, 1372 bp, Zea mays
  Clone ID: UC-ZMFLMO17179E10_FLI
ggcgtctctgttgctgcaattgccaagtggatgaaacagatcggtgtgagagtcatgtcaaggccacaaccaacaaaattgacggggtgacgaagggtttgagggattctgctactgcaaaagtcgagccacacgatgatgctccccctatcgatgtcgatgttctatccttggatgatctgataaaaaattgttgactttggttcaagagccttgataggtgaaggtatttatgggacattgtactatgcaactcttggtaatgtaacaaaaatgacagtaaagaaactttactgaaaatgaacccattgtcgagttcttggtcgaggttggtgttgccattgattattgatcacgggggttactaccaaacaatgatgcttacttctgatgccaagtctcattggtttcaaggatgacacatgaaaactttgttgacatgttgggggaccgtatcaagcgtaatcttcgcatagtatcctacgaattcgcgaccatgggttctctccatgatgttctacatggaagaaaagtatttcaaggtgctcgacctggcccaacgtttggttggatgcagcgagtgcaaattgttgttgacgctacaaaaggactcgatattttcatgggaaagttcatcagtccattgtccatagggataatagaacaattaatatcatcttgtttgaaggcttcaaggcaaagatagtagacttcagatatggctgtccacttgcacttgaactcacatcaagccttcggatatcatgccgcacaataataatcctttttttaaaggcgatgaggcggctaaactaaatagagtggggttaagtccctaattgccttgcctgcagttgacttgcaacattttccctgggatgtccatttcaagccccacaagctctagaagcttaaagccatccatgtctggcatgtgcacatcgctgatacaagatcaaacaagttcttgttttgactcaacatggtcaagatcacaacagtctgattcatcgttgtgactgcaaatacgaaacaatgtgtcttacaggtgcaacaggagagcaagcaaagcacaagcaaaagtgcaaaattgtccgaagtccaagtagaggagagcagcggagttgatgcgtacccaaggtagcggaggaggatcagccatcagggtgagcctcgtgagtaggaaggtctcggcacggcccgaccgacttcgcgacgtggaccacggcgtggagtgcgcacaacacaacatgctgacttgtacttgttttgcttaaacaataaaccatttctcaataattttcccattatactgcttatgaaatgttcattgtgcacatgatttcctgtacatcggttagtgcttattttc

SEQ ID NO: 33872 - DNA, 883 bp, Zea mays
  Clone ID: UC-ZMFLMO17179F02_FLI
aaagtgaagaaagaagacgtgctaggttagaacgtcatcagaggactcgtgaacgagcggcaaaagctctggctgagaagaatgaacgtgatatgcaagttcagagggagcaggcagagagagatagaattggagacactctagacttcgaaatcaagaggtggtctgctgggaaagagggcaacttgcgtgctttgttatcaactttacaatatatactttggccagaatgtggatggcaagctgtatcattgactgatttaattactggagctgctgttaagaagcagtacaggaaggcaacgctgtgcattcatcctgataaggtgcaacagaaaggtgcaacacttcagcagaaatatattgccgaaaaagtctttgacattcttaaggaggcatggaacaaattcaactctgaagagctcttctgaagcaacctccgtgactgtgaatatgcatatatgatggacagcttaaccgcataccaacatgagtcgccggagtagcaaggcacaagtgaacaaagtgaaagctccatctcagttaccatcgttcgacagattgtgttcagttgctccccccgtccactgtgctctgctgctcccatctgtatctgttcactccatggtacttgcactccacatctacgaatatacgtacgccatctttttttgttttagtttttgcagcgtgggttggctcatacaaccaagatttacactgtatggcttcttaaatactatctcgtgtacaatggaccacacatgtcgaaactacacttgctgtctaaagcccttgttgatttctaccggaagtgatgtagtacactgtacaggttgtaccattgttgatttgaaatgtgatttggtttactcaattcttt

SEQ ID NO: 33873 - DNA, 964 bp, Zea mays
  Clone ID: UC-ZMFLMO17179F03_FLI
ccactcccctcttccccagttccccttgtcctttgcgcaggggaaaaggagcgccgcagaccgagggacggcgacgaggtatccaatggccgaccctgacgtgatcgaagtgaccttcggcaacgacgtgattaacaccaccgtcacatcctccggccaggctgtggagcgctggatcgcggagatcctcgcgttgcaccgccccggcagcaacggctacagcatcatcgtcgggcttgacgttgagtggcgcccaagcttcggcccgcaccagaacccggtggccacactgcagctctgcgtcggacacagctgcctcatcttccagctcctctacgccgactacgtccccggcgcgctggcggagttcctcggcgaccgcgggatccgcttcgtcggcgtcggcgtggaggcggacgcggagcggctcagcgacgaccacggtctggtggtggccaacgcggaggacctgcggggccgcgccgcggagcggatgaaccgcccggacctccgccaggcggggctgcgtgcgctcgtgcaagtcgtcatgggcgtcaacctcgtgaagccgcagagggtcaccatgagccgctgggacgcgtcctgcctcagctacgagcagatcaagtacgcctgcatcgacgccttcgtctctttcgaggtcgcccgcaggctgcttggcggcgcgtactgatcgacgcggtgaggtgctgtgttgtttaatccttactctatcctgtcttagtttgttgtactttgccgtggactcccgttgcttaatccttagcctatcctatcttagttcgttgcgctttgcttccagacaatttgtgctagtgtgctcagacttcagatttggttgttgctgcatttcgggctacaaggttgtaggggtttctgtgatcgaggagaattattcagacagtcatgtactgcgttcctggtttgtcgctgcttttggcgt

SEQ ID NO: 33874 - DNA, 2520 bp, Zea mays
  Clone ID: UC-ZMFLMO17179F05_FLI
cacattaacttaattatttcctactatctgatacactttcgtcaaacaacgaaatgcctttccagagctgagactgccttatacaaacttctacaaatacagcttaagtttttaagtgtgtgctctaccctaaccttatagaacatgctgaaggtttggctcacaaacttctagataaatctttcaatgtcgtagcagggagtattagatccatcagaagcttgccaaattgagagggtatataaagaggtgttaccagaactttccttctttcaaaacaatagttttgtcgccttttcctgtcgtatcagtcgtctacatagcatgccaaaacccctctgtttctttttcctcatggaaaagcttcagtccccttcttatttatcaacttcatacaacattaacccatagttatcatggcagcgcgtaggcgctgactaggcatccaagcggtcggcagtggatgccatgcctcgtcgcctcgcctgaacccagttaggcgatggtaagacatctcctagaagcccacctagctgttgaactaggctttaatgggtctgccttgtgcactatacgcccagtttcctcttctttcctctgctgccaccaccgttagagccgctagatcgctcacgccggctgcctgccgcgtgcctgtgccgcgcgcccgcgtggcctacacagtgcaccgcccacaagtcgcctacaccagcgttgctcgtgcgtcgtgccgcctgagctcgaccatggatgcttgctacttgctggatttatatttatttgctagtttttcatatatcatgtgatatatgactatatgttgcatttttgctgctggagaaaagggcgtcttggcagcacctaggcggttgtctagaacctaggcgtctaggtgaccggctggcgagaccgtggcgccatgataaccatgcattagcctagagctcttttttctgagttgtaacaacatattttcgtgttttatattttaaacgtagaaaaagactacagataaaattcaccccagattttaatgataataacaatatatttcaaaagatttttttctgttttttgttaaagcaagaggaaaaacaaagtaaggtgccagaattttaacttgatatactttggaacacctactaaaatcatctgtgttatgttatttttttgatgtattgatatctctttaaattagtataactttttgtgttgtactgatttctctttaaaatagtatgacataaatttgctctgtggttcaatgattaaacataccgagcttgttggctaacctccattgttcaaggtttgcttttgtttttcctagatttggccatgcggcgatctgggggctgcattgatataatactggatgttttgagaatcggagtggatggtttgggacttcggatagtagagatggattgtgatgcatgtatgacaagtgggctacaatcagtcctaggagcaagataggctgacagtaagaaaatgtgaagtaaagcttgtggtgttattaaaacaaatgtctactattaagttcaatgaccccatatagatggacagtaatttataggtttgtgtttttgtttaactaatgctgccaccttagtaaaaatttctatggcgccttttgcattttggctctctttagccatttccttgtcaaggttcacactagccgaagttgacattacaacaaaattcagtatacacattgctttgtttgcttatttgtattccagttatgagctaattacctgataggctgaaaatctatattatttttctgagagtattaccataaacaccaaaatgtgtccttacattgcagcttcgctcctgtttcagttcattcatatgccgtggaatgttgcctctttattcacatctcgagttgccagtttaatttttatcacaattttatatcagatattagagtgctactaacacatcattaagtaatggaatttgtttcttgtaccttctgcagatcgctatcaagatctcgatccccaatttcttctccttctcatgcaagatatgcgacaagccctaggagcagaagcgcatcccgttctcggtctcctgtgagatccgattgaactttgagagcccttgaagcagtgagcagccccagggagaagaaaggaacttgagagtatgccgtgccatcacaatggtccgagtgattatgctgttgccactgctccctcacatttaagaggtttcctcttatttagacggagcatttaattaacattatcttgctaaagagagacttatgcgtagtctacttgtgtactcgttcgtttgtcctcatgttcttggcttcaggaactctggttttttatcattgtacccatagtaaaacctagatgtagttggggtatgccgtatgcgtctatattcggttggtcgaatgtaaatctggatgcatatatgcatctgtttggtttcatttaggcctttccttggtttcgtgattaatgacaacataagcttattgctgtgatc

SEQ ID NO: 33875 - DNA, 1510 bp, Zea mays
  Clone ID: UC-ZMFLMO17179F11_FLI
gatcgcctcacgcacacgcaccgacccaccggccgacgaggggcgaccgccgcaacacaaatccacacgcccgccgccaccgccgccatacggacccactcctcctttgccctggtgcgagcaggcttcggcagcaaaccccgcaggctgctcccggacgagggagaacgcgcggggctgggctagccactagccagggaaccggggcggaggcagcgaggaggtacgtatggacaagtacgaggcggtgcgggacatcgggtcggggaacttcggggtggcgcggctgatgcgcaaccgcgagactcgagagctcgtcgccgtcaagtgcatcgagcgtggccaccggattgacgagaatgtgtacagggagatcatcaaccaccgctcgctgcgccatcccaacattattcgcttcaaggaggtgatacttacaccaacacatcttatgattgtgatggagtttgcagcaggtggagagctttttgatcggatctgtgatcgtgggcggtttagtgaggatgaggcccggtatttctttcagcagttgatctgtggagtgagctattgccattacatgcaaatatgccatagagatctgaagctggagaatgttctcttggatggcagcccagctccacggcttaagatctgcgattttggctattccaagtcatcagtgttgcattcaagacccaaatcagcagtaggaacgccagcatatattgcacctgaggtgctatcccgtcgcgagtatgatggaaagcttgcagacgtatggtcctgtggggtgactctttacgtcatgcttgtgggagcatacccatttgaagacccagatgaccccaagaatatacgcaagaccattcagcaaataatgcaagtgcaatacaagataccagatcatgtccacatatctacggaatgccagcaacttattgcccgtatctttgttgccaatccaatgaggagaatcacaatgaaggaaataaagagccatccatggtttttgaagaacctaccacgggaactcacggagactgcacaaggcatgtactacaggagggataacagggtcccttcttattcagaccaaacgtcggaagaaatcatgaagatagttcaagatgcaaggaccatgccgaaatcatccagatcaggctatgggtggagcagtgagtattcggatgaagaagaagagaaggaagaggaacacagaccagaggagcatgaggaagaggaagatgaatacgataggagggtgaaggaggtccatgcaagcggagaactccgtatggacgctcttcacatatgaaagctagtggaagagaaagttgcatgtagataactgggttgttgcggatctgaaggatccagtgggatgtatgcagttttggcttgagaatttgcttctgtttgtcaattttcatgtaacataatttaatacaccgagacaacagactaccatgttcttatattggtaaatatgaagcatgtaccttctgtctgc

SEQ ID NO: 33876 - DNA, 694 bp, Zea mays
  Clone ID: UC-ZMFLMO17179H04_FLI
aggtcagcatactgtccataaatatctataccagtcaagttcactagttgtaatcatgtatttttgttgtctttttttcttctttctaaagcccaagtgtggtgaaggtgaagccatgtattgaagaattgcgatcgtccgatggtcgaggttgtacctatatacaccgctggtagcaagtatccatcgagtacctgctcacccgaggataactctgatctcttctatgctgctctcggcggtcttggtcagttcgggatcataaccagagcaaggattgcacttgagctcggattttgaaagcttcaccgaagaccaggagatgttgatcatggcagagaactcctttgactacattgaaggttttgtcatcataaacaggacaggcatcctcaacaactggagggcgtccttcaagccacaggacccagtccaagcaagccatttccagtcagatggaagagtgctatactgcctcgaactaaccaagaacttcaatagtggcgacactggagtttttggacagggtgcacacctctgagctgaagctgagggcacaaagcctctgggaagttccacacccttggttgaatcttctgataccgaggagctcaatccgcagatttgctacggaagtctttggcaggatcctagtgggattcctttcttcagcaccgtctctctcaggtcacgg

SEQ ID NO: 33877 - DNA, 1210 bp, Zea mays
  Clone ID: UC-ZMFLMO17180A08_FLI
gggcacaattcaatgatggaaaggttctggcgatcaagaaattagatagtactgtgatgccatttcaatcatctgatgactttgctgaactggtctcgaacatttcaaaattgcaccatccgaatctgaatgagcttgtgggctattgcatggaacatggccagcacttgcttgtgtatgatttccacaggaatggatcacttcatgatctactccacctttcagatgagtacagcaagccacttagctggaactctcgtatcaagatcgcactcggctctgcccgtgcactggagtaccttcatgaaatatgttctccatccatcatccataagaatttcaagtcgtcaaacattttgctggactcagaattcaatccacacctttcagatgctggacttgcaagctttattcctgatgctgaattccaggcagcagaacaaagtgccggatacactgccccagaagtggacatgaccggtcagtacaccctcaagagtgatgtctacagctttggagttgtcatgcttgaactattgacaggacgtagaccatttgacagctctagacccaggtcagagcagtcacttgtgcggtgggcaacaccccagctgcatgacatcgacgcattggacaggatggtcgatcctgcactcaagggtctatacccagccaaatctctatcccgatttgctgatgtccttgccctgtgtgtccagcctgaaccagaattcaggccaccaatgtcagaggtggtgcaagcattggttcgacttgtgcagagggccaacatgacgaagaggatgcttgatggggatacttctcggcgaccagatgacctggaccaagatttcatatgacaagctgaactcttgtcagattgtatttatttcgttcgactagcggcccagcagagacataatcacacaagaggaagaaacagaactctgtcagcttcgccagtacataatcacaagtttttcttggtagcaaagttgtgctatatggttgtactgtgtctacaaaatagtaccttgatcttacgctaatggcatattgttataattctttggtaacttatatgcaaatgccccagataaacaaaactatggtgaagtgtgccgaatgttaaaataactgattagtccagtactgctgcatcaactgaaacaagttgcacagtggaaatatttatcttggtccctcaact

SEQ ID NO: 33878 - DNA, 838 bp, Zea mays
  Clone ID: UC-ZMFLMO17180B05_FLI
gaccacctgtagctgtagcagcaccaggcaaatagccaacgacaggcaaagcttgcttagctcaaggcatcaggccgtcctaggctagccagagccacaccaacgcctaaacgctcgccatggcctcctccttcttcttcttcgacgccgagccggtctacgactacgagcctagcctgctgcccacgatggacgcctgcgcgctctgcgccaagccgctgggacgcgactgcgacatcttcatgtacagaggggacacgcccttctgcagcgaggagtgccgcggcgagcagatgcggctcgacgccgtccgcgccaggcaggccgccaggtccgccggacggaggcagcagcagcagcagtactcctccagaacggaatccaggcaccaggagaccatggaggtatccgtggcgacatgatgaacggccggagcctggtcctggtcctggtcctcaagaccacgagatgtctctctcgtgtacacgagatttctgcgcctgaggaaacgtcgatggagccggcaggaggacttcgatttctccgtcactgttgtctcctgcctgagcactgcgccgatgggcggcccgatgctatcggcgcggcgcgacggaggcccgagggcgaagggaccactgatctgcttgcttgtggctttggctactgtgatgaatcgcccgctatgcacacgcacccatcttggacgcgctaacctttgctcgtacagggtgtgtgaagagtgtgattgtacaccggtttgttctttgtaaagccagtgcatctggggattttatttcccgtgtgagatttcaacacgacctctgctctaccacaagcc

SEQ ID NO: 33879 - DNA, 1339 bp, Zea mays
  Clone ID: UC-ZMFLMO17180C01_FLI
gtcccaagtcccacatcacactcgagagccatctcccagcacacgagcgcgatggcttccaccaccaccaccttcctcgccatcttgctggtcgtggcagcgtccgcggcgccggcacggtcctgctcaccgcgcgacatccacgcgctgctgagcgtgaagcaggcgctgggcaacccggcgtcgctgtcgacgtggacgccggcgtcgcccaactgctgcgcgtgggaccacctccgatgcaacgacgccgggcgcgtgaacaacgtcttcatcgacggcgcggacgacgtgcgcggccagatcccgtcggcggtgggcgggctgacggagctcatgtcgctgacgctgttccggctgccggggctgacgggcgccatcccggcctgcctcacggcgctgtcgaacctccagttcctcaccgtctcccacaccaacgtgtccggcgccatcccggagtcgctggcgcggctgcgcggcctcgactccgtggacctctccagcaaccggctgacgggcggcatcccggcggcgttcgccgacctgcccagcctccggtcgctggacctccggcacaaccagctgacgggccccatcccggcggggctggtgcaggggcagttccggtcgctggtcctgtcctacaaccagctcacgggccccatcccgcgcgacgacgcgcgcgacgagatcaacaccgtcgacctctcccacaacaggctcaccggcgacccctcccacctgttcgccgccggccggcccatcggcaaggtggacctgtcgtggaactacctcgacttcgacctcagcaggctggtgttcccgccggagctcacgtacctggacctgtcccacaacctcatccgcggcaccgtgccgctgtcgctggagcgcctgtccacgctgcagaagctggacctcagctacaaccgcctgtgcggcccgctccccaaggggcacggcgtcatcaagcacgggtgcaagccgtacgcgcacaaccagtgcagcaaagggaccccgctcgcgggatgccaggacctggagtgagtgagtgagccggtggccatggttttctatactctgctatgctctccctcgccggcgttccaatcgtgggtgtgtgtgaaggacgacggtacggtgcctggtttagttatagacaaaaaaggtacggccgcgtggtggcggtgctaatatgcttagccacgcgcggttgatctttgagcagttaagcgtgtacgaaatgacagctgtgtacgtgtactgtctgctggagtgtgctgtgtatctggtctggatccgatcggcctaatgtatgaaaaaaaggatgtttacgtat

SEQ ID NO: 33880 - DNA, 922 bp, Zea mays
  Clone ID: UC-ZMFLMO17180D02_FLI
ccggcgcaaaaatatggcgtcgtcaccgtccctgcgccccacggacagactccgcaggcctccggcctctcccgcgttctgctccttttcggctgtctccctgcgcggcctcgtctcgctctccagcgcctctagggttctctccgtctccttccggcagcgcctgctgacggctgtgcggagctccagagaccctggagaggtgattgatgtggctagtggtgaaggaactgagctacctggaggctccactggtccaagaaaagatggaaaagagactgccaaaagtttctcaactaaagaattgctagaaaaactaaagagatatggtgttgctggggttctgtcatatggactacttaacactgtctactatgtgactgcatttttgttagtctggttttatgttgcgcctgcacctggtaggatgggttatggtgcagctgttgagaggtttgttaaactaatggcaatggtctgggctggcagtcaagttactaagatttttcgagctggaggagcccttgctctggctccttttgttgagagagggctgaaatggttcacagtcaagttcaacttcaagtcagaagggaaggcttttatgactattgtagggttgtgctttgctgttgctgctctcatgttctttggattaacaatactttgggcatagaacatctgctttcctgacacagttaggaatcttgaagagatgctgtggatccaatcagtaacgcagtgatcacactctactgaaaaatctcacctaatattttcagtgtggttgtccatagcctgcatgaatatgtatcttcatggttcgttagtgatcgcaaacatcttgagtatacatatccctgtaaggtcctgttggaccgtgtgcagtcatgacacattttcaaaacaaaacatgtttgct

SEQ ID NO: 33881 - DNA, 1200 bp, Zea mays
  Clone ID: UC-ZMFLMO17180D04_FLI
ccaagacattctagtccaatacgaccttcatttgttccaaaatgtcatcttccagtcaataccaccaagcaatctctggacttagggggatcagtgccacagaatatgcagcgaaggtcagttgatttggtagtcaattcgaattatcgaattgaagcaaatacaaatcagccacctcgtgtgctattgaacagtgcaagatacatccagaaagaaaaggattcaacaacaacaagacaagcatttctgcagctagcatggaagaatggcttgcctttattcatgctgtcttatggcgattctgatatcctggcagccactgttagaaggaagggcatctctgaaaaggatgatctggaaagcacatatgctgtattcactgttgaagaacctaagaaaaaaagtggagcttggatcaaggcagggggcaagaacaagaaacaccaccttttgtctagcatagtcggggaaataaaggttgcacgtcgaaaatcaagatgtcaccatacagcagatgttcatgtatacagggaatttgtgttgcttggttccggatttctaccatcatctgaagaatcgggtgattcacatgttagtggagagtttgcggcttttattagtgcacttcctcagcaagaagcagaaacttcgaatcaatcatcttcacagaataccagacaaaaaaatttagcaccaactggctgtggttgccccccactgggaaacttccagcctagttctgcttcagccaatgttattgcagtacttcctgatggcttccatggcaaatcaacgtctgggcagccgttgcctttgattgagagatggtagccagtcaaggaagagctccgaccagctatgtgccccaccgtccacctctttctcctgtgggccgagcctagcttatcgcgattaaatgtatgttctttctgtgtctgtgtcctctttctccttcagtcgcgtagtgctggtgggattgatataccatggtcctcaggcccatatgcaatacgcatattgaaagtgacaatctcagaacaatcaatcggctttagaggtagctacctgtacatgttgtgatgttgatgttgtatgactgtactatgatgcggctgcaaggcccatctcggtgattactcacccgttatatgttctcttatcagttgcttctgtatatgttgaaatatgtgattactgatt

SEQ ID NO: 33882 - DNA, 2418 bp, Zea mays
  Clone ID: UC-ZMFLMO17180D07_FLI
ctagctgtatcattgcaatcatcgtctgggtttcagcatggtggttggtctgggacacctggtcagttgtcgatggttgacattgtgaaaatgggtcgccctcagggaaaggcttctagcaaacctgtggtcacagctgacagaggttatgctggacagtacccatctttgccaagcacaaaccagaacctcaaacaatctggaagcatggtttccccagcagagcttgacaaggggttacaacctgcccacaatttggttcaggttaagaatcatggtcattttactgctgatagcaagctcccatatggtactgattggtctccacaagacgacccaacatctgagaaccaatcttcccagcctgagacgtctggtgatccatctttgtatgaatcatcatttcagtcatctacattggttactgatgtagttaattcacatgaaaattcacacttggagttggatgaaaacagcacctttgcaatgagatcaacacttgcctctgagagacacttggaacctagtgacagtattcctgaatacaatgatggaatattgaacaactcaagttcatatcagcctcataattactcttacacagaacaagatgttgaggattccagtgctgatgtatcagcagcagcagaaaatttccagagtttaagcctacataatgatgagttagctgcaaaaaagactgctgaagataaccctgcagtgataattcctgatcatttgcaagttaccaatacagaatgtgttagtttgagctttggcagttttggatctggtgcattttctgggctactcccacaaaagaccactgatagcaatgtggaattccttgttcgagaggattctgcaacagtagatccaatagatgccaggaatcaagattactatgaaagtggtgcagtaacttcaccagcagaagaaaatcttgaggccatgctaggaactaacatggagaatgtcgatgcaccttctgtttcacaggctaatgagctcagccaggacgtacttgatccttctatacttaaatatgacgtgccatcagtttcaagtcatgcttattcgaacatgaacactccacaacctagcaaaatagaggacccacaaggaaacaaccaagcacatacactttcccatttgtcaaacatgatgcaagcaaatcctttgagcactagcagcctattggcgtcaaatcaaaatcatccatctcttcatggcatagagtttgatttgctttatcttgaagcaaaatataacacaggctcgactacaaatcctagaccagccatatccatgcaggaggccctgaaagcaggggttttctccaacgctcggtctacgcagtctcttccaagtactagcattccgacggggcatcctctccctcagcaattagcacatcacccttactctcagccgactttagcacccatcacacattttccaaatatcgttggctatccgccgtatttgccacaaaactatgctgcttacctatcttcgggcaccttccagcaagcatacccgagcaatggagcattccatcagtctgctgccactttgctcggatctggtatgaagtactcggcccccgagtataagaacaacctgtctgccacaggcttacaacagcaacatcagccacaaccgcaaccaccttcatcagtcatctctggttatggaggctttggaagctcaagcaatatacaaggaaattttacccttaatcagagtaccggcactggatcaactcttgtgtttgatgatgcattgggcagacagtacaaagacaccagtcaacacatagctctccagcagcccgacaactctggaatgtggcttcatggctctggttcaagagcggcgacgcttccgcctaaccacttttatggttaccagggacagagtcagctgggtggctttggtcaggcgcagcagcaacagccttcccaattcggaggccacgggtacccgactttctaccagtctcagggtgggctgacacaggagcaccacccccagaaccttgctgagggcagcctgaatggcttccaggtcgcaccgtctcagccgtctcatccgagctggcagcatcagcacacctactgagcattgttctcccttgttatggtctgtctctttcgccgtcacaagccaagtttcgcgtgcttgtgcccttactcgatgcagagtaagctgctcggattttagctgagcttgtaccttcagcgctgagaagggtcccaggcatacaacagtcagagcgttttaacatgctgcgtgcgtgcgtgtgtgtgttgccagaccgatgccttgtggtttttcgatagcgagttatatgtgtggaggcgcagtcatgtattactgagacatgataacataacaaccaatcgtttcgcttgc

SEQ ID NO: 33883 - DNA, 1662 bp, Zea mays
  Clone ID: UC-ZMFLMO17180E09_FLI
atgctaatgatacagtccgtccagaccccacccgccgccgcccacctccgcgctgctgcgcccgccagcacgccaccgctcctcgcgcgcaggctggccggttctcctccagcttccgcctccgccggaacaatcagatgcaggcatgcagcagatgctagcgctacagtccgtccagcccccacccgccgctgcccacctccgcgccgctgcgtccgccaagacgccaccgctcctcccgcgcagagcggccggtcctcctccagcttccgcctccgcctccgcctcggctgagttcccaggatccgttccagacagcgctcagatggcgccccgacggcggcggcgccggagcgtggccggcatcgaccaggacgaactcctcgatcccgaggccctcgcggaccccgacagcggcttctacgagatcaacggcgtgaggctgcaccacaaggtctgcagccacgaggatgaggactcgtccagcgaccagtccaccggtagtaccattgcctcagactcagacgttgtcctgaaaagccagattggcctgcccatactgctgctgcacggcttcggcgcgtcagtcttctcctggagccgtgtgatgcggcctctcgcccgcattgtccgtgccaaggttcttgcgttcgaccggccggcgtttgggctgacatcccgggccagtcggtctgccgatgacgccaagcctctcaatccttactccatggcgttctcggtcttggccacgttggcgttcatcgactaccttggcgctgagaaggccatacttgttgggcactcagctggttgccttgtagcagtggatgcatactttgaggcaccggaacgggtggctgctcttgtgctagttgcgccggctatatttgcaccaaggaaggcggtgaaagagggccagtcaggggaagaagaagaaggagggcagcaaacacagagcattcccaatgatgaaaattcgcctccaaatttgttcgctaggatttcgggaggatttcttgagctatggaagcacattgcagggcttgttctcaagatgatcacagcaatacgagacgtggttcggtctttgtgtcttaaagctgtcgttgcttttcttcggtcatcgttgggtgtggtgctggtaagatgggtgatggataaatttggtatactgggtgtccggaatgcatggtatgacccgagcaaagtaactgatcatgtcatacaaggctacacaaagcctctaaaatccaagggttgggagacagctctgctggaacacaccgtatccatgatcatagattctgtgtctgcatcaagagtaccagtttcaaagaggctctctgagatctcatgcccagtgctagtggtgaccggcgacaccgaccgcatcgttcctgcctggaatgccgagcgtgtggcacgcgctatacctggagcaacttttgaggcgatcaagagttgcggtcacttgccccacgaggaaaggcctgaggaattcctgtccgtcgttgaaatttttctacggacagcgtttgcaaatccaaatgaacaagtatttcaagcagctgtatcatgaattatgttttgagtacgatctatttgctttataataaatcttaaatacccactcgtgtacaatgagagtggaatttggagttt

SEQ ID NO: 33884 - DNA, 2789 bp, Zea mays
  Clone ID: UC-ZMFLMO17180E10_FLI
cgagacgacaatgctgatcctcgatcaccaaagagaccatgcaatgaatctaggagcacagtagtagaacacaatttgcagacacctccacccaagcaatgccacatggtgttgactagtttgaaagcaaaatgccatccactccagtccacatttgcaagtccaactgtcagtaatcctgttggtgggaacgaaaaatgtgctgacgtgacaattcagatattcttttccaaaattctgaagttagctgctattagaataagaaacttgtgtgaaaggattcaatatatggaacagacagagcgtgtctataatgtcttcaagcagattcttgatcaacagacaacattattttttaatagacacatcgatcaacttattctttgctgtctttatggtgttgcaaaggtttgccaattagaactctcattcagggagatactcaacaattacaaaaaagaagcacaatgcaaaccagaagtttttttaagcatctatattggaagtaggaatcataatggggtattaatatcacgccatgttgatatcattactttttacaatgaggtctttgttccagcagccaagcctttcctggtgtcattaatatcatctggtactcgtccagaagacaagaagaatgctagtggccaagttcctggatcaccgaagctatctcctttcccaaatttaccagatatgtccccaaagaaagtttcagcttctcataatgtatatgtgtctccttttgcggcaaaccaagatggatttactgctgtcaccaagttccaggagtttttatgcatgcattggtgaaggcacccatgcttatcagagcccatctaaagatttggctgctataaatagccgcctaaattataatggtcggagagtaaacagtcgattaaactttgacatggtgagcgactcagtggtagctggtagtctaggccagccaaatggtggttctacttccttggatcctgcagctgcatttagccccctttcaaagagaaagccagatacttgatcaaatataaatggcgatctctctcgtatatagctcacagctccatagcagtctattcttctgaataagtgggttgactggagtgatttaactgtacatgtatgtgttagtgagaaccagcagtttataggcagaactgttttaaattagctttgaggttttatcaccatttccctgctgattgaacatattttagattgtaacatctgctttgtagaatgctaatgaatctttagttttcagtgggttgacattacaaatccttatcctagttggctggttgttgggagacattcatcaaggttatatttggtcgtcaaatagtactgtacttgattcatatctttcatatttttcactagcgttggcaaccgtaaattgctttcctgactaggaacatattcttcacaagtataagtatggcaactctaaactatttgaccttttatattctcatttttaagtactttctctatttctgctacttttgtactgtgtatttccagcttctccaccagactgattgttagagtgtatgctcctatattatccatgtatgtgtaaatgggctgctagcccattagggttagggttcccctgggtctatatatgtaaccaccctctatgcaatagaatttgaatatcagtttctatcactaatgattccatattcagtgggctgcaagtgatttgacatacgtgccttatccttcaggtatgtcttatgttgacttcattgcttttgtaatggtactgttggcttcattgctggaatgctggttataatcaacctttactgctctatattgttctttttttggtttgcacaaccagggtggttggttttctgaatcaatcaatccatttcctcggacacaagataatttttgtatgttacacttcccaaaattgcaattaattcagaagtctgcctactttcattcagcgagataaggaaaatctgaaatgctatcaccatttaaaacattggctcctggaagttcaggtgattaacaaacctccatctacatctgacattggcatgtatggtagagtccagcaactcttgtgatggcaggagtcgttcttaaacagcaactgctccttcgttcagcgcttctcatttctgattgtattgaccgagagcatccacctttccttctggtatcaactgaatgagttgccgacaccgacccatctgcgcataatggcaggttaggtgttgctgtagaatgagatggttaccatctttacaagctcaggctatatgattccagcagcactgtaacctggggtgcaaatgtgaaggccctgcaagcactttccaggccacaccaattctgcttggttcttgaagatacattcttcctatggtgccacctatataaaagccatttctggttgttatgtttatccttgacatgtcaacagatcagtgttgggttgcagtcatgcggtccttaagtcccggagaaggcgagaagtcattgctgctagcattgtgatcgtcggccacaaaagtaatcaaaaagtgagagctacttgttcctagcaaatggagaagggcgatatataggttgatgatcaaattcagtgtatctgtgtatgcaagcagcatattttgtttagagttagcttttgaggttcatcatttcatttcacagctgattctctatgttgtaactccttagtcgtgtagaaattagaatgctaactgcttaatttttagtgaataatttgctagtatatttttgaatgt

SEQ ID NO: 33885 - DNA, 1083 bp, Zea mays
  Clone ID: UC-ZMFLMO17181A07_FLI
gggcgccgccggcgagtcgcctccgcccacgagcctccgtgtccacgtcgcccgccccgtctaaggactacgagttcactgacgggaacggagaggtggagctgagactggacatccaaaagctcggcatagcgagttcaaaagatgttttcgttgatgtcgatgacacatccctactcatcagagccaagtctgacgggacactgaggactttgatgaacgtccaaacactgtttgataggattaagtcttccgagaccatatggttcatcgatgaggaccagttggtggtgaatctgaagaaagtagagcaagagttgaaatggcctgatgtagatgaatcctgggaatccctcacttctgggatcacccagctactgacagggatcagtgtgcacatcgttggtgattccacgcacattaatgaggcagttgctaaagagatagccgagggcatcgggtaccttccggtttgcactagtgagctgctagagagcgccactgagaagtcgattgatacatgggtggcttctgaaggagtggactcggtagctgaagcagaatctgttgtcctggaaagccttagcagccatgtccgcactgtagttgcaactctggggggcaagcaaggagcagctagcagattcgacaagtggcagtaccttcactctgggttcacggtttggctatcggtgtccgacgcaagtgacgaggctagtgcgagagaggaagcccgaaggagcgtgagcagtggaagcgtttcttacgcgaaggcggacgtggtggtgaagctcggcggatgggacccggagtacacgcgggctgttgcgcagggctgcctcgtcgcactcaagcagctcaccttagcagacaagaagctagcagggaagaagagcctctacatcaggcttggttgcagaggcgattggcccaacatcgagcctccaggctgggaccctgaatccgacgccccaccgaccaatatctgaaacaatcctccgcccagttgtattctaggagaattctctgcatcaccattccggactagttttttcagtgtaataaataagagaggaacttgtc

SEQ ID NO: 33886 - DNA, 2594 bp, Zea mays
  Clone ID: UC-ZMFLMO17181A12_FLI
caccgttctgccgctcccgtctcggtcgtggatcccccgctctcctccccaccgccgccgcgaccgcgcacgctccacgcatcccgcccgcccgccgcgcttctttccatcctcttccttccgtacccactcaccgccccctcggctctccgtcgatggaagggcgccattgacgccccgcgatcctcgctaccatccccacgaggccataccctccccccacacacagatcttggaagaggccgccaccccgcccccgttcttggccccatcaccctccccacgcgatgctcgcctaccccacacgatgcaccccttccttgccttggtggcgagcttgtcgacgtcgaggcagatgcgggagatggacttggcggcccgctctgccttgtcggcgcgccgctgctcgaggaggcgcttggcctgtgcggcgggctccttgagtagcaccatcttggagcggtcctccccctccgccccgctctcgctcgcgctttcgtcgccgtcgtggtccgctggagcggtcctccccctccgccccgctctcgctcacgctttcgtcgccgccgtggtccgctgtcgcacacgccctcctgcccctccgctcccctcccagatcccgtgattcgctgccgtgatccgatgccgcacccgccatcaacgccctcctccccctctgctcccctcccagatctcgtgatccgctgcgaggccgccatcaacgccctcctccccctccgctcagctcccctcccaggatctcggcgcgctttcatcgccgccttgatggtccacggccgcacccacatacgacatcgcctgcccgcacgcaagcttctgcctgcgcccacctgtgtgcatagacgtgtgcccccgcccacctcttctgtgcccaatctttacccgttgtccgcgccgctgttccatcctcgcacccacgcccgagatccacatgtgccgcaccccagccgtgctccggatgctgcaccgcccttccatcctccgcatgcagcaccatgttggccgccgccctgaaacctcgctaccacggagctgcaagcccccgcttccaaaccagcaccatgcggacttccaatttattttttgtttggagcactgttgattttttctcgttttttgagaacattacattgcccgtctttcactgttcaacttttcttaattaaccatttacatttaccaaaaacttgttcaacttttcactgttcaagttcaatttgttttgtgcagtactgatctgttgtgcagtgtatactttgaggttcggttggccgatcttgcgatcgaataccaaaaacttgtgcggtactctgttgctgaataaaacttggatcaggttaccccaaccccaatggcatttaccgagctgatggaggcgaacctgctacgccaagtgctggactatcccccagtgctctgtccatccctccttcagcttcattgatggttgcactgctctactatactataagtgaattgagttaaagcattttttgttcgactactgtttggtgcatgcaacttaatatgactgatttttagtctttctattttagtttataaattgtcaatcacagggattaaaagagactaaaagtaaggtttcaggttctatttctatccatctttaattaagggctgaaacgataccgtcttgattcctaattcacctaatattcctagaccaagaacgactcgggttaatggtcagggatgccaaattgtttcagtaaaactaagcaagctcgtatgatgattatgtacctacttgagaacaaattgtctaaaacatatctgctactacacttcagtaaaacaattgatcacacacaagaagttcagatcagaaaatgcaggctgtcgctactcccgtcaggttctcggatggttcccgtcaagggctgaccatggagaagagcacggtggtggtcagtgtccctgttgttgtcatggccgagactgctgagaccgactacagctcgagcttctcgcacctttgcaggatgcagagtcccagaaagatgttgggaagggtgataaatcaggggataagggaactgctgagaagtttgcaatatatcagaagcatcgttcttcgttggcagacactgttcaattcaggaggccagctgctccaacttccagtgtgaatgctgatattgtgggaacatccactctgcagtctgcatctctaccgaaacaagaatcctcaacagctacatccaagagctatactttcagagaaggtgatagggtgcgttatgtgggtccagctcagttatcctcattgtcacaaaggctcctctccttttgctggcttcgctgttggaagcgagacatcatgtggtgtggataacgtccttgcagagcacgtgaactcaaatttcactctaatgccagctagctgctacatagtgcatttctgtatattatgagtatgtatacagaattttaatgtatgaatacatgtgttttaaagcttggacaaccaatcatttattatccgagaatttaatttggttttattaataaatttaaacctttctataggaagagagtggctcttcactccc

SEQ ID NO: 33887 - DNA, 1468 bp, Zea mays
  Clone ID: UC-ZMFLMO17181B05_FLI
tcggctcctcctcctcccttccttcgttccttccagatctccctcccagtcgagagtcgagatccaccgcctccgcgccccctcaccggagcagcgcgaggaagcgggggggccagaggccagccatgggcaaggaaggggccagcgacggcggcatgtcggagtcggtgatccgcaaggtcctggtctcgtacatgtacgtggcggtgtggatcttcctctccttctccgtgatcgtctacaacaagtacatcctcgaccccaagatgtacaactggcccttccccatctccctcaccatggtgcacatggccttctgctcctccctcgccgtggcgctcgtccgcgtcctccgcgtcgtcgacctcccgtcctcgcccgccatgacgtcgcagctctacgtctcctccgtgctccccatcggcgcgctctactcgctctcgctctggttctccaactccgcctacatctacctctccgtctccttcatccagatgctcaaggcgctcatgcccgtcgccgtctactccatcggggtcctcttcaagaaggagaccttcaagtcctccgccatgctcaacatgctctccatctccttcggcgtcgccattgccgcctacggagaggcccgcttcgacgcccgcggcgtcgccctgcagctcgccgccgtcgccttcgaggccacgcgcctcgtcctcatccagatcctcctcacctccaagggcatctccctcaaccccatcacctcgctctactacgtcgcgccctgctgcctcgccttcctcgtcgtgccctgggtcttcgtcgagctgcccaggctgcgcgccgtcggcatcttccagccggacctcttcgtcttcggcaccaactccctctgcgccttcgcgctcaacctcgccgtcttcctgctcgtcggcaagacgtcggctctcaccatgaacgtcgccggcgtcgtcaaggactggctgctcatcgccttctcctggtccgtcatccgcgacaccgtcacccccatcaacctcttcggctacgggatcgccttcctcggggtgggatactacaaccacgtcaagctgcaggcgctcaaggccaaggaggcgcagaagaaggcggcgcaggccgacgaggaggccgggtcgctgctgcaggagcgcgactcgcacggcgaccgcaagactgacaaccaggcctagcgagtgtgatggatctcatgatccgattcgctcggttctgaacccagtgtactccaaatgtgtgatccaacccttacacgtttgatgcaaaatttgttcatttcttgtctttgacttgatctggtagtaccaaggaaataagcacgggaaagatgcaagctttgtgtcgaacatgtgaaaaaaaatatatatgtatgagcaatttttgtctttttttttggggccagttgtagctgttactaccattaaacagtaagcaaaactgtttgcatttt

SEQ ID NO: 33888 - DNA, 574 bp, Zea mays
  Clone ID: UC-ZMFLMO17181C01_FLI
ccggtgggtgcagtccgtggtgcgggaggagtggaccgccgaggtgttcgacgtcgagctggtgcgcctgggcgccagcgccgaggaggagatggtggcgctgctgcaggtggccatggcgtgcgtggccacggtaccggacgcgcggctggacgcccccgacgtggtccggatgatcgaggagatcggcggcggccggacggcgacggcgacggcgacggcaacggaggaggagagcgagggcgtaaggggcacgtccgaagaggagccgtcgcggtcgggaggcacgccgccagccgccccgacgccgtgacgcggctagcagcagggtaaaggtgtttggcctgattaaattgcataggttcgtgatgatgcctgtatgccggcattggacagcgtggtattatgtttcttctttgtttttcttttttcttttttttttgtctttccaggtcattgttttgttggatcaatttttctttttttgccccttctcggcctctctctctctctctctctttctctctctttttcaggcttcattaatccaagaaaaaaagtgtattttttcttc

SEQ ID NO: 33889 - DNA, 671 bp, Zea mays
  Clone ID: UC-ZMFLMO17181C05_FLI
cgcgtgcatcctgccgtgcggggcgctggacgtggtgcggatcgtgcactccaacggccgcgtggaggagatcagcggggggcccgtgctggccgccgagatcatgaaggcgtaccccaagcacgtcctccggaagccgccgtccacgtgccccgccgacgccgccggcatcgtcctgcagaagcccgtcgtcctgccgcccagtgccgagctgcacaagggcaagatctacttcctcatgccggtcatggccgacgccaccccgccggcgcccgcgcccgagaataagccaccagccgcgaggctacagcccccgccccccggccaaaccgcttcttcggcggcgaggacgaggcggcgccggaggaaggagaaggaccgtactaccgccgcacaggagggagcggccgggctggcgccggaggagggcgacaaggagcggctgctggccaacgagcggtacctgtcggagatcatgaaggagacggcctccacgtccagggaccggcggcaggggcgcgtcgccgtgtggcgaccgcacctggagagcatcaccgaggatgacttgtaaccaatcaggcaatgcaaggtgtctttgtttcttttgttttcttcttctttctctcccacccatttttctttctctccatttcttttgggttttcattgat

SEQ ID NO: 33890 - DNA, 1942 bp, Zea mays
  Clone ID: UC-ZMFLMO17181C07_FLI
cgcagcccaagcagcaggcgcccagcagcggcattgcaggttgcagcaaagagagagagagagagagagagagagagctcacgagcctcccggcctcccctacccccctcatgcgccgcaagaagcacttggaccggggtgggggcggcggcggaggtggcacggagctcttcatctgcttcacctcgcgttcctccgctgcctcagccatttccgtcgccggcggcagcgcgcactcttccctccgcccctccagctcctccaagctcctcagccccggccgcggcagtgccagcgcaagcggagctgaggcagtgccggccccgcctctgcacccctcactcagccgccgcctccgcaacagcggcagcctcaagggcggccagtccccaatgttcccccccagggcaagaaccagggctgggtgcaccagatcccggtcaacatctgcgaggcactcaagacatttggctcctgcgggggccgctctctctgctcatcgtctcggcctggcgaagccggcgagtggggtgcgctgtccaccgacgcacaccgtggtaagaagcggggacagcgcgctcctgctgggggtagctggctgtgcggtgctgctgtggcgaggtgcctcctggcgatccaggaggaggacgacgacgacgaggtcggcaagggagccgcggttgtgccggcagaagagatgagggcatcggacgggtgggatgtcgaggaggagaagactgtgatggtaggggaagtggaggtggagaagaaagatgagatcttggtggtggggaaggaagaagaggggagggtgagcgtctgcatccccccgaggaatgcactgctgctaatgcgctgccggtcagacccagttcgcatggctgctcttgccacccgcttctgcgggtctccagctgcagctaccgtggagcaggtggataatgaggtgtctgggtgcctcaacgacaatgaggaagaggggaaagaggaagctggggctgaggctgagccagtggagtgcaaagaagaagctcacggttcagttgtttctgtcacagacttgaaatgtgaagagtgtggttgtgatgaaaatggtggcgctgaaacagaggagatagatcaagcaaaaacagaagctgaagagagttctaaatgtggagatctaatggaagaaaaggaggatgcatcctgcagagatctagtaggagtagaggaagcacaaattgtttggaaaaatgctgggttggaggttcctttgggtgaagatacagagacggaaaaccaagggccggacatggtggtcagtgaggaagaagttccagcacaagaggaagttgaagataagatgaaggggaggaggtcaatcagcagttattctccctcagcagctctgaaggaggaccgcaccaaattgcgacggtggagtagcaggaggcgtggtaacactagcagcagggcctcatcgtccagtgatagggttggcaggcggcacagcttctcggccgagacagaggcacggcgttctagcttctcgagcttgaaggattcaaggagagctagtttcaccattgatagagatggccggaggtggagcttctcgattgaacaggagcatctcgttgcggagcctaaggtgctgatggcatccagaaaggggaagaagactaagtcttctgagccagagtcagagaaagattgtgatgttgttgctccaaacagtgtagaggaaggacaagaatcctgtgatgatggaaaggaagaagaaactaccgagaatgcagaggaagaaggaaaaacacattatgcggaaatcaaccaggaagtagagaaagtagagtgtactcctcctacctgtgtttccctctctctctctctcttttgtctttgtctctctaaggtgtgtacttctattttcatttaattttgttgcatttggtacgtt

SEQ ID NO: 33891 - DNA, 970 bp, Zea mays
  Clone ID: UC-ZMFLMO17181D02_FLI
cgcccaaggacaacgataaacatctaagaaccaaacaaatcagagcacgaccatcggtctctaagcaaaacgcgcagcacgcacgtagcagagcgcgcatggggcttctggaccagctgtgggacgacacggtggccgggccgcgtccggactccggcctcggcaagctccgcaagcacgcgtccttctccccctcgtcggccgcgccgtcgccgaccgcggagggcgcggcgccgcccgccgtgacgcggagcatcaccatgctgcggccggcggcgctgtccgtcgccacgtcgccgcgcagcgagtccagctccgcgccgtcgtcgccgtcgcccgcaagcggcgctcccgactcgcccttcggcgcagcgacgacgcccaggggagagggctggaagaagctgcgccggaaaggcaggatggccgacggcgccgacgcccccggcacgccgaggagccccaccgtgtacgactgggtggtgatcagttcgctggaccgctgaagcagccggccgggccaagacgaggaggacacagcacaaggatggaggaaggcagccaccatcagcagcagctagcggactgaaggaggatcggaacagagaggccccccggccatgcgacctgcttaacagagagcttctggtcacggttctgttatactacgcgttaacggtgtatgtatatacgtcatcttcctgtaaatctccgtggtgtgaggtgctgctgattttgaagagagtgatgctcctgttatgtgctactagctagctagtgctgttgctgtatgagtacagtgtagtctactattaagggttgtcgtttggactgttagtctatagagacagaaaaatgtagaagtacgtattaaagccaatcgaatagacatgtttgtcgccatgtaaaaaaagtataatcctacgtatactcgtacgcaacgatagtaatgcgtgcttgagtgttgtgg

SEQ ID NO: 33892 - DNA, 1061 bp, Zea mays
  Clone ID: UC-ZMFLMO17181D06_FLI
gtatatttaaccataagaaataggttaatcccacagcagactttaatactatatgctaaataaagtgttatctttctggatcatctagtctttgaaacacatgcagagcttggtctaaatattctttgcggtagcatgtaatagaaatcattgacttgggtgtttgacatagcaagcacttgatggttttaagttactaatgttcaatttttctgagtatccatattaatgcagaaggccatagttcatttccttgtcgttatttttcactgagaaagaacaaaacattgacttcttgggggagtagacttattaccaacgttggtgtcctgttatctagtttaacctgaacctgttcttgaaaactgtgtcagaaagtcggtttgttctataatatattgtctgtgctatgagctacaataagcaagagtattttaaattagaaagcagttttctaaatgatgcaaaggcagattggtttgagattgcacatggaattcttttagtgaacatcttatcttagtcaagcagtagttaagattaactgttttacttattacccccaagaactctttgaaactcgactaactattctgtggtttctttcaggtagatgactgttttggccacccgcagtgggttgtccataccatgtcctgaaggaagcaaagtgcggttggcccagcttagtggggatatcagcagccctcccctgaagggcgaattccttttgctgttttaacccatgtttgttaggccttttattccagaaacctatgcaaaactctgctataagtttgccaagaaatgctaactgcagttgttatgttttcagcaatttcagggtaagaagatgttaacaagcaaagcaacctctctgcatttgcagggaattgcaggggaagccttctctcagtttatccctttcttagggcctctttgcatttgcagggagggcttatctcggtttatttcttcttcatactctacctgagtgggaacttttgatgctgagtttgtcttatgcctatttattttaagtcgaatgaaatatgaaggcc

SEQ ID NO: 33893 - DNA, 1367 bp, Zea mays
  Clone ID: UC-ZMFLMO17181E11_FLI
ggtccggaaggacgaggccacgggccgcctcgtcgcctccggcgtaccgcgggacaacgccatggacgtcctgctcgtcgacaccagcagggggaacaaggtggtggccttctacttccggaacccctgcgcgcgcctcaccctgctctactcgcacggcaacgctgccgacctcggccagctgtacgacctctttgtgcagctcaaggtcaatctcaagatcaacctgatgggatatgactattctggctatggtgcatctactggcaagccaagtgaagagaatacatatgcagacattgaagcagtgtaccaatgcttagaaactgagtatgggatcagccaggaagacattatcttgtacggacaatctgtcggcagtggaccaacattacatttagcctctcgtttgcctagattgcgtggggtggttctccacagcgctatactgtcaggcctccgtgtggtttgccatgtgaactttactttctgctttgacatttacaaaaatgtcaagaaaataaaaaaggtcaaatgcccagtgctcgttattcatgggacggacgacgacgtggtggactggtcgcacgggaaggagctgtggaggctggcgagggagcctcacgacccgctctggatcaagggcggcgggcactgcaacctggagctgtacccggacttcatccgccacctgtcgcggttcgtccgcgagatggagaccgtgacgacgaaggcccggctgaggaagatccggccggccctccaccagctccgcaagaaggcggcgcaccgggcaagcacggcggcgacggcgacggcgacgaccaccagcaccaccaccttcaccgccaactgctgctgccgcgtccgcgtccgcaagccgacctgccccagctgcggctccttcggctgtgactgctgctggccgcttaggagctgcctcgcgctccggtttcccaggtgctgccggcctcctgctgcctgcttcacctgcggcggctgctgttggtcatgcaggtgcaggagctgcttcaagtgctgctgctgctgctgatgtggagacgtgcgtcaatgagtgccgcccgccgatcgatccatgcgcgcgctcgcgtgcgtatggtatagtgaagaggaatgacagtggtcatgggatccctgctaacaaaccctttaaacgccgtagactataaaaaaacctagatttgagctggctgctgaacgttgtattaacagatcccaggactccccgccgtttgtggttcctctcgttgtagttgcttgtcagattggtgattcgtctcattattaatccgtctgatgtttgtgcagtctagagcaatgctaatgcccctggactcgctgccgcg

SEQ ID NO: 33894 - DNA, 1062 bp, Zea mays
  Clone ID: UC-ZMFLMO17181F03_FLI
cggagctccgcctgggcctgcccttgagaaggaggaggaggccgggaagatgaagcggtccccgagccagagcagcgtcgccgccgccgccgccgccgtgctggctgaccccgccgagaagccgcgcgccgccaaggctcaggtggtgggatggccaccggtccggtcgttccggaagaacatcatgtccgtgcagtccgacaagggcgccgccgccgccaacggcgacaagtcctcgccggcggcaggcggcggtgccgcgttcgtgaaggtgagcttggacggcgcgccctacctgcgcaaagtggacctcaagatgtacaggagctaccagcagctgtccaaggcgctcgagaacatgttcagctccttcaccatcggaagctgtgggtctcaagggatgaacggcatgaacgagagcaagctggtggatctgctcaacggctccgagtacgtgccgacctacgaggacaaggacggggactggatgctcgtcggcgatgtgccgtgggagatgttcgtcgaatcatgcaagcgccttcggatcatgaaaggatcagaagccattggcctggcgccaagggccatggagaaatgcaagaacagaagctgaggagaagacggacggacggaagcttgcatctcagcaccaccaggggtggatggatgcaagaagaacaaatctccatggcttttgcagctctgctcgtctctgtatcatactcgtcgtccctgcccttcaggcctctgtatctccctgatcaatgaagtcgttttggtgtgtcaactgttctctccgtgcccagcttgtcagtgaaagagtcagtcagtgtccatcaagtctcatcttgtcctatacagaagagagaagccatgcatgaacatgtacctgtcctataacaatgtctttttttgctacctgtttttttttctctctctctctttttttggcacaagatgcaaaggcaccctgctcctgatcaaagggccttttgcatcataagctgtttgattataattaccatggtgtgtcagtggaacaaataactgttgcaaggtgtt

SEQ ID NO: 33895 - DNA, 1249 bp, Zea mays
  Clone ID: UC-ZMFLMO17181F07_FLI
taaataagaagcgctgtctctgttcggggcctccgacacctcccaataaaaacgttcctccccgtcccactcgccggagcctggccgacgggatgcctcgagattcgcgcccagccgggatgcgcctcttcggcgtcaccatcgcgccggcgccggaggcggatccaccggtacgggatccgagccccaacccgcccgtggcggccagggaggacgtgatgcgtaagtgcaagagcatgggcaacctcgccgcccttggcgctgtcgcggacggtggaggaggtggtgcggacggcggaggcgccggcgacggctacctctccgatggcgggctgatgcagtcgtccgggaagcggcggagggcgcaggagaggaagaaagctgttccttggactgaagaagagcataggacatttcttgctggtcttgaaaagctagggaagggagactggaggggcatagcaaaaaattttgttaccaccagaacaccaactcaagttgcaagtcatgctcagaaatattttcttaggcaaactaatccaaacaagaagaagcgcagatctagtctttttgacatgatgccaagagagctgtcaccagcaccaaattgccccatattaccaccatcgatggcaaaagtacacgatgtggtagctatgacgaaacaacttcagaatagcaacttggaaggaacctcctcttcaaatgcagcatctcaagttggaagagatctccccccagttccatcttttaaggcaacaaatatggatccaagtttcagcaaatttagccacatggagcgcgtctggagaactccctacccattcggaccagttcccagagcccctgaagggacgccttcaccaactcctgctgccgccgccgccgctgccaacgcagctgttccggtctctcaagctaacctgacgactgcctgtactagtaacacattcttgagccagccaaagccaagtgatactccgtcactgcctccgaagggaggtcctccatcagaggaggacggtttggaactgactgttgccccaccctcccaacagaacatgacgaacatgtcttcccagaatgcggtaggcgtgatccaagtcatctaagctaatatattttattttattttatttctctctctctctttctctctagaagttactgtggctgttgacagttattgaccgaataaatattaacattgtattagcaatactacatgaataagaagagcatgagttat

SEQ ID NO: 33896 - DNA, 1513 bp, Zea mays
  Clone ID: UC-ZMFLMO17181G10_FLI
cgctcactcaagcacgctgcgaaacacatacacacacagatcgaagcggaggatgaaggtggaggtggtggagacgacgctggtgccgccgagcgaggcgacgccgcggcacgcgctgtggctgtccaacctggacctggcggtgcccaagacccacacgccgctcgtctactactacccgaggcccgccggcgccggcgccggggaggagggaaagggagagggagaagggtcgttcttcgacccggcgcgcctgcgggaggcgctgtccagggcgctggtgcccttctacccgctggcggggcggctggcggccggcccgggcggccggctcgagatcgactgcaccggcgagggcgcgctgttctgcgtcgcgcgggccgacttcaccggcgacgagatgttcgccgacttcgagccctcccccgaggcgcgccgcctgctcgtgcccttcgccgcgtccggcgacccgccctgcgtgctcgccatggtccaggtgaccttcctcaagtgcggcggcgtggccgtgggcacgggcatgcaccacgtgacgatggacggcgccggcgcgatccagttcatccgggcgtggacggcgctggcgcgcggggaggcccccgcgtggacgccgtcgcacgaccggacgctcctgcgcgcgcggtccccgccgcacgtccccgcctgcgagcacccggtctactccccggcctacctcaacggggcgccgcggcccttcgtgacgcgcgtctacgccgtgccgcccaagctgctggcgggcatccggtcgcgctgcgcgccgggcgcgtccacgtactgcgcggtcacggcgcacctgtggcgcgccatgtgcgtcgcccggggcctcccggcgggcagcgacacgcggctgcgcgtcccggccaacgtccggcagcgcctgcgcccgccgctcccggcgtcctacttcggcaacgccatcgtgcgggacctggtcaccgtgcgggtggccgacgtgctgtcgcagccgctgggcttcgtggcggagcggatcaagcgcgcggtggcccgcgtcgacgacgcccgcgtgcgctccgtcgtcgactacctggagcttgagtcggacaagggcaaccaggcggcgcgcggccagttcatgcccgagtccgacctgtgggtcgtcagctggctcggcatgcccatccacgacgccgacttcggctggggccgcccccggttcgtggcccccgcgcagatgttcggcagcggcacggcgtacgtcacgcagggacgcgacaaggacgaccccatcaacgtgctcttcgcgctcgagccagagtacctgcacaccttcgagaaggccttctacggggagtgaccgtgacccgaccacgaccagacatggcgacgagtccgatgacgatgggatgggattgtgatgccatgccgttgtggcatctcccggggtgtgcacactgttataccatatcatattgcatgtttcggaatgcaattcaatgcttactgggtgtgtgat

SEQ ID NO: 33897 - DNA, 209 bp, Zea mays
  Clone ID: UC-ZMFLMO17183D09_FLI
ctgaactcagcaacatcattcatgaatatgggaggagtatatttttagaattattgggaagactttgttgtgaccctcgtctcactttcagtctcaccgcattcggtcatgctctccagaattgttgcagtttaagaaatagctgtatcttgaccatgtaatatgtgagcctaggtggaaaatcattttacctaattgcaattctttat

SEQ ID NO: 33898 - DNA, 1959 bp, Zea mays
  Clone ID: UC-ZMFLMO17183H07_FLI
gacattactaatatatcttttttatatcatcatgaatgaacatgaacaatattgaattacatttgtacattcggcttgacagaaggcaaaagtccaagcgtgacgcacgagtgaatacaagtcagcgtgaacagtacgagggtactgttcatctatttataggcacagggcgtagcctgtgtaaaattacattcatgtccttcatgtttactattgacttaaggacaatctatcaaggactagatagccttttcctctttaagtcggctcctttttctgctactgatccgaagcttccttgcgcgtagcttcggagctggttcaaccttcatcccgaccatgcttttcatattgtgtatagcttcattccgagtctggaggttcctgtacatatattacacttgggaaacattgttaatcatgtttttgaggaccttcggaagacaaaggcccccaacagtagacctcgacaatgtctcctaatatctcatttaaaatcaaattcatagccctttgataagttgcgctctcatttttagcccaaaagtcatgacaccccactcaaataaaccaataaagcttggatatacaaaggccattttagatgtatcttttttgtcataaagatttgatgatatctgatattagcataagaaagctaatgaccttccaggtgttcgggtcattgttgggattttggtactgagatcaatcgacggctgggcttgactggcccaacaacacagagatggcatgcctaagtctgtatgcaggggcgcacagttcatgttctgatggcgttcgctcggctagactttggtgcgccgcacatttacccgggtgtggcctaaggatggtgtgtcctgtcgtagccgacgtgggccagcagcgtcaggatggggttccttccttgtgggtccactcggtgggaactccgtcgttcgccttgcctcgcggacttgctccgcggggtcttggtcgtccgctccgcctcgtggacttgcttgacggagacttggtcgtccgcctcgcagacttgctcgacaaatgggccggaaagaggttatgggccttaccttgggtaccccattcctaggtatccgacaacagcccccgagccattgggcgaatccttggagttgcacggaggcttatgctcggtgccctatacgcttagttgcatgcaagtgcatctgctagaagtagcccctgagcccccgagtgatccataaggattgttggggtttgctcagtgacggagtagtttggggacagacccctcctgcgattgtcgccatgcgctgatcgtgggtccataatttcttggcttcctcctgtggttgggatcttgggtgcgcgcaagcgctgctgttggatgttgtccccatgcccctgagtaaaccatgtgggtcgcatggggtccactcggcgggagtgcagtttaggagcggacccttcctacgatggtcgacgcgcttagagcactagcctgttgcaattctgtactttgttgttgttcaggacttccggtgcgcgcgagcgcatccgttaaatgcagccccctgagtgatccatgtggatcgtgtggcagaacctcccaagtaattgggcccatatgcacctgcccttgtctcaaagacctcagatggctatgcatgtgcaccagataacttaagaggatatgttcgagtgtcccatggaccccggataaaccacttacaactaggaccacaggattaagtaaacacaaatcacacaccaacaatttgcagcggaaatcttattaccaaattttacaagttacaacaaatttacattatatttatcggagtggttacaaaagtggttcaaagaataaactttgaactgttataaattatttataagtttgaaatatatgctggctcagtgacagtcctcaataagaagtatagaagaagtacttagacttataagaag

SEQ ID NO: 33899 - DNA, 1589 bp, Zea mays
  Clone ID: UC-ZMFLMO17184B02_FLI
ggggaaagcaactgggatcacttctgccacaatcatccggaaaggatactggacgggagcaattcagacattggagcgaattcgtaccatatgtacaaaacggacgtcagattgctcaaggaaatgggcatggacgcatataggttctctatctcttggcccagaatactgccgaagggaaccaaagaaggaggtattaacccggatggcatcaagtactacagaaacctcatcaacttgttgctagaaaacggcatagagccatatgtaacaattttccactgggatgtacctcaagcactagaagagaagtacggcggcttcctagataagagtcataagagcattgtagaagattacacatactttgctaaggtgtgctttgataacttcggcgacaaggtgaagaattggttgacctttaatgagccccagacatttacttccttttcctacggaactggggtctttgccccaggtcggtgctcacctggactagactgtgcctacccaactgggaattcactcgtcgagccttacactgctggccataacattctcctagcccacgctgaggctgttgatctttacaacaagcattacaagcgcgacgacacccgcatagggcttgcgtttgacgtaatgggtcgtgtgccatacggaacatcgtttctggataaacaggccgaagaaaggtcctgggacatcaacctaggatggttcttagagccagtggttcgtggtgactaccccttctccatgagatcattggctagggaacgactacccttcttcaaggacgagcagaaggagaagctcgccggttcctataacatgttggggttaaactactacacctcacggttctccaaaaacatcgatatctcaccaaactactcacctgtgctcaacactgacgacgcctacgccagtcaagaagttaacgggcctgacgggaagcccattggtcctcctatgggaaatccatggatctacatgtaccctgagggcttgaaggatctccttatgatcatgaagaacaaatacggaaacccacctatctacatcacggagaacggaatcggggatgttgataccaaggagacacctctacccatggaggatgccttaaatgactacaaaaggctagattacatccagcgccacatcgctactcttaaggaatcaatagacttgggatcaaatgtgcaaggctacttcgcttggtctctgctggacaactttgaatggttcgccggcttcaccgaacgttatggcattgtctacgtcgaccgcaacaataactgcacgcgctacatgaaggagtctgccaagtggttgaaacagttcaacgccgcgaagaagcccagcaagaagattcttacgccagcttagaaatcgggggcctcatgatgtgggtgcagcccataaaaaactggtgtgtggtttcgaaccgaaaattttctgtttttttccgccacgagaggttctggaggcatactctccagcaccgtggctaataacgcattgttccaattcagtctggccttgtcatgcatgcaataaataaagtgatgggtttccctgtt

SEQ ID NO: 33900 - DNA, 1835 bp, Zea mays
  Clone ID: UC-ZMFLMO17184C01_FLI
agaatcctgaatcagaatccttgccgtgttcgcggataacgcgtcagatttagaacggaacgttaattaatcgcgcgatgcggaagacaagccaagtcgaccccaagcgcggactgattcgcgaggtgatgcggatgatgaacctgaagatggataatttgaacgagtaccaagacaaaggatgatcgtcaagtgatcgtcgtctaacaaacactaacgtagtgtttattccaggtggtggacttccggatcgtacttagggatttgcccgaacttccggtaaaggcaagtaaatacagtggtggttgctaccgtttgggttgcatcctattccctgacattgagtatgcataagttttaattatgttaatcattgaattctatgatgaagtttatttgtttggaagtattaattctcaattgtctaatattgtggatgatcataatttggtaatgatatatgtggttgattaccatcttggatgaagttgaagtatttttttttgaatcacgttatatgaagtgttgtaggcatgacatgctcatcgcatcatccatcttgcattttgaagttatgtcgtgatcttatggtccgaccgtaccggtacatttttagcatcgtacgttgcccgaggaggggtacgatgcggcttcatatccttagaggtatgaaggcagaagtcatccttgcatttgcagacatttgcactcatgaggtatatatgaattgtgacattactatgttactattgtggtttctacctgcgaggtgtggtgactaggtgtgttgtacgttgtatacgtgctgcacctttgtaataagaaggttgtggaatcaagtggtggtaaaacaatgttcttatgtggttaaacagtttgatattattttacttgctgagatgtgtcatctcactcttgcattactcaatgcaggtacttgatacatgttgggaatgaggggagtagcagcacgtccacttccactctcacaataacgctgtccaggcgcagccatgatttaattagaaacttattgtcaaaggaagtttgtttttttaactagtcgtgcgcactagttaattcacttcatgtcgtatgtttaacttctctttgctagccgattaataatacttagtatgtttttgtcatgatatatgtttatacactgttgccccctcatttatgcaattttgcaagggggatgctgccgaaattttatatatagatgtcagaagtgttgtttagtagcattccggggtgttggtggaccccggggtgttacagttggtatcagaggataggctttagattctatgcaatttgaagataaatttgacacacttgcacatataggaagggtatgggttcgtatctctttcatattagtattttattgtatagatgactagaacttccttactccaaatccctttatggtttgatggggtatgtcgttaatgacgtaatgcttgatatgatatgttacttctatttagtattggtttcttgatgtggttgttattgaagatattatgcaagtgaagctactaatgtacttgttttatatacatatcgtcatgatgttgttgggtctatgcttcgtcgccgaaggtcttatagaaagaagtgatcctcggatgaagctgttcgcacaagatagccgaaggtgccttttcgcagagcttcggcattacaaaccgacttaaagatagaatgaccttttagtccataaaggtctgagtcaacgttgtaagttcttataaggggcatacttgtaattcctcacaggctgcgtcctgtgcctataaatagtgaatagtattacgttactgttc

SEQ ID NO: 33901 - DNA, 1275 bp, Zea mays
  Clone ID: UC-ZMFLMO17184C03_FLI
gttcagtaacgacgccagtagccacagtcctggttctttcagcaatggcaggtgctgcattattacacctggccctgaaatctaaatacgacgacgagatacacaggaaagtggagatgttcctcgagacctacaggacgctgaaaccgagaaggtacacattctctgaagtcaggaagatgacaagacggttcagcagcagacttgggcaaggcgggtttgggagcgtgtacaaaggcgagctgccgaacggaggagtgcctgtgcctgtggcagtcaaaatgctggaggactcaacgggggaagaggagttcatcagcgaagtcgcaaccattggaaccatccaccacgccaacgtcgtccggcttctagggttctgctccgagaggtcaaggcgtgctctggtatacgagttcatgcctaacgcgtcgctggagaagtatatacgctgctcctcccaagaacagtcgtcgttaataacggccagtaagatgctggaaatagcgacagggatcgcccgaggaatcgagtacctgcaccagggctgcgaccagcgcatcctccatttcgacatcaagccttccaacatcttgctagactacaacctgaacccgaagatctcggatttcgggctggcgaagctgtgcgcgagggaccagagcgtcgtcgcgctgaccgcagcgagaggcaccatgggctacattgcgccggagctatactctcggaacttcgggacagtgtcatgcaagtcggacgtttacagcttcggcatggtggtgctggagatggtggtggtgagtgcaaagaggaggaagtacagcccagcagagaccgaggaccagaacgacgacgtttgcgttccagagtggatatacgaggaaatagtcaccggacaagagcccagggaaatggcacgaggagagagagacatggtgaggaagctggctatcgtggctctctggtgcattcagtggaacccaccgaaccgcccgtccatgacaacagtggtgaacatgctcacggatagcttgcagagccttaagataccccctaaaccatttgtttcatcctttgttggccagtaaccatgaagaaaaagctagagaccacatggtgaccattcatcagatagatattcgtgtctatcacttgtcggcatatgcatgtatcagcgatgatgccctgtgatctgtcgtagttttgtgtcatacccatataccttttttccttgtaaccactggattgtatacattgcaattttctggtggtttaacc

SEQ ID NO: 33902 - DNA, 1197 bp, Zea mays
  Clone ID: UC-ZMFLMO17184E12_FLI
cgggacgagccctacaagctccgcctcaaccgcttcggcgacatgaccgccgacgagttccgacgccactacgcgggctccagggtcgcgcaccaccgcatgttccgcggcgacaggcagggctcctcggcgtcggcgtcgttcatgtacgccgacgcgcgcgacgtcccggcctccgtcgactggaggcagaagggcgccgtcaccgacgtcaaggaccagggccagtgcggtatgtgtatatatatatgtatgcatgtacatatatactacatatagagatgcttgtggacaagaatatataatgccaacaccaatgtcgtccacgcaggtagctgctgggcgttctcgacgatcgccgccgtggagggcatcaacgcgatcaagaccaagaacctgacgtcgctgtcggagcagcagctggtggactgcgacaccaaggccaacgccggctgcaacgggggcctcatggactacgcgttccagtacatcgccaagcacggcggggtggcggcggaggacgcgtacccgtacagagcgcgccaggcgtcctgcaagaagtcgccggccccggtcgtcaccatcgacggctacgaggacgtgccggccaacgacgagtcggcgctcaagaaggcggtggcgcaccagcccgtgtccgtcgccatcgaggccagtggctcgcacttccagttctactccgagggggtcttctccggcaggtgcgggacggagctggaccacggcgtcgcggcggtcggctacggggtcaccgcggacggcaccaagtactggctggtcaagaactcgtggggccccgagtggggcgagaaggggtacatccgcatggcgcgcgacgtggccgccaaggagggacactgcggcatcgccatggaggcatcctaccccgtcaagacctcgcccaaccccaaggtccacgccgtcgtcgacgaggacggctccagccacgacgagctctgaattgcgcactacactactacgtactagctatagcctatatagctatactatgattgatccatgtatgctcggacaggaacatcgccgactgtgaatgtctgaatggcatacgcacatcgtacacctgcattcatgtaataccagtcgagagttgatctaccagcaactttcatttcattcggttattattatattatttaactactgcttcctccgtcc

SEQ ID NO: 33903 - DNA, 1383 bp, Zea mays
  Clone ID: UC-ZMFLMO17184F04_FLI
ggagaataagccctccaaatctgttcaagcccccgaaagataatgtgataccaagtaaaacaagtttctcaaatgatcatctcttaagagccgcagctagatcgatgtctgcccagaaagagttattggctgaagcctctgttgaatatggctacactgatccaaaggaagttgccgagtccacaagtttaggtgtgaccgagacttctgcaatccaggctcaggagtcttctccacggtctgcattgccaacatcgccacattttgctgattctagattccttgaggaacctgttgcttttgaagtatactctccagaccggctggctggagaattgatcttcatggacagcactttggttttcacagctgaggatctgtcacgtgcaccggcggaagttcttggaaggagcagccatggaacaacgtataaagctgttctacaaagcgggcatgtcctaatagtgaaatggctgcgtgtcggtcttgtgaagcataaaaaggagttcacaaaggagataaagaggattggcactatcaggaatccaaatataatttcatggagagccttctattggggccctaaggagcaagagagattaattatttctgactatgtcaatggtgatagcttggcactttacctttatgagtcgactccaagaagatactcccgcctatcagtttctcagcgtctcaggatcgccatcgacctagcccgctgcctccagttcttacaccaggagaagggcttgccgcacggcaacttgaagccaactaacatattcttggctggtcctggcctctctccaaagctggtggactacggcctgcacaggttcatgactccaagcggcaccgccgagcagatactgaatctaggagcgctagggtaccgagccccagagctggcgaacgcggccaagcctgcacccacgttcaaggcggacgtgtacgcgttcggggtgatcgtcatggagatgctgacgcggaggagcgccggggacatcatctcaggccagtccggcgcggtcgacctgaccgactgggtccagatgtgcagcagggaagggcggggcaccgactgcttcgaccgagacatcgccggcctggaagagtccccgaggatcatggacgagctgctggcggtctcgcttaggtgcatcctccctgtaaatgagaggcctagcatgaagacggtctgcgatgacctgtgctccataacagcgtgagtgagtttccccctcccccaatgtacatgtaaccgatcaattttccgcccgttggtcccgattttttctctatcccgtgggggttccagagccttgtagacagggcttgtttgatttgtaactgctagtgtaaagaggattcgatccaccc

SEQ ID NO: 33904 - DNA, 1668 bp, Zea mays
  Clone ID: UC-ZMFLMO17184F07_FLI
gttggttactacaatgctggaacagtggagtttattgtggtcactctttctggagagttctacttcatggagatgaatactcgactccaggttgaacacccagtgacagagatgattgttggtcaagatcttgtggagtggcaaatacgtgttgcgaatggagaacgactaccattatctcaggagcaggttccattaaatggacatgcatttgaagcacggatatatgctgaaaatgttccaagagggtttctccctgcaacaggaaccttacatcactaccgaccagtcccttctgacccaactggtgaaatatggacataccctatgaccaattatattactagttacatttcagtgttgcacaattaacatattcttcctcagtaagagttgaaactggagtcgaagaaggagataccgtcagcatgcattatgatccaatgatagccaaacttgtagtatggggtgaaagtcgcacggctgcactagtcaagctaaagaagtgtttatcaacctttcagattgcaggtttgccaaccaatgttgatttcctccaagaactcgcaagccacagtgcctttgaaaaaggcctagttgacactcacttcattgaacgttataaagatgaccttttgagtatttctacaaagtcctcaaaagaatctcatggtgtagctgagcttggtgcaattttggctgctgcatgcatttgcaagaaggaacacattacatctaaagaatcactacgagccaacaagtcactatctgtatggtacaataatccacctttcaggatgcatcactttgctaggcatcccctggatcttgagttggaagagaatgatggattcagtgagaaacttcttaaactgttcattactcataagtttgatggaagctacttcatcgagacagaagatggcacttctggtttagatgtcaaagttgatcacaagggtgaccacgattttcgtgtggatgtttctggtctgcaaactgatgtgactctagcatcttattcaaagggaaacagcaaacacatacatgtctggcatgggaatcatcaccaccattacagacagactgtaagagctgagcatgcagttgaagatagctcccaacctagtcatgcttctgaagggaagtcgcatccaaaagggagtgttctggcaccgatggctggcttggttgtgaaagttttgcttgaagacggggctcaggtggacgcagggcagcctgtcatggttatggaagcaatgaagatggagcatgttgtgaaggcgcctcgtgccggatacgtgagtggcctgaaggttactgcaggccaacaagtttttgactccagtgtccttttcacaatcaaggacagctctgcaaactgagatggagcgatcactgccctagagtagttgcactgcaactgcatcaagcacccagcggatgctcgtccagatagagaagcgaaggaaataaactgctgggttcgtctgcgggcaatccaatccggcagggcaagcagacggcgcatggtgtttcccggcttgatgcgaatccatcatccgccgcaacaattccattgcgtagtgtacacgaacatgaaactgtaccacgctgagcaagaggaattcttgtttgatttgtgcaatgaaataagttgattccatc

SEQ ID NO: 33905 - DNA, 2546 bp, Zea mays
  Clone ID: UC-ZMFLMO17184G03_FLI
tgcatacaggagcactgtacttgatacagcgtgaaacacaagctactttgcttgcggcattattcagagttctcattcttttgatatctgctacaccgtacgctcggatgccaaaggaattgttgccaacagtcattaaagtattgtgcagtagattactgaacaaacactcgaataagactgaacattatgctgtgctggttactgttctaagttgcttggagacagctttttcaaaagtgccacctactttggatgtctttgcggttctcactgaggattgctgtgctggaccatcacatgagcaggaagaatcaaatgttatagcttttcttcttcattgtatagaggaggaaatgcactacagtgttagacatggagccttccaggtgctgagatcagcggttcacaactacccaagctgtgcaaacatgatttgggaaaaacttcgagacaatgttcttaacttgttgcaaatacaaagttttgaagaccaaaagtatgatgctaactttgggcctcctggagctaaagaagaatcatcaatcaagggaagatgtcttgtagctggaataaaggtaatggatgaatgtctgcgtgtttcatctggattcacaggagcagatgacatcaaagaatgcagattactggatattcagcaaatttctgattgtaccataaataaaactattaagtctgcacctcactttgaaatggaagctgctggatcatcacagaattgcactttggacataacacttggaattaaccgttggatcgaggtgatagagactcatctccctaagggattatcccatggttctgctatggtcaggacagcatccctcacatgctttgctggcatgacttctgatgtattcttctccctgcctgaaaataagagagactatgtgacctcttcttctgttcatgcggcgttaaatgatatggttcctagtgtaagatcagctgcatgtcgagctattggcattgttgcatgttttcctcagatattgtcaagctctagcctaccaggcaagttcatagatgccattgagttcaatacacataactcatcaactccagttcgtgtcaccgctgcatgggctttggcaaatctctgttcttgtattcgttttagagcactggaagtgcatacagatccctatgcaggtgtaggtgtattgagcaaatcaagcatatctcttttggttgaagttgctttgcgtctggccaaagatagtgaaaaagtaaaatcaaacgctgttagagctcttggttatctttcaagatttatcagattcaattaccatgccggcacaataaatgacccaagtgattcagttttttatggagatcctgtgtggcttgaaagaatggtgcaggctttgatgtcttgtgtgacaactgggaatgtaaaggtccaatggaatgtttgccatgcccttagcaacttgttcatgaatgataccttgagacttcaagacatgccttgggcatcaagtgtttatagcatacttctacttctaatccgggactcaaacaattataagataaagatgcatgcagctgttgctctatcagtgccagtgtcaaggcttgattacagcagctcatttccagatgttgttcgaggcctcgtgcatgctctcgagtcattgaactcaaacaattcatcgttaccttcaaatttcaaacagagagacaacctcgagaagcagcttacgtttactgctctccatttgcttagttttgtgtcaccaaacgacgatccaagcctgaaagattttcttaccaagaaatcgtcgttcctagaagactggctgagatcactatccgcatcgttgaacagctccgagcgccagcccttgccaacggaggccacaaacgacgaggacggcttcagcccaaacgtgactcagaaaggcatgctgtcttccgccctgcagtccttgctcggcgtgtacgcgggcaggacccagcaggtcatcacccagagatttgagcaactggctagaagcgtcgcttgaatggtgagcagcgacgagcagtcaggtgtggtctccactccagcctccattaacaagcagcgatatattggtcgtcgtctacccctcaggacggacagcgcgtcaggcagtggatccttaaattctgccgaatcccatgagctccaggcggcacttgtctcggatcttggctgtcatcatgcacaggctctgcaagcctggcttggtcggtgttttcgtcgttgtttacttgaaacatcgttactgatggcgctgttatgtagatgggccttttccctggtcctggggcttcctgcttgcttgataaaaggttggtatcacccgaccacggtccacgtggacgatattacaagatgttcattgttcttggcaagaggggtcatgaatgccgtccaaatctgttggagtccgtcgctagtgccactgctgttattgagcccatgtgtgtgtgcgcgcgcgtgtgttttgttcatgtaccaaccttcataaattgcttgacgctctgcactgttcgac

SEQ ID NO: 33906 - DNA, 1488 bp, Zea mays
  Clone ID: UC-ZMFLMO17184G05_FLI
cgggcgcacgcagcagcaagctctgaccctgaaagctgaaaccgctccacgccctccccctccgcgcagagccagccaagccaaccagccagtcagaagaggaaccggggagcggcagctgcagcggccgagggcggagcacgcgaggcatggatagataccaaagggtagagaagcctcggaatgacacgccaatcagccagaatgagatcagaatcactactcaggggaggatgaggaactatatcagctatgggatgtcgctgcttgaggaaaatggacatgatgagattagtatcaaggccatgggacgggccataaataagacagttatggttgttgaattgatcaagagaagggttggaggtcttcatcagaacactgctactgaatctgttgatatcacagacacatgggaacctttggaagaaggccttctcccactagagacaactcgccatgtgtcgatgatcactgtgacactgtcaaagaaccctctggatacatcatctccaggataccagccacctatcccagctgaagaggtgaaacctgcttttgactatgatcatgaagaatcgtatcccactggtcgtggaagaggacgtggtggtggcagaagaggcaggggaagaggcatgagcaatggcccccctccacctgcttatggttacaacgaagagtgggaggaggaaggagattattataacagagggcgcgggagagggcggctacgtggacgaggtgggagagggcgtggtggctactacggaggtgggaggcgtggtggctacggttatgattatggctatgcccccagaggcgggtactatgaagagcaagacgaatactatgatgagcccgaggaatatgctcctccccctggccgcggacgtggcagagggagaaggggcggcatgccttggcgtgggcgtggaggccgcgggccaccgcgcggtggccgagggagctactactaggcgcgagaaatgcgacgtgccgaatgcgtgtgcttattagttatctgttagcgtttgctgcagtgctcttctatggagctccgaccccggactggaattatctcgtaggcccttccaggtgctactctacttcagctgctgtccctgtgcaactcgtccgggcaagttttgtggctcgctcgtggttttgtagctaggttaagcgagtgaagttacactcggtagcgcagtatttcctgcgagattgtttattcttctgttaatgtacctaccttactatttcgtttggattatggatactgggtgcatccgtttcatgtttattctcctggtaatctgtagctttaccgacagtgtgtacgctgatgcctgctgccatacggggcagaagttttttttatgctgcagaacagagcagcagggaaaaaaagtcacaatacagatgggcaagacggaaaaaaaaaaaataaaaaattaataaaattaaaaataaaataaaagatgagga

SEQ ID NO: 33907 - DNA, 2482 bp, Zea mays
  Clone ID: UC-ZMFLMO17185A04_FLI
ctcaatgtctatcacgttggagatgaatctgttaacagatttgtttcccgcacgcctttatcagattatttttcagacatggttcagcattttcagaagcagtgcattgacttggataagttggttgcacgctcctcacgaaagggaaattcttctgtgccaatatcttctattgaagatgcaattgtgcaaattgaagacacactgtattatttcagtgatgttatgtcttctggtattcctgatcttgaaaggttcatcactgaaaatatcttgcgagttctggtatttcgattcttactcccgtcactgcagaggcagagcacagatttggacttaagtgtcactacatccatgtatctactttgttgtatactacacatttttaagaataaggatatggcaagtactgtagctgctgccctttttcatcaacctgatggccctgatgataggaagcaaaggacacctaatggatatacatctgagcatgatagttgcaaatctgagaatcattgcaccactgcctctggtatcgagcaatcaagtgaggagccaaattctttgtcttctgttagttggaaacacttgcccaacaattcatcgcgaagtgattgctgccaaggaaacacaccaagggaacacttgctgtcctatatcacagaaggagatgattcacaagctttgggttcattgtgcttattcgctacattattgcagacgaaagaacttgatgaatcaatgctggatgcccttggaatcctccctcaaagaaagcagcataagaaacttctattagctttctcttcccattaaaaatcacataaggcagctagtataatattttatgggtagtcgtgattagggttaaatgaacaagatttgacagcaagctttagtaggtgaagaccttgctgaaacacaattattttcgtcaagcagcagtctaactgatgacagcatttgtagtgattttgatatttatgtaaggaagcttcaggataaatatgggctacaatgtcaccatccacggcaaatgacttccaaagctcacagatatcaggtgctcgatgctttagtcgaccttttctgcaggtcaaaggtttctgcagatgttcgtttggttggtggctggcttttccggcaactgctgccccatggagaggaagagttcactgcttttcatctaagacgactaaaggattcacacaaggattgtagctcaaagctttctgaggaatctggaggatgctggtgtgacatgcttcttcctattgttaaagaagcttggaggaactgcaagaaagcaattgaggcatcttcgccaccaaaaggatccaaatctattattgtacccatggatttgtgttcatttgaaggtgattcttctgttgccatcgcagaggcactctatgagatggttaagggttttgtgctgcagcatcaagttatactcttctgtcttggagaaactttcacagagctacctcctatttaccctctggttgatttgcctataaatactagggcaagcgctgcagattttggtggttcagttcctaaacctgggcttgaagtcaacttagtcgacgctgttccttgtcgaatagcatttgagaggggcaaagaacggcacttctgctttttagccatagctcatggaacttctggttggattcttcttctagaagaattacctctaaaacgggaacgaggaattgtccgtgtcatggcacctttggcaggatctgatccaagaatagatacaaagcatgggaagtggttacatctacgcattcgcccttcttcggtcccttttttggacactgagaagcataaagcgaagacaaagaagtatcttgttgatgggagatggacccttgcttttagggacgagcagtcctgtaaggttgcagagagtatggttattgaagagatgaaactccaacgaggtgctgttgcagagcaattgaagccattggttgaatttgacatgcctgaggatggaatgcagcacccccagacttcacatgaaaccccttctgatgatggatcatgactaaattttcatcaagtgcagtgttgagcttctcaattaaggagacatggcaacagatggccgcaaaagtgccgcattgaacatttcaagcatgctggcaggaaaacccaccatggcaagtcatcgacaattctgtacattacattgggagattagagatgtctccttgttaacacacaactgtagagtttcgggccgtcctgagttgaactagctggataggattctttgtacaatagtttgtttctctccttgcccgttgtaaccttatatatcacatcaaaacccattctttgttaagtttcagggcacagttgtgttgtgcacacgaaatgtttaaagaaatttgcagttagtcatacctgttgtcaaagcaagccttgcctatgtggtaataaaatgtcagatcgataatttttcttg

SEQ ID NO: 33908 - DNA, 1528 bp, Zea mays
  Clone ID: UC-ZMFLMO17185B10_FLI
tcttcttccaaaaactactattaaaaagctagatgccaaaagaagaagatttctttggcaaggtggtggagaaaaaaaaagtatcacttggtaaattggaacaaagtttgtcacacaaagaaaaatggaggtttgggcattaaaaatcttgaagctttaaacataagccttctttgtaaatggtggtggaagattgaaaatgaatcgagtctttggcaaaagataattgtcaagaaatactttcatggaaaagacttatacaatataaaagtgagaaactctgactcccctgtatggaaagacttgatgaaaatcagagctttctacctgaaaggcagacaaatcacaactaagtgtggagataagtccagattctggctagacagctgggtaaatgagaggcctttatgtacaattgatcctgaattatatgagatttgtgatgacaagtttattctagttaaagatgcaagaataaaaaattggcaattgtccttcagaagatggctaaataatgaaaatgagattcgatggatatcaatttgcggtgattgtgagaacttcgagtttcaagattctcctgacactgttcagtggaaatggggagggaagaaaacctttaccgttaaatcaatgtataacagtttatcaaacaacatctctgatcttggcaaaaagcacatttggaaaagcaaggtccctccgaaaattaaaatttttatgtggttcctagagaataacaggttgttgactaaggataatttgattaggaggaagtggtctggggacccttcatgctgtttctgccctcatgctgaaaacattgagcatctctttttcacttgccctattgctagagtgatctggggaactgtggcgaaatgtctggatactcatcatattccaaacaacgtggagtcttgctataggtggcttcgaaaacacctcaactgtgacaatgctgttcatgttattctgatttcagcaatttgttgggctatctggaaagccagaaataaaatgtgttttgatcatgtgcttgtaaattctcctaatgagatcatatgccatgcgggtgctcttgtgtcttcttgggcagggcttagcaagaaagagctccaggaccttctgcaagagggcgccaagatgctggtgcgtgctgcaagtgctagaggaaatcggatcctcgggtcgggcgatgagatggaagggatgctgcagccacacgggcgttgagtcatgacgtgactgctcgcctggtgttagctttgtcaggaactcgctctattttgctgccgtctgttatgtcgtatggtctggtacttgtgtgatgtaaaactctaaactcgtcggttggcatgttgcctggtaggggacccggctgttctgagtcatccgaagcggattggctcgtcagcgcttctgtttgcgggttcttcctgttattttgcgttggtagtgtggaaactatctgaaccactttgtatttctgttatgacaataatagaaatggggtcctcctctcgtc

SEQ ID NO: 33909 - DNA, 911 bp, Zea mays
  Clone ID: UC-ZMFLMO17185C05_FLI
ctcaggattccctgatgcttcccaaggtcgacaggcccatggaaccaaacaatggtagcttcgttccttctacaaaccaagtttggttcggtgcagcttctcgagagccttcgcacagtggatcttctactgctatgaccacttattcagctgggttcgaaatgtgcgatgagctaccacctgcagggcaagcgatgtctatttgtgagagctccagaaaaaacgctgcaaatggaacaaccatcggcagatcgaaaggcaaagaatacagagagagggtacaacaggataatttgaaagatgagagaaagatgagctcaactaatacttctggagcatcgaaagctgataatggagatcctatgaaaaagcgcagggttgagcgctcccgcaaaatggcagaagcgaaggaaagaagctctacaccagtaataccgtccgacatgcaggccgttcttaagcgctgcgaaaccctagagaaggaggtccggtcgctaaagcttaatctgtccttcatgaacaggaaagattcagagcagaccaagcagatcgaggagcttcaacagaagaacgaggacttggccgaagagaaggagcggttgctggaagagatcgagagaattgtctccgaccccaacacttgagcacccaatctccttttttttgggtaacttatttttgtgtactaatagagttaggcttgaaatggtccttgatgcaaatacgtacagtccagcagggcagcaagaattaagtgctggcctaaatgtatcaccattctttccttgttatcacaagtttaatgtatattaataccaacaagcaaagggatcagggattacagtttacttcctttgacttgtatcttgaactaattacagtatgaaatggagcccaaaaagggtagtagc

SEQ ID NO: 33910 - DNA, 1416 bp, Zea mays
  Clone ID: UC-ZMFLMO17185D02_FLI
gctccagcgtgcgcggcgtcccgatcgcttcgtaaccgcctgattgatccgcctgtcctccgaggctttcaccgcgcggctttaatcccgattgggttggctggaccgcaacccaattgggggttaattgggattgctactccgcggctgcctgtccctcgtgttcctggattggcgaggccaatcgactggtttgctgcagcctcctgggtagaatcatgaagctaaaaaatagcgcagtggagacttttaaggagaacaatatgattttcacttctgaaggaaatctccactctaaaaaaatgcgagaagattatgttgctagtccaaaccaaccgggtgctgtccagacaagatgcaaatggataattggagatgtaactgaggtctttgatcgcagcacatggaagcttggaaagatcttaaagatgctaaagaacaactactttgttatcaggcttgctgattgcatccagctgaaagagttccacatatctagtttgagaatcccacgtggtctggaagctcctcaaagcaagccctttcatgcagcagataaggccaccggacgcggtaatcgtcgacctgctgatggcgccttgcccggcgcaagggctgcggatcaaatgggtcaccgagcctacgagctggggagcagcggcaagaagcggaaagcaaccgcagacgcctctcaccatctaggcagagcagcagcagcacactcccggaaggtcgccgcagcctccaacccgaacggcggcagctacccgcacagctcttcacaggccatagaagacgccgaatgctcggtggccagctgcagcgtggacgacctttaccgcctcggcaatggcggcaacgccaagcgtcgccccgccgccgcagggtgcctccctgacgacgccatgtccgcgtgcccgtgcacgcccggggcgagggacggggaggacgacgacgcggcgggcgtgcacgggctggagctggaggcgtacgggtcgactatgcgggcgctgtacgcgtcggggccgctgacgtgggagcaggaggcgctgctgacgaacctgcgcctgtcgctcaacatctccaacgaggagcatctgctccagctcaggcgcctactgtcctcgtgattattggcacttggcattggcgcattgccagccaccacccttctggccttctctttcgtacgtctccagcgtcgtcgtcggccaacggccatgcacgtcggcttggctcgcggaacgccgcgttcagcgagcctcttgcttttactcttgttgctaattgctattacatggttctctgtctagtctaggtagaaagaatcctatgttcataccagtgtcgagacatgtcatgccttttgtatcctggatatagtcttgcttgtaaatgcaaacaagttttcctttg

SEQ ID NO: 33911 - DNA, 1558 bp, Zea mays
  Clone ID: UC-ZMFLMO17185D11_FLI
gtcggtgtcatcgtctcctctcgtctcgttctcttctcctcacctccttcgtttcgcggagcagagcgagcagccggcaccggacctccaaggagcgcaccgcggaggccagcgaagatgcccgggctcacggcaccgtccgactacgcggaggagccgccgcgtcacccggccctcaagatcaactccaaggagccattcaatgctgagcctcaccgatcagagctagtcgcatcttacatcaccccagtggatttcttctacaagaggaatcatggacccatccctaaagtcgaggacctctcaagatacgctgtttccatttctggtctcgtcaacaagtccattcagctatcgatggctgacatttggtctcttccaaagtacaatgtcacagcaactttacagtgtgcaggaaacaggaggactgcgatgagtaacgtacggaaagtgagaggtgttgggtgggacatatctgctcttggaactgcaacttggggaggtgccaaactatctgatgtccttgagctagttggaataccaaaactcagttcagtcacgtctctaggagggaaacacgttgagtttgttagcgttgacaaatgtaaagaggaaaaaggtggtccttatacagcatctattccattaaatcaggcaacaaatcctgatgctgatgtattacttgcatatgaaatgaatggagaggtactcaaccgggaccacggatacccgctccgggttgttgtacctggcgttattggtgcacgctctgtaaaatggctggacagtatcaacgtaaaagaggaggaatgccaggggttttttatgcaaaaagattacaaaatgtttccgccaaccgtggactgggacaacattaactggtcaactagaaggccacagatggatttccctgtgcagtctgctatctgtacactggaagatgtagatgttatcaaggaaggacaggctaggattgctggatatgcactttcaggtggtggccgtggcattgagagagtggatgtatcagctgatgggggtaagacctgggtcgaggctcgtagataccagaaagacaatgtggcgtatgtgtcagatggacctcaaagtgacaagtgggcttgggttctctttgaggccacattagacgtaccagcgaatcctgagatcgtagttaaggcggtggactcagctgcaaatgttcagcccgagaaggtagaagacatatggaatctgagaggaatcctcaacacgtcttggcatcggatcaaaattcagagatctttgtgcgttgaaagatctaagctgtgaaattaagtacgcagctgatcacttggagcaagcagactcactttaccattgtcccagaataataattagtcacttcaactttctgcgtctgtggagtaaggttgtacgagtgttggggctgtgtcattatgggatttgagctcacttggtttctgtgtaaatgtcagctgctgcggtttttttggtcactggatgactgctgctgttggctggtcaggtttgatatcgagaaatatccattgcattc

SEQ ID NO: 33912 - DNA, 798 bp, Zea mays
  Clone ID: UC-ZMFLMO17185E02_FLI
tggagtgcttaacatgacaatattccgtcagggaaaagaaattgaccttgttgtcggaactgatgtaagagatggcaatggtacaacccgtatggttaattggtgtggttgcattatccaggatcctcactcagcagtgcgtgcacttggctttttgccagaagaaggtcatggtgtttatgttgctagatggtgtcatggaagtccggtacatagatatggcctctatgctctccagtggatcatcgaaattaatgggcaaccaacaactgatctggaaacttttataaaggtggtgaagggtctcgaagatggtgaatttgttagggtgaggacggtccatttaaatggaaagcctcgggtacttactctgaaacaggaccttcactactggccgacctgggagctcagctttgaaccagaaactgctacatggcggaggaaaataataaaagcattgcaatcagccagggcgtgatattttcatgttttgctgcgaccttttcatgctttcagaggagcatagaggtatggaagttagaggttcgtgcctttgtttggtaagctaaatcgtgcattatatatgcaggattaagcaaccctgcactttgtagggttagttgtgtgcattagcataggggtgcttgaaagatatataaaaggtacattaaaggtatatggattcattgtctgtggtctctggacaatttgaccacaggatttgccatttgtatatcgtctattcctatattttggtagaaaaagaaataaaccgttagcctttctagcggccatttc

SEQ ID NO: 33913 - DNA, 1841 bp, Zea mays
  Clone ID: UC-ZMFLMO17185E12_FLI
gatgaaaattgcagcccacaagctgaatatgaactgcaggattccaaaaggagtaggtattcatctaatgatctgaggtcacatgtggctctccacaaaagaacatctggtggaaccaagaatcgaagaacaagtgtatcccttgccaggattaagaaattcgggagcaaatcagtatgctattctggcagtgacaaagacaatgctgtgctagcccatgaagtgaatgctaggagatacagtggaagactcagctcaaattctccatgctgtgtttgtgggatctcagacctggagccttgcaatcgattaatagagtgcagcaagtgctatatcaaagtgcaccaagcctgctatggtgtactaaaagttcctaggggtcaatggttttgcagaccgtgcaagaataataccatggatacagtctgtgtgctgtgtggttatggaggtggagctatgacaagggcactgaaaaccaagaatattttgaaaagtttgctccaaggtttgatgaatttagaaaggtcagaatattatgttgattccttaggaaatgcaagcagtgagtgtacaagcttgcaaaatccagtagacagtgcacatggggataacattatgaatgcgaagaacatcaccagcaattcctggacctctggaaaatactattcgagtttacttggaccacaaccaatgcagtgggttcacatggtctgtgggctgtggacacctggcacaaaatgcccaaatgacaccacaatgagcgcttttgatgtttcaggtgcttcacctgccaagagaaatactgcatgttcaatatgtgacagaactgggggctcatttgtcaagtgccgagctgtaaattgtttggtattctttcatgcttggtgtgcacatcagaggggtttgctgcaaagtgagcctgaaggcgagcacaatgaaaatattggcttttatgggcgatgcgtgtctcacgccattgttttttctagtcacgttaatcctaagaaagaatactttagaaacaacaattggacatgtgcacgtacagagggttttaaaggccgaaagggagaaggcttttctgatagtagccataaaaaatatgaagagtacagtggcgagttcggtgtttcccaagaacagataaatgcttggttacgcataaatggttcaaagccctgcggacgaggacagaaggagtacatccattacaagcagttaaaagggtggaagcatttggttgtttacaaatctggcatacatggacttggtctctacacatcagtctttattccacgcggctctatggttgtagaatatgtgggtgaaattgttgggcaacgggttgctgacagaagagagatcgaataccagtccgggaaacggcaacaatataagagtgcatgttatttctttaagattgacagggagcatattattgatgccacccgcaaaggtgggattgcaagattcgtcaatcattcatgccagccaaactgcgttgcgaaaataatctcagtcaggaatgagaagaaggtaatgttctttgcagaacggcacataaacccaggggaggaaattacgtacgattaccacttcaaccgggaagatgaaggccagaggatcctttgcttttgtagatcaagatactgcaggcggtacctcaattagtttccggtgggcgtaacatgtctatatataacttatatatctatatgtatatcttatatatttacaaattacaattgcgattcatgcctgctgtatatgtaggaacttgcatctagaactgcctgtttatcttttgtgaagtcaaatgagttatcagctgttcatgtgcc

SEQ ID NO: 33914 - DNA, 359 bp, Zea mays
  Clone ID: UC-ZMFLMO17185F09_FLI
cgcgcggtgcaccaagccggtgtcgctggcgacgcccgtctactacgccgacctcgcggcctaccgtggcaggctctactacgaggctgccatgatggcgtcccaggcccagcgaggggggtcctttgacgtcactaacttcccgaggctgcacaaggatgtggaggacaacatgttcttcatctgacaccagttttttttttttttttttgccggtgtcgtggcgcaagttcgggtcgattttgctgtgtggcaacgtcgcattgtttttatgctgttgcctttttttttgcttgctggtcgtagtgccactgtgtgttgttgaagtcgctggtttgaaactgcagtcagttaactgt

SEQ ID NO: 33915 - DNA, 2550 bp, Zea mays
  Clone ID: UC-ZMFLMO17185G05_FLI
cttcagatgatgctgacaatggaaatgtgaaataccttgaagtactggagtgtattccacaggcatctgcaagaaaacatggagctagtactactgataagtcagaaaccagtaagattgcagatgtacatagcaaaccagtttatggcaatcatgataggattcagacagggccaagtccctcaaatctgaacacttctattagagatgatggcaaggaggcaaagtaccgacacattcgttattgcgagaatggtgaaatggggcaatcattgagagtaagagacatgtccccgaagtctccaatcaatcacatttcagacaataatcggagtgagtaccacttgaagcagaggtacagctattctactaaggaatgccctggtgaaagaaacttggatggtccaagcaaagtcaggggacttgagaaagaccgcgctgagatcttgaggatgcttgatgagttgagagaccaggtacagcaatcttgcaatgcgactaatggggcaagtggaattgccccatctactgcagcagcagattccaacagttcacatggtacttctgaccggttgagtcaattgaggcaggttgcaccacaattgcatcagaatggttcacatcactccccatccttgaatgttggaagtcctagcgtttctcgtgtttatgctccgctgcctgcacaacaagattgtgtcagatatgcagagcctatttcacatgctcgagcctctagctatcctgccagcctctatccatggagaaattttgataattatttctttggacagcatgatcccgatcctcttctctcttgccgccatgatggcttctatcaccaagctgcctgttcttgcttgcactgttgccaccaagaattcttgcctatacagggaaatcacataggcttccatgatcaaagggcaccatatcttctgaacaattatggggcttatcctgtggacagtcccttacttggtcagcaaagatacagtgcaagagttaccaatactaccttgcagcagaatcacatgagggtcaacgttagcaagaaggctgcacagacttgtgagccagtcgcaggtggtgctccattcaccatatgctgcaattgctacgaagttctacagataccaaggaaacagtccctgtcagggaacgagtataaattgcgttgtggatcatgctcacatgcaattatagtcaagcttgatggaaacaggctcaatgtatcagaatttgcactatgtacacgtttatctgatggacaggaaaatgacatgggaaccgatgggcaaactcaagacaataggtccattccagcttaccatttatctgttggaagtcctgcatctcaagaacgagatctgcactcaaatttgagcgagtcagagaacaatcatacccctctaggaactgactcagagggcacttccctgtccagggatcttcctgctgaagacagtgcagtttcccatgtaccaaatttaccacatcacagtcattctggatcatctccaactgaacattttggagtgggaagtagaagtacccattctgaacctgaaaaagttatactattaactgaaagttccaagcagacctcagttagaggtatatgtgtaacaaacaagatgcaatctccaaacaatgagtttgatgttcctgaatacacagatgatacattaaatgaccaacaagatactgaccaccctagaacaacaaaggccagtgattcctttctcactaatctgataaaaaggagcttcaaaattaataatggattgcgcaacagaagagcaagggtttatgtaaatggctttcctatctctgatcatgtggtccgaaaggctgagaagctagcaggatcaatctgccctggcaattattggtatgactaccatgctggcttctggggcgttatgggacatccctgccttggcatgataccgccttatattcctgagttcaatttccccatgcccaagaactgtgctggtggaaacaccagcatatttgttaatggaagagagcttcaccagaaggatttggatttacttgtcactagaggactctctgattcccctggtagatcttatgtagttgaaaattctggaaaggtttcagatgaagtatctggtgaagagctttatggccttggaaagcttgcaccaacagttgagaaaatggggcggggatttggcatgcgcatcccaaggttcatcaagcgacaggccaacttggtacagctagacttctaaaccttgaaggcaaatcgatggggcgtggatttggcatgcgcatcccaaggttcatcaagcgacaggccaattcgatctaccgtggttacttcaattgtgaagaaagttccattccatgtatctttctttttttattatattccgattaacatgaggcctagtttagtcaatcaagtttattgtaatttcccatgcatttgtttttactgaaaaattccctttttcatttacatgtgcaagaacaatgaagcaattacctagttgaatggcatgaattgtatcaaat

SEQ ID NO: 33916 - DNA, 792 bp, Zea mays
  Clone ID: UC-ZMFLMO17185G10_FLI
gtcacaccgctgcttgcttgcttgcgatcgggtttggatttggggagcatcatggaggcctacttcttgttccacagcgggagggcgcacgagttcgcgtacgcggagcaggaggaggacatcggctcgccgtcggattccgaacccccgtccacgtccacgtcgagggagtccgcgggctcgtcggcggagctcgacgacgacgccacctcctctggctctggctccggctccggctcggaccgcttcgagatgtccgccctcatgacgcagctccctcccttcaagcggggcctgtccaggttcttcgacggcaagtcgcagtccttcgcctcgctcgccgccgtggggtcgctagaggacctgcccaagccggcccggaagcgcctcaagccgtcgcggagctgcggcggcgccctcgacgcgcaccgcggacgcctcctctcgccgcgcaggcattattgcaccaagcccaccgctaggactaggaaggcagccgcgaggagcggcacgttgtcggttctcgcggccggcgcgccgaggatgccgccggcggtggcgagggccgagggcgtggccgccaaggttctgatcgtcagttgagccgcggatcggcctgcctgagctcaacatcgacgcacacactcgcaggcacagctagtacggaccgccgcatccacccctctgcctgaagctgttcggttttctttttgtttcccaatgcgtctgtggtctgatctctttgtaatgaaaacgcgcagctcaattagaatgaacttcagttggaaactc

SEQ ID NO: 33917 - DNA, 1443 bp, Zea mays
  Clone ID: UC-ZMFLMO17186C05_FLI
caaagtggatgaactgaaatctgaggcaaagttcttggttcgacaactgtcggaattgcaagagtcacggcagtcgttgcaagcagagattgtcaagctgattgcagagaactcttcactctctagcaaagtttacagatccagagagaaagagacgtcatttgatgaggatttcagcacacttgttgatgaagcgatcaggacagatattcttggtgtcatttttagaagcctttatgaagagaggacatcacaattgcagcgtttgcatgaggattttgggtctctacatgcagcaggcaatgagctgtatcaggaaatcaagctgatgaacaagaagctcggagacctacagcttgagaacaactatcttgagaaggaactcagtagaactctaagcatctgtgatggctctggtacagaaatttcctccggaagaaggcgtgctatgaggagggacacgaagctattaaaatctggcaggaaaagccaagagggtggccagaacatggaacaacgaaaagaagttgacaatgctggcctcgagaaatcgaacgaaatgcttagagtggagctccagaagttgaaaaatgaactgcaggtccttaaaagcaaggaacagcctgtgattgacgtgaaatcttgtgacgcagagatcactaaactgctggccagcatgcaattggccacagcgaatgcgtctctcttcaaggagaaggtgcttgagctcatcgtgacatgcgagagttttgagatcagtgacatggtgcagaaagaggtgctgaaagaggagatcactcggaggaactcttacgtggatgagctcaaggacaagcttaatgccattgagattgagaacagaaggctgaaggttgatctgaacggcgacttcacactgctcggagcattgcaaactgaagttgatgccctggagaaacaaaccttgtctctagccaaggattgcctaccaccaagcatgctcaagaaggaggagaatccactatcacctcagctgtcaaagattgctgtgaggccaagtgaagatcagaacaccacaaaggtggtgaaggacatggagctgcagaaactccacgggaccatcaaagcacttcagaaagtggtgtcagataccggggtggtcctggagcaagagcggcttgacttcaacagcaacctccaggacgcgaggaagcagatcgagatgctgaagctgaaggagatcctggacagcgacgccagcgacgtgaactacgagcggatgatgaaagacatccagctggacctcgtccatacgcctagccggcgagccgccgcatcctcacacgggcgccacaggaagaagaactcagtagccgcgacggcgcagtctgacgacaacaagatgctcgcgctgtggagcgtggacagggtgagcagcggcagccggcggcacgacatggacct

SEQ ID NO: 33918 - DNA, 1555 bp, Zea mays
  Clone ID: UC-ZMFLMO17186C12_FLI
ggtcggatctgagacgaggcgagacgaccccccctcccctcaaccggaacttgttttaccccatctcatcccactgactccacccacccgcccgctgcctccgccggatctcgtcggactcggatccgcccgaccaccccgcgccgccgccgcgcagcagcagcagcagatcagagaagatggccggactcgacaccttcctcttcacctcggagtccgtgaacgagggacaccctgacaagctctgcgaccaggtctcagatgctgttctggacgcttgccttgctgaggaccctgacagcaaggttgcttgcgagacctgcaccaagaccaacatggtcatggtctttggtgagatcaccaccaaggccaatgtcgactacgagaagattgtcagggagacatgccgcaacattggtttcgtgtcgaacgatgtcgggcttgacgctgaccactgcaaggtgcttgtgaacattgagcagcagtcccctgatattgctcagggtgtgcacggccacttcaccaagcgccccgaggagattggagctggtgaccaggggcacatgtttgggtatgcgactgacgagacccctgagctgatgcccctcagccatgtccttgccaccaagcttggtgctcgtctcacagaggttcgcaagaatggaacctgcccctggctcaggcccgatgggaagacccaggtgacagtggagtaccgcaacgagggtggcgccatggttcccatccgtgtgcacacagtcctcatctctacccagcacgacgagacagtcaccaacgacgagattgctgctgacctgaaggagcacgtcatcaagccagtcatccccgagcagtacctcgacgagaagacaatcttccacctcaacccgtctggccgcttcgtcatcggcggacctcacggcgacgccggcctcactggccggaagatcatcatcgacacctacggtggctggggagcccacggcgggggcgccttctccggcaaggacccgaccaaggtggaccgcagcggggcctacgtcgcgaggcaggctgccaagagcatcgtcgccgccggcctcgcccgccgcgccatcgtccaggtctcctacgccatcggcgtgcccgagcccctatcggtgttcgtggacacgtacggcaccggcgcgatccccgacaaggagatcctgaagatcgtgaaggagaacttcgacttcaggcccggcatgatcatcatcaacctcgacctcaagaaaggcggcaacgggcgctacctcaagacggcggcctacgggcactttgggagggacgaccccgacttcacctgggaggtggtgaagcccctcaaggcggagaagccgtcttctgcatgaggcgcctcctctgtttcggaagaagcttttggtctggtctgcctgcgctctatcatgcttttttatggctcctacgtgttgtgattcttgatctgccccttgcttatcatttgtactgtactgtcactgtcctaataagtggtacgtgtgcggggtcgtattgtgtctgcttattcacctag

SEQ ID NO: 33919 - DNA, 1036 bp, Zea mays
  Clone ID: UC-ZMFLMO17186D12_FLI
gatgatataaagatgctgcacacgaaggtcgatctaattgtaactctgggcggtgatggaactgttctgtgggctgcatcattgttcaaaggaccagttcctccagttgtcgcattcgcccttggatcactgggcttcatgacacccttcccgagcgagcactaccgtgagttgttggacaacgtgctgaatgggccatttagcatcacgctgagaaatcgcatacagtgtcatgtaatacgagacgcggcgaaggatgaaatcgtgaccgaggagccgttcttagtgctaaatgaagttacgatcgaccgagggatatcgtcttaccttaccaacctggaagtctactgcgacagctcttttgttacttgtgtgcaaggagacggactgatcatatcaaccacatctggaagtacggcatattccctagcagctggagggtccatggtccatcctcaggtccctgggatccttttcaccccaatctgcccgcattccttgtcgttcagacctttgatcctgcccgagtacgtgactctccgcgtccaggtgccgtacaacagcagggggcacgcctgggcgtccttcgacggcaaggaccggaagcagctgtcacccggtgacgccctgatctgcagcatttctccctggcccgtgcccacagcctgcctagtggattcgaccaccgacttcttccgcagcatccatgagggtctccactggaacttgaggaaatcccagtcgtttgacggcccgcgtgattgattcaacagtttctttaccgttccatacttatatacaaaggttgcgtgcgtttagatgtgaggtagtatagacgtatagttgagaatccaaatatatagccatgaccatgcgtgtgtgtacatgattctgtgcttcagtgctccccagatctgaatggaataattggcgagccatacacgtatgacgagatggcagcttgcagtcgtgcgatctgggcacttgtgacgattgatggggaggaagcctccatccttttttagctttccatact

SEQ ID NO: 33920 - DNA, 641 bp, Zea mays
  Clone ID: UC-ZMFLMO17186F05_FLI
ccgcctttccatcgccgcggcgacagccgccggcgaggaccctaagctgtctcgaatcgcggatgagctcctcgccctatcccccgccgagctggacgactacgcggcgctcctgcgcctcaagctccgcctgtcgctcacctccagcgcagctgctggagcctctccggccggggccggggacgccgcggctgcagccgtggaggccgccgcggcggtgaagacggcgttcgacttgaagatcgagaagtacgaggccgcggcgaagattaagatcatcaaggaggtgcgcgcgatgacggacctgggtctgaaggaggcaaaggagctcgtggagaaggcgcccgtagtggtgcgcgcggggttgcctaaagaggaggccgaggcgctcgccgctaagctcaaggccgccggtgccgctgttgcactcgagtgatcccacgaaggtgtcgcctctttttttttttgttcctagtgtttttagacgatgcaacgtatctttgcgccttaatttgtttggaatggaattcaatggattggataggggtataaagaggatgcaacgtatgctctacttgcgttgttgtagcttcggataagcctcaagcctaatcactgatacgagtgacagcattttcctg

SEQ ID NO: 33921 - DNA, 1694 bp, Zea mays
  Clone ID: UC-ZMFLMO17186G04_FLI
aattctctcccgctctcccctctgctgcaagtctgcaaccgcagcagcacgtccatttcacgtgccctttcctccctccctttcccctgcccccacgccacctccgttcgccgccgcccgccgcgccggcgatggcgatgaccgaagggcttgtgcctattacgcggacctacctcgcgcgctactacgacaagtacccgctgcccccgctgcccgacgccactacggacctcgccgcccggctccgtgctctctccgccgacctcgctgccgttgctcccatcgccccagatgaggagctcttggaacaagaagcagctggcatacctgcccacaaaattgatgagaatttgtggaagaaccgagaacaaatggaagaaattcttttcttgattaacacatcccatcgtcctgtggctcttcaacagaagtccaccccagaagatgctgagatagtttgtacacttgatgatatagaagctaaattgaaggatatgttgaagaacttagaacaatttcagttgaaaaatgctgacaatgttttcaatacagttatgacatacatgccccaagattttcggggtactctaatcaggcaacagcgagaacgctcagagagaaataagcaagcagaggtagatgctctggttagtgctggtggaagcattcatgatcgatatgcattgttatggaaacagcaaatggaaaggagggtgcaattagcacagcttggttctgcaacaggtgtatataagactcttgttaggtatttggtcggtgttccacaggttttattggattttattcgacaaataaatgacgataatgggcctatggaagaacaaagagaacgttatggtccagccctttacacccttacaaaactggtgcttgcaattcggttgtatttgcatgtctctttggcacgatatggacaaaggaaaatagagaaggatgacgctgctgtgttgcagcaagctgtggttatctacaccaaggagtttttgaagttcactgaattcattggtgaggtctttgtgaatgcaccattctttatatctgctgaggatgcaggtgccgtggatgcaaggaaaagtgatgagtacaaagaaactattattccagctggaaagacacatgaggtcattttgagtgttgaagctgtaaactcatacatcgcatgggacttttccttgcaacaaggggccctcaacatggacattggctttcatgtggagtacattagcccttcaggggagaaaactttaattcttccataccgacgatatgaagctgaccaaggtaatttttgcactgtttcatcgggatcatacaaacttgtgtgggacaattcatattcttcattcttcaaaaaggtccttcggtacaaggtggatgctgtgccaccggttgttgagccggccttgtcagccacggaactctgaagaggtctgtcttaatataatgatgtaacgagggccgatgcatgcccgagtatagctgtacaaatgtttctgaaggccccacacggtgctgttactgattattccatcgaatgctttgcggtgttctgatcgcagcattccctgatagctcgctgtcagagcgcatggatatgtactttgtgtgcacatggctgcggccacttgtcaccgacgaatgcctgaatataacagaaatgtattatatcgacc

SEQ ID NO: 33922 - DNA, 594 bp, Zea mays
  Clone ID: UC-ZMFLMO17186H06_FLI
cgttttcagcaattgagtacgtttttaatcacaatgcatgcactcctttgttttgaagttgcttatgacaagacgctgaggaacatgacaataagctagacagtttcttgctgtctgggtacaaaacaaacgaccaaagtaacatgactccagtagctcaacagcagaagaaaacagaagtcgtcagcctgaatggaccccatgaaagtcacgagtcctcccgcgctgccggcggggacggggcagcggatctagtgcttcccaccggtcctctccatctcctcgaggtgggcgaggtgggcgcgctcccagggcagattgacgaagtaggagaagatcatccctccgatgcagacgtggtagagagggtccggcgagctcgtgtcgatgtacttctgttttcttctgctgttgagctactggagtcatgttactttggtcgtttgttttgtacccagacagcaagaaactgtctagcttattgtcatgttcctcagcgtcttgtcataagcaacttcaaaacaaaggagtgcatgcattgtgattaaaaacgttttcagcaattgagtacgaatattttctctttttttttgt

SEQ ID NO: 33923 - DNA, 1173 bp, Zea mays
  Clone ID: UC-ZMFLMO17186H07_FLI
caagctcaagtttaggggttttgtgatttccgactgggagggcattgatcggatcactactcctcctcacgccaactactcttactcaattgaggctggtgttggtgctggaattgacatgatcatggttccattcagatacacagaattcatcgacgatctgacgacacaagttcagaacaaggtaatccccatgagcagaatcgacgacgccgtctacaggatccttcgtgtcaagttcacaatgggtctgttcgagaacccttaccccgactctagcctcgccggcgagctcgggaagcaagaacaccgggaactggcgcgcgaagccgtcaggaaatccctggttctcctgaagaacggcaagtcctcctacgctccgttgctgcccctcccgaagaaggccggcaagatcctggtcgccggcagccacgccaacgacctgggcaaccagtgcggggggtggacgatcacgtggcaaggaagcagcggcaacaccactgccggcacgacgatcctctccgggatcgaggccaccgtggaccccagcacgcaggtggtgtactcggagagcccggacagcggcgtgctggccgacaagtacgactacgcgatcgtggtggtcggtgagccgccatacgcggagacgttcggcgacaacctgaacctgacgatcccggcgcccgggccgagcgtgatccagtcggtgtgcggggccgccaagtgcgtagtggtcctcatctccggcaggccgctggtggtggagccgtacctgggcgacatggacgcgctggtggcggcgtggctgccggggtcggaggggcagggcgtggcggacgtgctgttcggcgactacgggttcacggggaagctgccgcggacgtggttcaagtcggtggaccagctgcccatgaacgtgggcgacgcgcactacgacccgctcttcccgttcggcttcggactcaccaccaagggcacgaagtgagtgagtgtgaggcgctctgatgggatgtggcctgtgagtgagctgtgtattcgtgggcgggcgtgaggctctttggctttcgaattggttgggggtgacgggcggcgagtcgtgtacgccgcacacattgcgcagcgtacgttgggttgggatgtttgcgtctgggtaataacagtgatgcattcttg

SEQ ID NO: 33924 - DNA, 1694 bp, Zea mays
  Clone ID: UC-ZMFLMO17187A03_FLI
cagtattagagtcactaacagtgaaatcaaatatgctagcaaaaattcctgagtgtggatcttatggaatacaccatgcaggctcctcaagttcagcagagcctgaacaagtgcatcaagctgaacctaaagtgagcagaagacaagcagatggacatcctgtggcttatggtatatttaactccgtggatgtggatggcaaacctccggctttggttagttctgacagtagctcgtgtgttcctctgagcagccatgacaaggaacatcaaacctcttccttgtatcggggtgtagtgcagtatactgcagatagagaagatgatgaaaattcttctgggtgcacgcatccaagcaccatagaaaataagggttgcaaaccacaatatctaggtaaccataggataaggaaattgcttgcctcgaaggtaaggaaggcagcacgtaataagatttgtggagggattccatcaaaaaagatctgtggagggttgtcaaaaaaaggtagcaagctaaacttatgtgggaaaaagatgtccaccacacaccaaaaggtgcaaagaatgattttcaaaaagaaaaagctagcgcaccgtacatcttttgctaaggagatgctaactgaagctagtgggacatcatttgctatggaaggtcaaaataaatcatgtgaagctgagaattaccatgttaagctaagaatcaagtcattcaacatcccagaattgttcattaaggtcccagaaaatgcaaccattggatcactgaagagagctgttatggatgttgtcaatagtataatggaaggcgacctacgcgttggtgttcttcttcaaggaaaagatatccaagacgacaacaagacactttgtcaggctgggatatgccacgataaaaagctaaataacatagacttcacgctggagtgcgagcgtgagcgtgagcctccctctggagtcattatacaagaacagatggatttcctcaccacagatatggtggagccattagctaggatgaagtgtgaggaaccttttcctgaagccgacgtcggagatgacagccagcagcctagagcgccttatcgaagccgctctctctctgacctgtactctgtccattgtcctgttcagatggcttcccaggacacgtcggtgagctcccaggccatcgtccctgtttcgcctgcgccttcagacgtgggcgctctagccattgtgcccctttgtaagtccaaggggtctgaagtcgggcagaggcgcatgaggagacccttcactgtcggcgaggttgaggcgctggtgggagcggttgagcagcttgggactggaaggtggagagctgttaaaacgcttgcattcgacagtatagatcaccggacctacgtcgacctcaaggacaagtggaagaccctggttcacactgcgagcatatccccgcagcaacgaagagggcagccggttccacaagaacttctagaccgtgtcctcctagcgcaggcctactggtcccagcagcagcagcaggcgaggctctaggacaagccccgcggcaaggctcctcttcttcctgagatctgctttccctaggagaagggcaagcttgtacttgtgtaaatactgtgcgtaatagaaaacgaggtagaaggggtgtccaaaggaaccagattagtttgtgtgttattgcatactcac

SEQ ID NO: 33925 - DNA, 1470 bp, Zea mays
  Clone ID: UC-ZMFLMO17187B06_FLI
ttccaagtacgtggaaccttctgagacggctatcctacgtgtacgctagcctccaaacttcaaagcgcgtctctgcagggctcgcacgtgctctttttccctcctcaccccgaattaacaatcgcgaaatcccaggtttgacctttcccccagccttgttgttccagtgggacccactacacccatgtcccttcttcctcgcacacgcgggacactgcacctgatcctctcaagccctcaacacgccaatttgaccacgtgaccgtaatcttgatccacgccctccttgcacttgcaccgcaccggtgcctatttaacccgcgctcgaacaactctctgccggcaacgcaaccaaaccgctctcgctctcggctctcggctctccaccagtctccgctctctggacgccggaaatgcagatggactcctacaactacaactacgccagtttcttccacgacgaggctccgtccttctacccgcacgttgcggtgccgccctccccggagctgcccatcggcctcattgcctcgccaggggagccggagccgcccttcgcgccgccgatgccggcctcgttccaggactacacgggcgccgtgggcgtgggcgtaggggtgagagcgccgttcgggggtgccagcgtgcacgggcaggcgatcgacgcgctgggcgggggcgacgggcagcgcgagcagagcatggcaatggcggaggacggggaagagccggcgccccggcggcggcagccggcgggaggccccgccgccgccgccgtcgagagcagccgcgggttccggcacatgatgcgggagcggcagcggcgcgagaagctgagccagagctacgccgacctgcacgcgctggtggcggcccggtccaggggcgacaagaactccatcgtgcaggccgccgccgtgtacatccacgagctgaggggcgcgcgggaccagctgcagcgccggaacgaggagctcaaggcccgcatcctgggccacgacgccgggcagcagtgcgtcaaggtgcagttcgaggtggacgagccggcgtccgccatcgactccatgatcggggcgctcaggcgcctcaagggcatggacgtcagggccaggggcatccgctccagcctgtccgggcgcaggctgtggacggagatgaatgtggagaccacgatggcggccgacgaggtggaaaggggcgtggaggaggctctgctgcaggaagtggaaaggaagcagcagcagcagcttggagctgggagcgccgcccctggttttccaggcccgtcatcgcacgtgcaaaacgtgttttgacacgcgatcctcccccacaacaagaagccaaaaagaaacatgaaccccgagcctcatttcttgattctttttttttaagaaccggatgcgcaaaacgagcatccgcgtccctggctctattgatttgtttttaagtagaaatcggtgctgtttgtgt

SEQ ID NO: 33926 - DNA, 1737 bp, Zea mays
  Clone ID: UC-ZMFLMO17187C06_FLI
gcggcacggtggccaggaacaccttgccggcctgggtgctgaggaacacgcgggcggacccgtccgggtgcgccgccatgttgaggtaggagccgatgcagacgcgctccaggaacatgccgcggagcggcagcgccgccgggcgggtggagttgaacgccgctccgccgccgtccaggcacggcgagccgcagaactcgcccgcggactgccacagggtaacggatgtagagacgacgtgagtatcactggtttaatcatagacgttaccttgtaatggcgtgatcatgttcattttggagtgtgggtagtcctctagttttttataacagcgaatccctcgcctacgcccccaaatcgtcgaagccgcacctaaggacctctataatggcaaatttctctctatcagtggagcaaccacggaggctgtcggaggacctccactgttacatacatactacttggcaggctgaagccccaagtttcctgcgcctgttctagctagttggcgaagaaagatgtcgttccgcagcatcgtccgcgacgtccgagacagcatcggcagcctgtcgaggcgcagcttcgaggtgactgctgcagccgccgccggcggcctctccggacgcaccgccgcgcaacatcgcagggggaggtctcagagcacggtgcacgagctccgggacacgggtgtcgtggtccagcaggacgagagccgctgggccagcctccctcccgagctcctccgcgacgtggtccggaggctggaggccagcgagagcgcctggccgaaccgcaagcacgtcgtgtcctgcgccgccgtctgccgcgcgtggagggagatgtgccgggagatcgtgctcagcccggaggtctgcgggaagcttaccttcccggtctctctcaagcagcctgggcctcgagacgggatgattcagtgtttcataaagcgcgataaatccaagtccacgtatcgtctctacttgtgcctgagtactgctgtgctcatggagaacggcaagttcctcttatcagctaaaaggagccgcagaacaacctgcacgcagtatatcatctcgatggacgccgacaacatatcgagatctagcagcacgtacatcggaaagctgaggtcaaacttcctgggcacgaagttcgtggtctcagacacgcagccgcccccatacagatacagcggggctgcaccccctccccctcgtgctgctgggcggcgggcaagccggcggttcgactccaggaaggtctccccgaaggtgccgaccccggccggtgccggtggtggcagctacagcatagcccaggtgacgtacgagctgaacgtgctgagcacgagaggccccaggcggatgcactgcgtcatgcgctccataccggcgtccgcggtggagccgggcggcacggtccccggacagcccgagcggatcctgccccgggcgctgctggaggagcaggaggaggaggaggattcgtcgtcgttccgccgcaccggcaccggcaccacctccttctccaagtcgtcagcatccatcatggaccggtccgtggacttcggcggcagcagcagcagcagcttccgcgacttcagcagcgcccggttctctgacattgtcgacggaggcggcggcggagatggggagcaggatagggagaggccgctcgtgctccgcaacaaggccccgaggtggcacgagcagctgcagtgctggtgcctcaacttgc

SEQ ID NO: 33927 - DNA, 1545 bp, Zea mays
  Clone ID: UC-ZMFLMO17187D01_FLI
cgaaaatcgctgggccgttcgattcactcacctcactccacctcttgactgaagaagccgtctgcctgcctccgactcccgcgtctctctccaagtgatctccttccacctttgccgatcgcccgttgccaccggccgggcgatcctcgtgcttccacttccaccatggtctcctcctcctcctcgtcctccagcttcctcctcccgctgctactgctctgctcgcacctctccctcgcctcggcagagacggcgtcggcggcggcggacctcctcagcgaggcgcgcgcgccggggttcgccgcgtggctgcgcggcgtgcggcgccgcatccaccagcgccccgagctggccttccaggagttccgcaccagcgagctcgtgcgggccgagctcgacgcgatcggcgtcccgtaccggtggcccgtcgcccagaccggcgtcgtggccaccatcgcgggcgccgccgccggccccgtcgtcgcgctccgggccgacatggacgcgctccccgtgcaggagctggtggactgggaacacaagagccaggagagtgggaaaatgcacgcttgcggacacgacgtgcacacgacaatgcttctgggggctgccagaatactccaggatcgcaagagcgacctaatgggcaccgtgaagcttgtattccagccggcagaggagggccagggcggcgcgtactacgtgctgcaagaaggcgttcttgacgacgcgtcggccatattcggcttgcacgttgacccggccctccccgtcggcgtcgtttcgtccaggccaggacccttcgcggcgacgtccggtcggttcctggcgacggtcaccggtaaaggcgggcacgccgcgatgccccacgaatccatcgaccctgttgtagctgcagccactactgtcgtcagcctccagaagatcatctcccgggaaatcgatcccctgcagggcgcggttgtgtccgtcacttttctgaagggaggagaagcgtacaatgtcatcccagagaatgtggcctttggcggcaccatgaggagcatgacgaatgaaggtctatcgtatctcaagaagaggatcaaagagatcgtcgaaggacaggcagcggtgcaccactgcagtgccagcgtggacttcatggaggacacgatgaagccgtacccggccgtggtcaacgacgaagggatgtacgctcacgccaaggaggtggccgagggcctccttggggagaagaacgtcagggtgggtccccaggtgatgggcgcggaggacttcgggttctacgcgcagaggatggcgggcgccttcttcaccatcggggtcggcaacgcgagcaccatggcgaccatccattccacccactcgcctcacttcgtcgtcgacgaggacgtgcttcccgtcggagctgcgttccatgctgctgtggcgattgaatatgtcaggaagaaccgtgcgtccacctaaactcaaataaatcagacggaacaaaacggcagtagtttgtcttaggtgtcactatatataatgcgagtatttacatct

SEQ ID NO: 33928 - DNA, 1613 bp, Zea mays
  Clone ID: UC-ZMFLMO17187F01_FLI
caaaaccaaaccccaccaccactccgcacgagatcatttcgccagctcatcgccaccgccctcctccgctcccgcgtctccttcccctcgtcgtcgtcgggttggtgggtccacctctcgccgtgccccgccgtcgacccgcctcagaatcaaagataagtcaaaggaaaggtcggtatgcgccggtggttttgctgcacgaggtttaatgcttcataccgtgaacatgaaaatgaacgtcccatcactccagaggagaaagaaggaaatggtttttctgttaaaagtgatcccatcaaggcaccaccttccattgaagtccctgaattatcatttgaagaattgaaagaaaagaccgacaattttggttcaaaggctttgattggtgaggggtcatatggaagagtatattatgctattctggacagcggaaaacatgttgctgttaaaaagcttgacgcttcaacagaccctgaacttgataatgagtttttgacacaggtatccattgcctcaaaactaaaacatgataattttgtggagatgcttggatattgtgtggaaggaaatcagcgtctagtggtctatgaatttgcgacaatgggttctctgcatgatatcttgcatggaagaaagggtgttccaggtgcacagcctggcccagcacttgattggatgcagcgggttaagattgctattgatgctgctaaagggctagagtatcttcatgaaaaggtgcagccttcaatagtccaccgggacatacggtctagcaatattcttctgtttgaggactacagagcgaaaattgcagatttcaatctttcgaatcagtctccagatatggctgctcgtttgcattctactcgtgtccttggaaccttcggctaccatgctcccgagtatgccatgactggccagctaactcagaagagtgatgtatatagctttggggttgttcttttagagcttctaacaggaaggaaaccagtagatcatacaatgcctagaggtcagcagagtctggttacatgggcaacacctagattgactgaggacacagttaaacaatgtgttgatccaagattgaagggagaatatcctccaaagggagttgccaagcttgcggctgtggcggcactgtgtgtgcaatatgaatctgaatttagacccagcatgagcatcgtagttaaggcactctctccccttcttcaacataaaccgcaaccaccggcagccactactgacgctacagcaccgtcagatgcctgactttctcaaggagctatgaatcatgaatgttaagagaaccattttctcttcggtgcgtgcgctgttctagatcactatcgtgtgcctatgaagtgatcagtgtcacacaagcaacagcattgtgggctaaagcatatctccacctttacttagcttggtacaggcaggagacttcccattgtcattaccgtgttctatgctgagtcatgtgctgctttcgttggccgggtgaggtgtgcttgttggccagcggtcgtgaccacctaattaccgtgttatggtcatcactgtaacatgcgaaggttctaatttttttttcatggtttgtttttcctcgtttt

SEQ ID NO: 33929 - DNA, 1178 bp, Zea mays
  Clone ID: UC-ZMFLMO17187F03_FLI
atctcgccctgcccgccgaagagcgcgcaagccccatctcgccctgcccgccgaagagcgcgcaagcaccaccgtcccggcagcgcggagatcggtccactccatccacgcggcgtcaggcgagcggggcgtacggacgctgcgaccgatggatctcaaggatagcctctccaaatttaagcaacagcaggagagatgtcagtcatcactggcgagcatagctgcttcgacctcaaagccaaagcacagggcccaaccagcgcatgctcctaacgtcccagcaagaccatcacaacctattaagttttcaaatgatacagaaaggctgcagcacatcaattcgattaggaaatctcctgttggagcacagatcaagcttgtcattgaacttctttacaagacaagacaagcttttactgcagagcagataaatgaagcaacttatgttgatattcacggtaataaagctgtctttgacagcttgagaaacaaccccaaagtaagctatgatgggaggcgtttctcttacaagtccaagcatgacctgaagggaaaagatcaactgcttgttttgattagaaagttcccagaaggtcttgctgttgtggaagtcaaggatgcatattcaaatgtattggaagatttgcaggctctgaaggctgctggtgaggtttggctgttatcaaacatggactcccaggaggacattgtatacccaaatgatccaaaagcaaagatcaaggttgatgatgacctgaagcaactcttccgtgaaatagagctgccacgtgacatggtcgacatagagaaggagctacagaaaaacggtttcaagcccatgacaaatactgccaaacgacgagcagctgcccagatcaatggcgtaaaacccaaggctaagcccaagaagaagcagcgtgagatcacaaaacggaccaagctcacgaatgcccatctgcctgagctgttccagaatcttaacacttaaacgtgctacagtatctgacgacggaagatggttcattttactcctatttattgctacgttgtgtgtatgtgttatgcagctatgctgtatggcttatggttatgagcgccacaaatttgtttgtcaagattctggatgatatacttatgcattctgacataataggaggcaaaacctcaagattttcctt

SEQ ID NO: 33930 - DNA, 2159 bp, Zea mays
  Clone ID: UC-ZMFLMO17188D02_FLI
gggatgttcgtcctgcgaatccagtccgtcgacttccccgacgccgccgtggcagcagtcgccgccgacgaagtcggcaccagcagcggcggcgttaccacctctcgtccgctctccagccaccctcccccctctaccaccacatcgtccatacttactctcgagctccccggcgcaaaccccgtcgcgcccagccgaagccctaggatcctccacacccgcggcgtcatccacctctaccactcgtcgtcctccacttccacctcctcctcctacgcctcggcggtcgcagccacctcttcctcctcatccgggccggccaccccgcagcccgcctccgactcgcacctgcccctatgtcgcggcacgcgcctcctggtgctcgccgttccgacgcgcgtttcgccggaggactttgttcgcttctgcggcccccacctcgagtgtgcagccgacattcgtttcatcagggatgatggagtggaggaccggtacagcgttctagtggagtttgaggaccagagtagcgctgaatggttctacgccgatctcaatggctggaggttctcaacctctgaggtgtcttatcttcttaattgaattctagtttattcgctgatcatatttgagatcgttgctaaattggcgattaactctcgtttccatggtgtagagtgaggtgtgccatgttctgtttatagctgctgtgcagtatacaccttcctcagaggttgccacaactccaccggctggatccactgaacttccaatgtgtcctgtttgcattggtgaacttactgttttgtattttttttttgtattttggggcctctgcaatacaatttatagtcatatgtacgtgtcaccatggtgtcacatttgaattcaatttgtgatctccgttgaagagatttaggcacctctgttctatcctggccatagttttaactttaaataccattctgtttgatgcaacagcaacccttcatctattattttcacttttcatattttgttggttgtttaagttgtctgccttgtttctggtacacctaactattttctgccatcttaatatgttaatttgtcagaaagattggatcaggacatcagtgggattttggcaactacttgtgatcactctttccgttgctcatgtgtttcagtgtggaccaattcatcctgtccggtatgccagttttgtcagaagcagtctgaaaattctacatgttctgtttgccaaaccactggaaacctctggatatgtgtgatatgtggttttgttggatgcggacggtatcaagaaggacatgcgaaacagcactggaaagatactcagcattgctattcgctagatttggaaacacaacgtgtttgggactatgttggtgacagttttgtacatcggctgaatcaatccaagagtgacgcaaagcatgctaagttcaaatcaaaaagtaaatattctggggatgaatgtgtaaactgctcgtgcaatgatgactctgatatgggtggagctatgttcagcagcaaagctgaaacaattgtggacgagtacaatcgtctcctggcaagccaacttgaaactcagagagagtattatgagggcctgttgtctgaggctaaaagaaacaaggagcaccagatttctgaagctgctgataaagctgtaagtgataagcttgaagagatgcaacttaagctcgagaatcttattgtggagaaaaagaaagttgcagatatgaacgaaaaactcactaggagccaagacatgtggcgccagacactaagagatatagaggaaagggaaagagcacagttgaagtcgaaggatgaaatgattctcgatctggaagaacagataaaggatttcaaattttccatcaaactgcagaagtcaatagagaagaacgatggtgtcaagggtggtacgctggttccactccctacggtttcagattctggaggcaagggtaaaaggtcatcaagaacaagcaagaggaggaattagtatcctttgctgagtagcaattagtcttgactggaacagacgtatacgaaccttattggcatgtatttactagcctgttatgatgaactacagcgtgatgtttgatttgtcacgaaaattagtacgatcataaactgcttcgaag

SEQ ID NO: 33931 - DNA, 1393 bp, Zea mays
  Clone ID: UC-ZMFLMO17190A07_FLI
caagcgcactctagcaatggcttctgaggttgtccgccctagcgacgccgagctactaaaggcacaagccgacatatggcggctcagcctctcctacctcacgcccctgtcactgaggtgcgccgtggagcttggcatccctacggcgatctaccgccatggcggggctgcctcagccgctgagctggtcacggcgctgtctctcccctccactaagctgccgttcctccgccgcctgctgcggctcctcgccgcgtcgggcgtgttcaccgtcgacaagcagagctcggaggaggagcggtaccgcatcagccccgtgtcctacctcctggtggacggcatccctcacgaggaccacatgaaccacaccgctctggtgctcacctgcacctcgacgcgctacatcgaggcggggatagggctggcggagtggttcaagagggacgtggtcacgtcaccgttcgaggagctgcacggggcgactctgttccacgagagcatggggagcctcgacgcagatttccacgacatggcgagcgaggccttggacgcccacgacaacttcggcatcgagatagctatgcgggagttcagggacttgttcgaggggatccagtccatgacctactgctgcggtaacttcggtgatgacaagggtgccagggccattgtcaaagccttcccacacataaaatgcactgtgctggcccctcccaagatcattgccaccaaaccggccgatggagcgatgataaactatgtcgaaggtgacatgttcagtttcattccacctgctcaaactgtcgtgctaaagcttgtgctgcaccacctgaccgatgaggagtgcgtcaagctcctggctcaatgccggaaggcgattccttcacggaaggatggcgggaaagttataatcggtgatattatgattgaccactctgggcctatgctggaaactcacctcctgatggacatcggcatgatgaccatgacaaaaggacggcagagagatgaaaaagaatggagcgagctcttcaccaaagcagggttcagcgaatacaagatcctgaaggaatttggagctcgtgttgccttcgaagtctatccgtgagattgcacctggactatacatatatatttacatacatatatgtatgtgtgtgggtgccttgcgtggcttggcgtgatgatgtcataaataaagagggtgggtgtgcttgcggtattcatggatggccatggatctgagcacatgacgttggatgctttcttaaggctctcgtggatcttctatatttggaagaagctgtaaaataatatatcgccatctagtgttggcgttggcttgtatgtactttgtacctgctttgttattttgtgtaatatcgagtaacct

SEQ ID NO: 33932 - DNA, 1455 bp, Zea mays
  Clone ID: UC-ZMFLMO17190B11_FLI
tctgtgtgtgtggagatggaccccaagttccccccacccccaccgctaaacaaaacggagcccaccaccgcgacgaccaccaccacctcgaccgcgcagcagcagcagcagcagctggatcctaaggactaccagcagcagcagcagcagccggcgcagcacctgcaaatccaaatcgaccagtcgcagcaggacggaggcggcggagggaaggagcagcagcagctgcaggtggtggcgcagcccggggagaggaggcagcaggcgctcgcgcccaagcggagctccaacaaggaccgacacaccaaggtcgacggcaggggccggcggatccggatgcccgcgctctgcgccgcgcggatcttccagctcacgcgggaactcggccacaagtccgacggcgagaccgtccagtggctgctgcagcaggccgagccggccatcgtcgccgccaccggcacgggcaccataccggcgtccgcgctggcctccgtcgcgccctcgctcccgtcgcccacctccgggctcgccaggccgcaccaccacatgtgggcgccgtccgccggcttctcctcgccctccttcctgaactctgccgccgcgggcacgggcgatgccgccggtatcatgcagcggatggggatccccgcgggcttcgagctgccgggagcctccgccgccggagccaccctcggcgccggcggccacatcggctttgcgcccatgttcgctggacacgccgccgccatgccggggctcgagctcgggctatcgcaggacggccacatcggcgtgctcgccgcgcagtcgatcagccagttctaccaccaggtgggtgctgccgccgccggcggcggccagatgcagcacgcgcacgggcaccatcatcaccatcaccagcagcaggaggacggggaggacgaccgcgaggacggcgagtccgatgacgagtctgggcagtagtagtgtaaccgttcaaccttttgcgttgctgaatcttccctcaagttggaaggagagaaaagtgtatgcgtgcagccacgggatgcttctgctactcttggactgttgttggtcgagttctgatggatttttgtgttcatttttttctcgtgtggtatccaaactcaacggaggcctctcttgctgtgaggacttgcggattcgagatcatcctcagttcttcccacaatctcatggagtggatgatcgccacagccttctctccgacttccaggtgtatactagctgagaaaatgatggattggatcgatcacccttgagtgagtgccttatttgttattgcacagtgtgtagatattcaggtaattttgcagttagagaggtgttccttttattgtagtagtgatccacgttttaaaacaatcaaggtattctcctccacaggctgtctatgcaacgcaagtatagtacaattctagttcatgaccacgc

SEQ ID NO: 33933 - DNA, 1418 bp, Zea mays
  Clone ID: UC-ZMFLMO17190C01_FLI
ctccctgatcctcctttggcttcgcggttcatggcgatgtggagggccgccgctaggcagctggtcgaccgggcgctcggctcaagggccgcgcacacgtctacaggcagcaaaaagatagtcggggtgttctacaaggccggggagtatgccgacaagaaccccaacttcgtcggctgcgtcgagggtgcactcggcatccgcggctggctcgagtcgcagggccatcaatacattgtcaccgatgacaaggaaggccccaactgtgaactggagaagcacattgaagacatgcatgtcctgattaccaccccattccacccagcttatgtcactgcagagaggataaagaaggcgaagaatcttgagcttcttctcacggcaggaatcggctccgatcatattgatcttccagcagctgctgctgcgggcttaactgtggctgaggtcactggaagcaacactgtctctgtggcagaagatgagctcttgcgcattctgattctgctcaggaacttcttgcctgggtaccaacaggtagttcaaggcgaatggaacgtagcaggcattgcccatagagcttatgatcttgaaggaaaaactgttgggactgttggggctggtcgtattggcaggctcttgcttcagcgtcttaagccctttaactgcaacctgctttaccatgacagacttcagattgacccagagcttgagaaagaaattggggccaaatttgaggaggacctggatgctatgcttccaaagtgtgatgtgattgtgatcaacacacctcttacggagaaaacaagaggcatgtttaacaaagagaggattgcaaagatgaagaaaggtgtaattgttgtgaataatgctcgaggagcaatcatggatgctcaagcagtcgcagatgcatgttctagcggtcacattgctggatacggtggtgatgtgtggttcccacagccagcaccaaaggatcacccctggcgctacatgccaaaccatgccatgacccctcacatctctgggactacaattgatgcgcagctgcggtatgcggatggtgtgagggacatgctgaataggtatttcaagggcgaggacttccccgtgcagaactacatcgtcaaggaaggccagcttgccagtcagtaccagtgaccgcgcgagatgttgctgtgccgtgtaggcttttctggtgagaagctgcgaggaagaaactcctgttgcgtacttgcgttactgtatgagtagctctgagaaacctgtcagcggccacctgtaataaaagaatgccttgctggtatctcaccgtggagatcaataagtctctttttttttccttctctgtcactgaactgcatgcactgtctttttttcggctgtgacaacgcaaatggtaacgaactgcatgcgct

SEQ ID NO: 33934 - DNA, 621 bp, Zea mays
  Clone ID: UC-ZMFLMO17190C11_FLI
ccacgcgtacgatcattctggggacgtgtctggaatttgttcagggatgataaaggtgataaaagatttgcttcaatcagtgtgcaacctattatcccaggatggaattcttgccgaggaactgatacggctgtccccttgctattaaaaggattcctcatgaccgcaatattcttatttgtaatcagaagtaaactcaggtacactgggaagcgcattgaccgtccaactcaagctaaaatacctgctgagccagagtgaatttatgtcgtcttcatttctgaacgtttgcggcatcacagttttggtgatgatcataaatacgtaactttgccgcgcaaagcttcgtcctgggaaaagaattcggctttgcttgcagtgtatggtatccagacgcagcagtacaggttaacagaatatgggttgcttctcattagtcatttcttgattcattattccaatatgtagaagacacctgcagcaattccgagttttgacaaaagccacatgaaagacatgaagaaacatggccgtaggctaatgtacactgtatgtatcttgtctccacaaagttttgtaaccatcccggcttgatatcgtttaacgattttgttgcaacat

SEQ ID NO: 33935 - DNA, 946 bp, Zea mays
  Clone ID: UC-ZMFLMO17190D01_FLI
gtcctacgccacggccgtggcggcggcgcgcgcctacgacacggccgtgttctacctgcgcggacggtcggcgcggctcaacttccccgaggagatcccctcgttagggctggcggatggcgtggacgtgggggaccccgcgcgcgaccaggtcgccgccggaggcggaggcggcggcggatgcacgctgtccgcggcgtccatccggaagaaggccatcgaggtggggtcccgcgtggacgcgctccagaccggcatggtggtcccgccgccgcaccaccgcgagcgccataggcaccacaaccacctgccgcagctgcgggtgcacgcggaggagcagcaggaggaagaggagcagaagccgcagcggcctgcgtggagcgggcgcgtcaagaacccggatctgaaccgtgcgccgagccccgagagctccgacgccgagtgacaagcgagcgagagctgagcagcagccaccgcaaggcgaggttcaacgacgacgtccgttatcggttattcccaatcccacgacgcagcatgccgttgtcgtctccgtccgaccgtccccacgtacgtacgtacgtacgtacacgacgatccagctgaccctgccgcctgcctatcctatccgtcctcgacgacgaccggatggtcggcgggcgggagggagggcggtgcggcgagggttttgggtacgttgtggataagcacgagggcagcagcagcaggggcggcgtgcgcgggcaggcaggcgaagacggagggaggcggccacaagcggcggtctttccaaacgtcaaaaaggacagctgtaacagcgataagaaaaaacaagtcatcatcaccctcgtctcactactagttctactactgttcccgagagtagtagtaacgattagcactccactagcagtatgattattcgaatcggccttgcttgacagcgatt

SEQ ID NO: 33936 - DNA, 1469 bp, Zea mays
  Clone ID: UC-ZMFLMO17190F07_FLI
gtggctccatgaactcgctgtcaacaattctgttctggtgaaactgaacttttacatgacagaactcaaagtggagcctgctgatctggagcttcttgcaaagaactgtaaatcattgatttctttgaagatgggtgactgtgatctttcagatctgattgggtttttccaaacctccaaagcattgcaagaattcgccggaggtgccttttttgaagttggagagtacaccaagtacgaaaaggtcattttcccacctaggctatgcttcttagggggtcttaccttcatgggtaaaaacgagatgccagttatctttccgtattccacaatgcttaagaaactggacttgcagttcactttcctcaccactgaagaccactgtcagcttattgctaaatgccccaacctaagtgttctcgaggtgaggaatgtgattggggatagaggactagaagttgttgctgctacatgcaagaagctacgaaggctcagaattgagcgtggcgacgatgatcctggccaagaagagcagggaggagtctctcagataggtttgacagccgtagccgttggctgccgcgaactagagtacatagctgcctatgtatctgatatcacaaatggggcgctggaatccattggcactttctgcaagaatctctatgatttccggcttgttctacttgacaaacagaagaagataacagacctgccacttgacaacggcgtccgtgccctactgaggaactgcgtcaaacttcggaggtttgccttctacctgagaccgggagggctttcagacgtaggcctcggttacattggactatacagcgggaacatccaatacatgctgctcggcaacgttggtgaatctgacaacggattgatccagtttgcaacgggatgcaccaacctgcggaagctcgagctgaggggctgctgcttcagcgagcgagctctggcagtggccgtgctccagatgccctcgctgaggtacatatgggtgcaggggtacagagcctctcgaacgggccaggacctcatgctcatggccaggccgtactggaacattgaattcgcgcctcccagtcccgagagcgcttatcgggtgatggcagatggacagccttgtgttgacactcatgcccaggtccttgcgtattactcccttgctggaaggaggccggactgccctcagtggctggtgactttgcaccctgcgtcactgtaaatacgtcaagctgtcccgagtgtggtttttgtaccagctgcttgtgtaccgtaataaactctagtactgtagtggtggaggcgtagtgcaataaagttgcagttgttgcttgtactagtatctctaatcctaggaggatgttgccctgtgctttcttttccccggaattgtatctttgctccactgtaaatatcagaaatggcttactagagttttggctgtgctagatgagttg

SEQ ID NO: 33937 - DNA, 1361 bp, Zea mays
  Clone ID: UC-ZMFLMO17190H01_FLI
ttgtatgttccattagcacagactgaagcgcaactagaggatacagccatccattggtagcacacagggtcccacccacaagagaggcatggcggccacatcgtccctgaagagcagccttctcctcccgtctaccatcttcgacttcagtggcgcagccgcagccgtctccatctcaacgcagaagaggagatcacggggggcgagggtgcaggtctcagcggctgcggactccaagaacattctggtcatgggggggacaaggttcatcggggtcttcctgtccaggctccttgtcaaggagggccaccaggtcacattgttcaccaggggaaaggcacccataactcagcagctgccaggggagtccgacgcggagtacgcagacttctcctccaaggttctgcacttgaaaggtgacaggcaggacttcgaattcgtgaagacaagcttggctgccaatggatacgatgtggtttacgacatcaatggacgtgaggctgtgcaagttgagcccataattgaggccttgcctaacctgcaacagtacatctattgctcatcggcaggagtgtacctgaaatctgacattcttccgcactgtgaggttgacgcggtggaccccaagagccgtcacaagggcaagctggagacggagagcctgctgacctcgcgcggcgtgaactggacgtccatcaggcccgtgtacatctacggcccgctcaactacaaccccgtcgaggagtggtttttccaccgcctcaaggccggccgccccatccccatccccggcgccggcaaccagatcacgcagctcggccatgtcaaggatctggcaagagccttcaacctggtgctcgggaaccccaaggcgagcaagcagatcttcaacatctccggggccaagtatgtcaccttcgacggccttgcgcgggcatgcgcaaaggctggagggttccctgagccggagctcgtccactacaaccccaaggaattcgacttcggcaagaagaaggccttcccattcagagaccagcacttctttgcgtctgtggagaaggcgacgagcgaactcgggtggacgccggagtttgacctcgtcgaggggctcaccaactcgtacaacctcgacttcggccgcggcacgttccggaaggaggcggacttcaccacagacgacatgatcctcgacaagaagcttgccaccgtttgatgcatgtctcgggctagctgtacgtacgtacgttgctgagcggataaactatgtaggaatatgttgagcgggccggtgacgcgattagagaagggataaatgataccaaatcaaaatttgttgttaagtaaagtgagctcttagcttc

SEQ ID NO: 33938 - DNA, 473 bp, Zea mays
  Clone ID: UC-ZMFLMO17190H04_FLI
ggacagcacagcgcagcgcaagctcgatcaccacaccaaccagactcagaacatccagaactcagagcttctacttctagaacagaagaacatcgagatcagtcctcccctgcatcctccaccggcctcacctagatgagcacctcgtacaccgaggcgcagttcggctccttgttagacctgcccgccggagacgacctcacgtcctggttcacacacctgtgcggcgaggagcaggcggcggcgctgccggcgttccaggcgccggtggcgatggcggaccccaggaagaggagcgccgagtaccatctcctggaaggggaggcgtccggggtcaagaggcagcgctccccgaccagcagctcccgggagaacagcgccggcagcaatgacggcgactacgagcacacgtccgcagccgcagccgcagccgcagccgcagccgctgccggcggcggtggcggaggcagggg

SEQ ID NO: 33939 - DNA, 1789 bp, Zea mays
  Clone ID: UC-ZMFLMO17191G08_FLI
gaggcggagttccgtgcggcttctcatagggttcctgctaattcggctcaattggtgctcggcggtgggcgacaagggcgcggagaaagtaggcgtggctttcccggtggtggtgagcacctggccgttccgtgaggcggtcagagcggcgtggaaggtggtttcgaccggtgaaggatggggttcggccgtcgatgctgtcgtcgctggctgctccgcctgcgaggacctccgctgcgatggtacagttggtccaggtggaagtccagatgagaatggggaaaccactttagatgctcttgtcatgaatggggaaactgtcaggcaacaatggaaattggagctgtggcggccatgagatatgtgaaggatggaatcaaggcagcaaagttagtcatggagcacagcgagcatactctgctcgttggagagaaagcaacagcatttgcaatttcaatgggtcttccaggaccaactaacctcagttcaccagagtcaattgagaaatgggaaaagtggaaacagaaccactgccaaccaaacttctggaaaaatgttgatcctgtcggtaagtgtggtccataccatcctatcaatttagcctcagttgaagttgagggttctgtaaagaatgaggtagtggggagtcaaggtggtctctgccaggggtattttgaaagtgataatttactggagccaataaagtccaatttgaaggttgttaatcgccacaaccatgacacaatttctatggctgtgattgacaagatgggccacatagcagttgggacatcaaccaatggtgctacatttaaaattccaggaagggtgggcgatggaccaataccaggatcttcttcatatggtgatgatgaagttggggcttgtggagcaactggtgatggtgatattatgatgcgcttccttccatggtaatgaaaacataatttctgttgaaaatgacatttgaaaaaggatggctgagtgtgatgtctagcttgtcaattggaaccggattagttgctccaatctatgatttaatttgaaagaaagatgacagagttgtgctctgattattatgaacttctttttccctcatgtttattttttcaagtgtagcatcctagtacatgatggtatgcaatttcaatcatctttgggcaatcaattttaaacagtccctgatccaactgcaaacactaatgctggtaacagcatatgctagttgtttactctatcgtaactctatcgactcttgtgcacttcgtgccaatcttattataaattctgttgtagctaccaagtggtagagagcatgcgacaagggatggatcctcgagatgctgccacagatgctatatcgagaattgcccgcaaatacccagatttcatcggtgccgtatttgcagtcaacaaggaaggggtgcatgccggggcatgccacggatggacattccaatactccgtacggaattccagcatgcaagatgtggaggtcattacagtatatccttagcaatcgcaattcaacgaaaacaaaagtttgctttatcagcatgtttaaaaatgtcacggctgcccccctgttgatgttttaaaaatgttctgtgcggattatttcaatgttttcttaaagtcgattgttttgaaactagtagtactgtatgtaccaatctgaccttagttgttttttccctggaaagtgttgaatgtcttggaaagtcgaaaccttggatcttctctgttggagttggagttgattgtacagaagttagacttggatatagtc

SEQ ID NO: 33940 - DNA, 2531 bp, Zea mays
  Clone ID: UC-ZMFLMO17192A07_FLI
ccaattgaaaagcatattgacaaacttatggaagaacctgctgaccagataattgaaaaatcaattgaactacctactcaaaagataactgaaacaccaactgatgagccagctgaaaaaataaatgaaacaccaactggagaaccagctgaaaaaataatagaggcggcatctgaaaatacagaagggacaataaaaaatgcaaccgaagagacacatgaaatggcagttgaggaactaattgaagagccagaagaaactatttctgtttcatcaactgggctaaagcagggggaaaacacctcacttgttgaaggaagcagtgcagacgatgaggaagatcatttggagtgtgcagctactaatcttcagcctggcaatgacacttgccttgaaagggaagaggtactgaaccagaaggatctggtgaaactgcaagctgttatacgtggacatctagttagaaagcaggctttagaatctttacaatgtttgcttgcgattattaaaattcaagggttaatcagggctcatcaagcacaacattcaccaggaatgattcaggagactattgttcattcttcaggtgagaaattgcttcgcaatggatttgctctcaagctcatggacaacatgtcgacgtcaaaatccatttgcataaaatgtgatccttcagaatctgatgttacatgggaatggatggagaggtggacaaccttaattccaccaatcactgtggtgcacgtgccagagcataaagaaaatagtgagttgatgggtgaaactgtgaccgaacaagtgactgaacatgctcagtgtgatgaagacattgttgctttggactcagacatatgtttccccaagttggtggctgatgacgtgaaagaaacagtagagacatctgaatctagtaccttggaggctccagtgagtgttccagatgaaaccccaaagatggaaatgaaacatgatactgaatcagagttgatcgaaactactaatgttgacgctgagcaagtaactgaccaaaaggctgaaaatgatgtggacaaggcttttatgtccttgaatcaacaatatacccaagcagatgcatcgagggatccctgtccactttctgaaaaatttgaatcatccaaggaggacagtggcgatgcgtacaattctgagcagacactggagatggaaggtaaaaggtttgtggtgagaaagtcatgcaatccagcatttgctgctgcacaattgaaatttgaagagctgagtacaaattcgacagtcagcaggtccagcagcttgtcacatctggatggggcgagcaagtcaagggttcacgctcctagttcgcaagaagattgctcctcaaagcaagatggcacaggcatgccagatagatcggttggtcatgatactaaaatgattattgctgcatcagaatgtgggactgagatatcaatttcatccacactggactcaccagatagatcagaaggtgacggtggggagatcgtgttggagattggagctctggaaaatagaaactatgtcaccagcaaagctgataatgacttcaatactgtccatcccgaggtaaaaaatgctcctgaagtagaagcccagccgcagaagcaaatagaacagaacggccatgttcctgccctcgaaatagaagcccagccacaagacgagcttgttcaggaaccgcatgctgaaccggaaatgccaggtttgcatgaacgattggaaaaacctgtcgcatcttacgccacacctgaaggaactccaatgagccgaacgactatcactgaatctcaagaaacaccgtcaagtgaggtctctgttaataccaaaaagagcaggagcaaaaagcccaagccccatgcaagcaagaggtcgctggctagtcctggcagcgactcagtcggccggagcagcaccgacaacttctcaaaggaatcaaggcatcccaagagagagagctcaagcaaggctgctaaatccgaccacgtcgaacaagaacctcgcacgagcaacagcaacagcaacctgttgccaagctacatgcaatttacagaatctgcaagagccaaggcgtcgtcgtccccgaagatgagcccagatgtgcaggacagcaacccaaggaaaaggcactcgttgcccatgaccgacggcaagcatgactcgtcgcctcgcatgcagcgatcgtcgtcacatgctcagcaaaacgtcaagagcaacgggcctgctccacacagcgcgtctgacaggaagtggcatatctgatgggtaggccgagcagcgtattcgaatgtctagatggctttcttgtgatgaactcctgccttctccgcacactccatctaactcgtcaagttttttatttttccttgattcgtcgttggaatactgagtatagttggaagaagggcagcagctgcctcttgatatgtgtaaatttgttggttgtgtacttgtgttatgtcactgatgtggtttctgtgtgtaatatatgtcgctttgacttgtcatgcaac

SEQ ID NO: 33941 - DNA, 1254 bp, Zea mays
  Clone ID: UC-ZMFLMO17192F11_FLI
acgacagggttgggtaacgccgctcgccgccgccatacgcaggtgccgaggccttcgtcgatctcttagccgtcgacaagcacccaagagatgcaggatagaatgagacggcaggggcaatatggtgaagcggatattaactccatggttgctgcccagttgcatcactaccaggcacagcaaagggtacagaaacaccctgagaatagctacactggaagagatcctgcacaagcttctgcggagcatcagtacacttcccctaaggcaagacagagtcaatgggatcgaggtggaccaaatgcgccaagccaggttccatcatatgcatataacgaagcccaaggtgctggaggtgcgcaatccttttatgatgggcagagatctgatacaaaggttggtctagaaaagcagcccagcaaggagtctagggagcaacctcgtactgaacgaactgaaacaagatacgagaattataatcttcctcggacattcgaaggtcttgaacaaagtttccatgaagacattattttgctatccaaggaactacaggaggcagaggatgctgaaaattctagacacatggagagattgaaggatataaatacacagtaccaggagaaactattaacacttagagctcggcaagcgaactatagagatgagttcctgcgcaaggaatctctagcacgccagcagcaataccagcacgccagcatgagccattatgccagcaattccacggctggggagcagcatggttataacccaacggcagcaggcacgcctcctgttgctgctggaggtgcttatggtgaggctcatcggggttatgcttctggccagtatgaatcatttagcgatcgtccagattatccagagttccatgatgggggcagaggtcgtggtcgtagttctgagcagcgtgctcaataccctggtggtcgtgcttataattccggtggccggcgattctagatatgctttgaactttgaaggacgatctatcactctgtcaagcgagctcatatcacctgatgtcagtgtgctgtaccgtgctatactcgaccgagaaacctaagcgctcataaaacttgttctacaattcaggtgcatcgaactactttatggttttgctagagttcattctggttataattgtagaggaacgaaacgatgagagaacactgacttttccgtttctctgcaattcatgtaatatgatctcggaagcaataacatttcatcttctat

SEQ ID NO: 33942 - DNA, 1485 bp, Zea mays
  Clone ID: UC-ZMFLMO17192G05_FLI
cgacgcgccatcgcgcctccaccaccccgaccctgaccccgaactcgccgtcgcaacaggccaagacgcagcagtagaagcaccaccaccaccaccaccggcacacgaccccggcggcagcgagtgccggttctgcgagatgacgcggcagcaccagccgcagtgcgcgcggcggctgccgaagcgcatcatcctggtgcggcacggcgagagccagggcaacctggacatgtcggcctacaccaccacgcccgactaccgcatcccgctgacggcgctgggcgcggagcaggcgcgcgccgcggggcagcgcatccgcgacgtggtggcgggcagcggcaactggaaggtctacttctacgtgtccccctacgcgcgcacccgcgccacgctgcgcgagatcggccgcgccttcccgcgggaccgcgtcatcggcgcccgcgaggagtgccgcgtccgggagcaggacttcggcaacttccaggtggaggagcgcatgcgcgccgtcaaggagacgcgccagcgcttcggccgcttcttcttccgcttcccagagggcgagtccgccgccgacgtcttcgaccgcgtcgccagtacgatcatccgatccgagccgagccgattcagtccatcgtctccctcttctcttctcctccccacaccattatttattgacacaccaatcaacgaacccatgcgtttgcgcaggcttccttgagtcgctgtggcgggacatcgacatggggcggctggaccaggaccccagctgcgagacgaacctggtgatcgtctcccacggcctcacctcgcgggtgttcctgatgaagtggttcaagtggacggtggcccagttcgagcgcctcaacaacttcgacaactgcgagttcagggtcatgcagctgggccccggcggggagtactccctcctcgtccaccacacccaggaggagctccagcagtggggcatgtcgccggagatgatcgccgaccagcagtggcgcgcctccgccaaccgccgctgctgggccgaggagtgctcctccttcatcgacaccttcttcgaggagccctacggctcgtcggagacctcctcctcggacgaagacgaagcagaggacaaggaggaggagaccaagctgctggagcaactataactggtttcatccacatccaatccacccattcgcctcgtcctttgaaattctctccattggattggatcttataccatgtgggaagagcggagcagtgatgctgcattcagtcatcgctgatccctctcttattcgaaaacagtctgtagcatgttcataatagctattagctagaactagaaatgattcgagggcaatttcagaaaatgctaaagaaacatatgctgtatctcaaggttttagctctgacatgattctgtatgttcctagatataagaacgcatacattctctattcaaaataaaatgctcagaggagataaatttgtctc

SEQ ID NO: 33943 - DNA, 789 bp, Zea mays
  Clone ID: UC-ZMFLMO17192G12_FLI
cgctccgctccactccagtcggtcctactagtcctaccctccccgcctccccggcatcccttcgccatagcagcaccagacagcagagcaccaaacccacacttctttcacctcccctgccccctcctccattctccatcgcaatccgccgccgccgatggcgaggccgacgcgcgcgctcctgctcccgctcctcctgctcctggtgctggcccgcgcgtcgggcgacgtgccggcggcggcgtccctcggctgggacctccgcgtggtgggcgcgggagaggacgaggagttcggcttccctggcggggactccgtggcgtgccgggtgctgcagggcggcggctacctcagctacggcgcgctgcgcagggacaacgtgccctgctccgtccggggagcctcctactacaactgccgccccggcgggcaggctaacccctactcgcgcggctgctccgccatcacacgctgccgcggctgatctcggcgtccgccaataggaagaggaggttcatatccgtttatcctgcgccgttgttggctgatacggagaaaatcattcatctccctccctgcccctttaatcgattattggtacatgtacgctactctctctctctctctcttgttgattgattttgtttctcttgttgattgattttaacgagaatgattgtgttggttgtgggttatgactggagtatctctctctcgctccggtcctgtaaattccatgattttcgagcagctggtgtataaactacaaactgatgatgacgatttccc

SEQ ID NO: 33944 - DNA, 1913 bp, Zea mays
  Clone ID: UC-ZMFLMO17193B03_FLI
cctcaaggctcaagcgaaggcgagcgcgagagaaagctcaagccacttcccaacccgctcccccctcgccgcgatttcctcacatggcagcgctgcgtctccgcgagtcactcgagaggaacagcccctcctcctgcttctccgacccctgtccctgcgccgccaacacgcgccgcccctgttccgatctcgccgcccccgccgctgggcccttctcgtccctccgcgtccatcgcccctgctcctgatccggctctcttcttcctcccttctcgcgccgtagattgcagccgcggctctgattctgctcccgccgtttgtctcgcggtcgcgggttcctgggagcttctgggttctggctccgtccctaaccggtgttgccatggggaagagcaagaagagcaaggcccgcggcggcggggacgacctgatcgacagcagcgacgccgacagcgtcggctcgtcgtccaccgcgctgtcggatctctccatctcgtacgccaccgagcacgtcaactcgcaggagttcgtcctcgacaagtacatcgacgcgctctacgagaagaggggatctacaagagaggcagcattggttaaactcgttgatgccttcgaaagttttatgctccatggccttgtggagaacaggtatgccactttgctgagtcaattcaacaattctgtcaaaaagggatctactaaggagttttttctggcatctcatgccattgggttactggctattacacttggtgctgggaacagttcacatgaaataatggaggagtcacatccccaactgtgtagggtgcttcaagcttggtccgatgcatcaaagatgatacctagtcatctttgaaagccatgtgggatgtgattcatccaaaatctggttcaaatgtgggaactgttcggaaacctagacctcctgtgttagcagctgctgtatctgcatggacgtttcttttgactactgttggttcatggaggataaatactgatagttggaaagagcccattgcatttctctctactcttttggaagcagatgatcgtgctgttagaatggctgctggtgaagcattggttttgtgctttgagctaaatctgcttgatgtttcttcttgtgaggatggtgatgttaacacagggggaactggtggttctaagaacaagcttttcctggatatgcaagcattaaaagccaaaatatcaggtctggcctcgaatctctctgctgaggctggggggaaaggtgcagataagaagaaccttactgaccaaagagacttgtttcaacgaatcttagattttgtcaagtatggtgactgccctgaagaatcaatcaagattgctggaaaacgtgatgttttaagggtgtcatcgtggtctgaattaatccagttgaatttcttaaagcggttcctggggaaaggctttctgaagcatgtgcaggagaatggacttctccaggatatctttgacattaaggttgacaaaactgaaaccttgtcgtccactgataagaaaatttttaggtccgaagaggaaaaagaaagagctctgagattaaacaaggaacgtcgtctagcccaggtaaggaagaatgccgtcatgttggatgagtaacaaggtcacgaggaagggaaaacaacatcgatttctgtatctcatttcatccgggcctttgtctctgcctgtgtaaactattacaggcacatcccattgtctttgcctttgtctttaaggatactggagttttatagtgcatctaaccgatatgcaagttcgtgcatattgaacgttagtatgatttgtgggaatagttaagttgatttggagtttagtatagtaagaactaaggttgattaaatgtaacgtatgtatgaaatgtaatgtaagtgtaatgattt

SEQ ID NO: 33945 - DNA, 780 bp, Zea mays
  Clone ID: UC-ZMFLMO17193G07_FLI
agttgatcacaatcgcaatatggtcttcgatcgcactagagacaactgccaaatccttacaaaagaggttccaaatttgaaactgacaggtcctagccgtgctgttctgctggtggatcctgtgactattgaggctgacctgaaagttaaaggccgtactgaatctgaggataaacacttgagctttctagcagtgccattcttgatcacgatcccgctcgagtcatgcctgcgtacaagagatttcaccagcaagcttagcacgctgaggtttggtctcgcaattgttgttctctcagtggaggctacaattagtgtgcgagttcgtggtgggtcatggcctgatggtctccgtgcccagtttgctgcccacacggtgagtataggtcgtgaggaagttgtcttgcttgattctggggacgataaactgcctgtttctgatgatggcactatcacacttggtcgtcgagttgcatctgttgaagtgagtggggagctgaacgtttctgtcaaggcatggcaaggtggtgaagtctttacgcacagagagaggggtttcaaacctaaagaggcaggttggagttatggcactcttgacgttggcttctgccaaatggatgtatctgtggcctggtcgcttctttcgtcgtacggtgaaaatgaagctttgtaagagtcggtgttagccgtggtcgttgcttcgattctctagcatgtaatgataagttcacattgggatatgcttgctgttttgctgtaatgataagttcacattgggat

SEQ ID NO: 33946 - DNA, 2506 bp, Zea mays
  Clone ID: UC-ZMFLMO17193H09_FLI
cattgagagaagcacttgctcaagcacaatcttcaagaatagggctgattaggggaacttaattgagggctaaccctgttccacatgtatccattttctggtgttccctgaggccttatttcatgcctcgaagcacttgctcaagcacaatcttcaagaatcgggtcaaccgccagggcattgagagagtctctacatccagtgctgagacaaaaaatggaactttgggaagaaaatctcagtactgccgtgagcctcgaagtgttgggaataactgagaagttttcagttgctgcaggcgctcgaagcatcactactgattacgcgaagctagattgtgtaacatcaatcttaatgggtcttttatctaggaaccaatccttggctttttggaaggctttccttcctgtggtctacaatatatttaatgttcatggtgcaacactaatggcaagggagaatgaccgcttcttgaagcaaattgcttttcatcttttgcggcttgctgttttccgaaacgattcgattagaaaaagagctgttgttgggctgcagattcttgttaggaactcattcaactatttcaagaacactacaaggttaagggtcatgttgacaattactttgtccgagttgatgtccgacgtgcaagtaactcaaatgaaattcgatggttctcttgaagaaagtggtgaagctcggcgccttaggaaatcactggaggaaatggctgatgtgagaagcaaggatctgttaaaagattgtggcctccctgttactgcattggaggcggcccctgaaggctcctctgataataggtggtcttgggtagaggtgaaacatttgtctaaatgtctagtccaggcccttgatgctggtctggaacacgccctcctgggttctgtagtgactgtagacaggtatgcagctgccgagggtttctataaactagctatggcctatgcacccgttccagatcttcacattatgtggttgcttcatctgtgtgatgcacaccaggagatgcaatcatgggctgaagcagcacaatgtgcagttgctgtagctggcgtgatcatgcaggcacttgttggaaggaatgatgctgtgtggagcaaggagcatgttgcttcgctgcgcaagatttgccctattgtcaacactgatgtgagtgcagaagcatctgcagctgaagtcgagggatatggtgcatccaaattaacagtggactcagcggtcaaatatcttcaactagccaataaacttttcacacaagctgaactctaccatttttgtgcaagcattcaggaactcataattcctgtgtataaaagcagaagggcttatggacagctggccaaatgccacacatcgctcacaaacatctatgagtcaattcttgaacaggaggctagccctataccattcattgatgccacatactaccgagttggtttctatggtgagcgttttggcaagctcaataaaaaggagtatgtatttagagaaccacgggatgtacgtctcggtgatattatggagaagcttagtcatatatatgaggctaaaatagatggaagtcacactttacacataattccagactctagacaagtcaacgctgatgagttgcagcctggcttctgctatttacagatcactgctgttgatcctgtgatggaggatgaggacttgggtagcaggagggaaagaatattttctttatctactggtactgttcgtgcacgtgtttttgaccgttttcttttcgatacaccattcacaaaaaatggaaaaacacaaggtggtctagaagaccagtggaagaggcgtacagtgctccaaacagagggttcctttcccgctttggtgaaccgtctgccagttatcaaatctgaatctctggagttctctcctgtcgagaatgcgattggaatgatcgaaacaaggacagctgcattgagaaatgagctagaagaaccacggagttctgaaggtgatcaactcccaaggcttcagagcttgcaaaggatactccaaggaagtgtggctgtgcaggtcaacagtggggtattaagtgtgtgcactgcattcttatctggtgagccagcgactaggctcagatcccaagaactgcagcagctcatcgctgcattgcttgaattcatggctgtctgcaagcgtgcaatccgtgtgcatttcagattgataggggaagaagaccaggaattccacacccaacttgtcaatgggttccagtcactcaccgctgagctatctcactatatccctgctatactctccgagctatgatagaactgtagcaagccagaaattaggtagcatgtcaatggttgttcattcattcagttgcaggttcccaccaaatgtccatatttccattagctttggttgtatagttctaggaaccggaaattaactagtcttcgaagttctgtaccgtattgcagaaccgattcctgattttggagtgtaaagtctgtat

SEQ ID NO: 33947 - DNA, 2239 bp, Zea mays
  Clone ID: UC-ZMFLMO17194E12_FLI
ttggagcttgcctgccggggcccgagctgctgccggtgctcgaagcgatgaagctggtgacgggggtggatttggagacggaggtggagctgtcgccgatcgccaaggccgaggaagcggccgtgtttagcccctactccagcccgagcaccgccttattgctgcagaggagagtcgtgtcctggtccacggagaccgggtctccggcgacggtccgcgtgcgcctcggcgacagaagcttcgacctgcacaaggaccctctggtgtccaagtgcaagtacttcagcgaggcgtcgctccagtccggcggcgacgtcgtcgagctgcccgccagctccccgggggtccgcgaggcgttcgagtcggtcgcgctcttctgctacggcgacgccgtggcgctggaccccttcaacgtcgcggcggtgcggtgcgcggcggagctcctgggcgtgggcggcctcggcgcgcgctgcgacctgtacatcagccaggtggtgctgcagagctgggacgacgcgctcatcgtgctgcagcgctgcctgcccctgctccccgccgccgaggagctcctcgtcgtcagccgctgcgtcgaggcgctggcgttcatggcgtgcatggagatcctcgacccggagcagcggcgggaccagctgcccggcgccggcggcgcggcctcgcgcgcgctggtcggccgccgctgggacgccgagctcgtcaaggagctcgccgcgcgcgacctctgggtcaaggacctgctcgcgctcccgttccagttcttcgagcggatcgtgcgggcgctgcggcgccagggcatgaaggagaagtacgtcggccccgtcgtcctgttctacgccaacaagtgggtgctctccaagaagacgcacaggttctgggcgaccacggacgacgacgccgtcgacggcgagaccgacgccaacaggagggccgccgcgatcctggagggcgtggtcgggctgctcccggccgagtcgccggcagtggctgcgaacggcgccatccccgtggcgttctacttcgccctgctgtcgcggtcgctcaccctggagctgagcgacgaaagccggacaaaactgcgaggacatgttgcgtcgaatttgcggttcgctcgcgtggacgacctgccgctgccggaggaagaagccgacgggcggtccatcgcagatagcagggaggtgagggcaatggagagcatcgtgtcaaaccatgcctccgtccaaaggaaaggcgtggaggccgtctccgagctgtgggatcggtacctcctgcagtttgctggcgatcccaagctccggccggaaaggctagcagagctgatcggagcaattccggcaagcgaccggaagacgcacgaccacttgtacgaagcaatcaacacatatttagtggagcaccggggcctgtccggggaggagaaggcgacgctgtgcggccacctggattgccggaagctgtcgcacgaggcgtgcgtccaggccgtgcagaacgagcggatgccgctccggctgatcgtgcaggcgctgttcgtgcagcagatgcacacgcaccgcgccttcacggagtgctccgactcgttccggtgcacgcgctcaggggagctcgtcccgggcgccggcgggtacacgccgagccccgggtgccccgccatccccaccagccagcccctgagcggcagcagcccgtacgacagccaccaccacgccccgcgcgacgccaagctccgcgcccgggacgacgcttcgtcggactacgagacggccagcttcaggatccaggcgctggagcaggagatcatctcgctgaaacggaccctgcagcggcacaacaccctgaggggctcggcctcggctcgcggggaaggcaaggagccgagcttcagggtcgccgcagacgcgggcgcgccggcgaccatcaagcgtcgagccacggtctccggcagctgcatcggctccatgcgctggggctcgcagcgccggtgcgccagcaggatcctgcgcgtcttcgcgaggctagccgtgttcgggaggggtaggtcgagggggaagcagagcaagtgcagcgcatcaacagagcggcagaattgcatgtagaacggtagaacagtacaagcacacgtgaagaggaaattgaatcatttactcgtggaatagagagggcaggtgttacggtagatttgggaagcatgtatgtaagcagtggttttgtgtgtaaatatgctagc

SEQ ID NO: 33948 - DNA, 1508 bp, Zea mays
  Clone ID: UC-ZMFLMO17194F08_FLI
tgttgcagctgcagctgtagctgatcgtttgcatgggtcaaaggaggaccggaagctggccattgttttggttggcctaccagctcgtggtaaaaccttcactgcagttaagcttacaaggtaccttcgttggttgggccatgaaactagacatttcaatgttgggaagtatcgccgtcttaagcttggagcaaatcagtctgcagattttttccgtgatgataatcctgaaggtattgaggcacgtaatgaggtggctgctttagcaatggaggacatgatagattggatgaatggtggaggtcaggttggtatatttgacgcaacaaacagcacacgaaagcgaagatatatgctaatgaaaatggctgaaggtaactgtaagattatatttttggagacaatatgtaatgatccaaacataattgaaagaaacatacggctgaagatccaacaaagtccagactatgctgaacagctagattatgaagctggactggaggacttcaaggaacgtttgattaattatgaaaaggtctacgagccagtaggggaaggttcttacatcaaaatgattgacatggtaaaggggcaagatggtcagttacaggtaaataatatcagcggttatctccctgggaggattgtcttcttcttggtgaactctcatcttacaccacgacctattttgcttaccaggcatggtgagagtttacataatgttagaggaagagtcggtggtgatacagttctaagtgaaactggcgaactttatgcaaagaaactagccaactttatagaaaagcggctcaaatgtgagaaaacagcaactatatggaccagtacccttcagagaacaattttgacagcaagtccaattgttggattccccaaggtatttggttacacgatttaggagtcttcttaaagaactgttgctatgtaagtacagcaagattgctcgacttgtgttatttgtagatacaatggcgtgctcttgatgagatcaattctggagtgtgtgatgggatgacttatgaagagataaagaaaatcatgcccgaggaatttgagtcacgaaagaaggacaagctaagataccgctacccccgtggagaatcttacctcgatgtgatacagaggctggaacccgtcatcatcgagctagaacgccagcgtgcaccagtggttgtcatatctcatcaggctgtactgcgagcactgtatgcatatttcgcggaccgtcctttgagagaagttccagagatagagatgccactacacaccataatcgagatacaaatgggcgtcacgggtgtggaagagaagaggtacaaactcatggactgaatgaatacataaaagcagctggttggctgtttcatacagcaagtacacataacacagaagccttttcccttctctctctctccacacggtgttcagtgtaatttctttggaaaaaagacatgttgaacattgtaaaggaaaaactaataaggaactgt

SEQ ID NO: 33949 - DNA, 1341 bp, Zea mays
  Clone ID: UC-ZMFLMO17194G11_FLI
atcaaaatcaagtaagatctgcagtggaaggtgtcaaagaagttatagttgcaagcactaacaggaggatagaacgaacagaaagggcaagggctgaggactttgattctgaagaagaggagctactcagagaagaaaacgaacaggaagatgaaatctttgaccaaattggtgattgtctaggcactctcgttaaaaccttcaagacttcttttattccgttcttcgatgaactctccatgtatttgacacctatgttgggtaagaataaatcaccagaagaaagaaggattgccatatgcatttttgatgatgttgctgagcattgccgtgaagcagcagttaggtattatgatacataccttccttctctattagaagcctgcatgagtgaaaatccagatgtcaggcaggctgcagtgtatggaattggcatttgtgccgaatgtggtggttctgcatttaggcctcacactggggaggccctatccagattatacaatgtaatcaaacatcctaatgccctggatttggataatgcaatggcctatgacaatgctgtttctgctcttggaaaaatatgccgatttcatcgtgatatcattgatgtatctcaggtaattcctgcctggttaagttgccttccgataaaaaatgatttaattgaggccaagcttgtccatgaacagctgtgtgtgatgcttgagcagtctgagagggagcttttgggtcataataatcagtatcttccaaagattgtgtctgtttttgcagagatattatgtgcgggcaaagatctagcaacagaacagactgccagcaggatggttaatctactaaggcaacttcaggcaacattgcctccttcagtattagcctcgacatggtcttctctacaaccacagcaacagctcgctctacagtccgtgttgtcgtcatagctaacctaaaatagcctcaactgtgtaaagcatatgagtcttcacagcttgacctttcgtgttctatttatgcgcttttgagccagagccagggttcctggggtttgctttcgcgttcatgtgcccttaggttttgtacaaggggcactgcttgcatccggtgtgtaatatcggctgcagttgcagaactgcacggatgtgtacgagactgggctctctccacatcgtcgattaagttgtaaagcagtatatcttgctcgcttagtaattttagttgggttgaaagaattgtaaattaaaacaattttggtagttgattttaatgtcgtatttcttataccatcagcatgggaaattttgtgttcaaaaaaagaagagaaaaagcagcttggttatcttg

SEQ ID NO: 33950 - DNA, 1760 bp, Zea mays
  Clone ID: UC-ZMFLMO17195B04_FLI
gttcgtcttggcgaccattccctcttcttgccgttgtgacgaagccgtcctgcaaagagaagaagaatacttcctatccgaagccattcaaggtgcgttcaacttcggatccggagccattcaaggtccaagagctgctactggctgtactgtatcaaatagctggtatttgacaattctccatcccactcccacctacccacgcccgcccacaggggccagggccacggcccacgggacgccggcgacgccaatacgggatggcctcgccggaactgcccggcgccaagcgtaacaacgtcctggtgccgccgtccccgcttttgcgcctcaacgatgacctcctcgccgatattttcctccgcctgcccaccctcgccgatgtagggcgcgccgccaccacctgcgcctccttccgccgcgtcgtcgccgacagcaccttcctgcgccgcctccgctccgtccacccggcgcccctcctcggcttactgctcttctcatcagtccacccggcggagccgccccacccctccgcgccctatgcgcgagctctgcagagggccgcagacctctccttctccttcgtcccctgcgccggccgctggatcccgatcgacgcccgcgacggccgcgtcctcctggagagcgagaccatgggcggcgactttgcggtgtgcgaccctgtgtcccggcgatacctctttctgccccgtatccccggacacccagccactcagcgctgccgccgtctggagccgttcctcgttcccgccagtaacgaggagccggagacgtcgctgagggtggtctgcgtggcagagcgcaaacctggacagctggtcgccttcgtcttctcttcggacaccgggcgatggggaagtctgaccgtggatgtcagggtgcctccctcttgcaaattttcgtggtcctcctacggtttcggcagctgctactggaaggtgactgggagtaacaaactccttgggctcgacacgcgttccatggtgttctcctctttcgatatcccgtctggttacggccagcaagattctgtcattgtggaggcagcggaaggcagattcagaatgttcactctccacaacagcatgatttctgctgcatcttacctggttcatgctgttcaggtaatccgcgaagaaggcaacaacctttggcaggttaagaggagagtcaggttgccatcccaatatattttcagctttgcagatgcaacggataagcacttactccttcgtgggattccatggaatttgcacctggagccttctactcctggtgctgatataggatacttctctgttgagtttgagtctatgcaggttgagaaaatttgtggcatcaggaatcttctatacgccaaactgtacactggttttccaccgtcattgtccctaccaagcatatgaagtggtggcttcacaacgtgaatgaactatgctggctattgacttcaatctggtggtttggaaaggaagcaaaggattcatgtatgaactacttcgagggcagggtcactaaggagtaaaaggacttgaggactgatgagcagttggatgatctgtttttcagtcttttaggacatgtttggatgcagccctggcctggacggcctgctgtcttaggcagctttcccgtgcctccatacaaacatgcccttattattttctcgtcataccaatatttccatgtgattctgcaacgttgcatcgtatcctggaaggctggaatgtttatttggt

SEQ ID NO: 33951 - DNA, 1667 bp, Zea mays
  Clone ID: UC-ZMFLMO17195B07_FLI
gcctcactctgtcgttcggccggcgaggaagccttggcctgccgaccaaaccatgctcgcgcgccgactcgcggcccccgacggcggtaggctgttctccgcggcgtcctccgcctccgcccgaggcggtcacgcgggtggcgacacactagggaagcgcctgctgaagctcatctacccgaagcggagcgcggtggtggtgctgcagcggtgggcggacgaaggccgcaccgtgcagaagtaccagctcaaccgcgtcgttagggagcttcggaagtacggtcgcttcaagcacgccctggagatatgcgagtggatgcggacccagccggagatgcggctgctgccgggggatcacgcggtgcaccttgacctcgtcgctaaggtcaggggactcgccagtgccaccaagttcttcgaggacatgccggagcgcgccaaggggccgtccacctgcaacgcgctgctgcattcatacgtacagaatggcgcaagagagaaggccgaggccatgctggcggagatggcccgtgttgggtacctcacctgtgccctgcccttcaaccacatgatgtcgctctacatggcgactggtgagctcgagcgggtgccagaaatgatcaaggagctaaggaggtacacactccccgacctcgtcacctacaacatatggctgacatactgctccaaaaaggacagcgtgaagagtgccgaaagggtatttggtctgatgaaggatgactgcgtggttcctgattggatgaccttcagcttgctcggtagcatttacatcaacgccggactccatgtcgaaggtcggaacgcgttggtggagatggagaagagggcctccaagaaggagcgagctgcttactcatcgctcctcaccctgtatgcaagcttgtcagatagaggtaacttggacagggtatggaataagatgagaggaaccttcaggaagttcagtgacacagagtacaagtgcatgctcacttccctcttgaggtttgacgacatagcagcagcagaaagcatttttagtgagtgggaatcaacatctggaacacgtgattcaaggatcccaaacacgatcctttcatattacatcaagaatggcatgataaaaaaggcagagagctttcttgaccacattgtggagaaaggagtcaagcccagctatagcacatgggaggcattcgtctggggttatcttggtgacaacaagacggacaaagtccttgagtgcatgaagaaagccctgtcatgcttggagaaatgggagccgaaccatgagctcgctaccgcgatcttttctcagatcgagaagacaggtgacattgaagctgcagagaagctcctggtcatattccgggatgcagagtatgttatcactgagatgtacaactcagtcttgcgcacttatgcagaggccaagctcatgcctctgatagttgacgaacgcatggagcaggataaggtggccatggatgtggaaaccaagagattgttgaggttgaccagcaaatatccaatcggtgaggtttcagtatcgatgtcttgaggtgtgccaacaatagaaggatgtttcaggatgcaatgtgtacttgcacttacgttttcatgcactttagttctgaagtacaatgcaatgcaaataacaaacattt

SEQ ID NO: 33952 - DNA, 1464 bp, Zea mays
  Clone ID: UC-ZMFLMO17195H12_FLI
atccgcgccccctcgcttagcctaaaccgcggggcagctagtctcgccaccgcaggccgcaccggtcatcacaccgaagcgcacgcggggagcccccgtagagttccggggcgaccaggccaactaacgccatgaaggaggaaggcggcggcggcggggacgcggggttcgtgcgggcggaccagatcgacctcaagagcctggacgagcagctggagcgccatctcacccgcgcctggaccatggagaagcgcaaggaggaggcctccgccggcgctggcgccggcgccaggcagcaccagcagtcccggcgcccgcggagggaggactgggagatcgaccccgccaagcttgtcgtcaagggcgtcatcgcccgcggcacctttggcaccgtccaccgcggcatctacgacgctcacgacgtcgcagtgaaactacttgattggggagaggatgggcatagatcagaacaagacattgcagcactaagagcagctttttcacaagaggtctctgtttggcataagcttgaccatccaaatgtaaccaagtttattggagctataatgggtgcaagggatctgaatattcaaacggaaaacggccacattggcatgccaactaatatctgctgtgtcgttgtggagtaccttcctggtggtgcactaaaatcatttctgataaagaacaggagaaagaagctagcttttaaggtcgttgttcaaatcgctcttgacctcgccaggggattaagctatctccattccaagaagattgtgcaccgtgatgtgaagactgaaaatatgcttcttgacaaaacgagaactgtgaagatcgctgattttggtgttgctcgccttgaagcttcaaatcccagtgacatgacgggcgaaactggaacgcttggttacatggcacctgaggttctcaatggaaatccctacaacaggaaatgcgatgtttacagcttcgggatctgtttgtgggagatatactgctgtgatatgccatatcctgacttaagcttctctgaggtcacgtctgcggttgtccgtcagaacctgaggccggagataccacgctgctgcccgagctctctatcgaacgtgatgaagcgctgctgggacgccaaccccgacaagcgacctgagatggccgaggcggtgtccatgctggaggcgatcgacacgtcgaagggtggaggcatgatccctgtggaccagcggccaggatgccttgcgtgcttccggcagtacagaggtccatgacagataggtggaaacctgttggagctgcggcctctagatctcgtgggtgccgatcgatcgcgtgttgttttctggggaaacaaactggttaatggagctagccccccttaccggctcgtgtaaatcctctgtccatcaattctgtaactgtaactctgttttatcgattaatgaaaagaaccgggcttgctcgcct

SEQ ID NO: 33953 - DNA, 2255 bp, Zea mays
  Clone ID: UC-ZMFLMO17197A02_FLI
tttgcgcctcgccgttgattgatgcgctcactcatctcacatctctagacaccaactccagcgcccccgtatggaacaacaactccaccctcactgtctggacagcaagattcattcacctgtcatatagtttcatcgatgaatctgaaacttttattgttcctgtgttgcccctatccaaaggtcatgttccttggatcaactgtaaggtgaaccttttatcctgatattatgatgtggttatgtattctattttctcaacagtaggagtacattctaaagatcataggttagaaatcttgcgccataagatagctgctaaagaaaatgaactaaaaggtcaaaagagacctttgttcgctgttgctacaaagaatgcagatttttcttccaatcagccaaggctgccatctgaaaagataaggcttgaagcttccagcagtggtgaatattcacgctttaatagtctgtctgaacatagtggaggaccaaataaatggttgaagctcaatcagcagtacaaccaattttgtagtgacctgacaccattggcacctattggttctatatcagaaaaaatcaatgtgcaatcttcagaagtgacaaatcggtctgaaaatggaattactatgaaccttaatgttaatgagacagatataatagacacaacagaacttgcagatcaaatacaacaaagtggggcaactaagagcctgcgtcaccacaaagattcaggaggtgctgaaaaccatgttatgcttgagtcacatgatgggcttgcagcacaaccaccatttatatttactgacacacaaactataccagaagatacaagtgcgttggcgcctatcacgtcagcccaagctaggcaacaggtactgtctattggtacttcacctgtgttagacggaacaccacaattgcaacctggaaaggagaatgacgaatgtttgaacaacagtggccagataggcgtagagacacagaacacaatattgttctctctacttgagatggaagaattacaagacaaggaattggaggatgctcaggagcatagacaaaaatgtgaatctgaagcttatcgcaaagcacaaagagctttacttgaggcaaatggaagatgtgcaattcttcgtagaaaaagggagatttgctcttcacaagaccatggtttaattgcagagaattcttctttggtgcaatctttgagtattcggaatcctgaagatggccttgcaatgccatcactgctcaattctcagattcatgtagttagtcagattcctgaaaatcagggtggtagacacaggctgtgtcctgaagaaccttctcagcagcaaattgataagcatgaagatgaagcacgtccacactattgtgataagcttgctgctagcacaactgatcccagctctgtgagtgttgtcaatgctgacagcatcctttcagattatatggaggatgatcttttattcccgactagacaggcaagatcagaatgtgctctggatgttgagaatcaaatggaagaaactatacatgtatatgcagaggaaaacagacaagtttctggtgacggtggtcaggattatgaacttttagaagcttctttgaggtctagatgtcgtcgtctctgaaccgaagcaagaacaagtcttgccccatatggctgctcgtgatcggcaaccgatgaccctaggcttgacggatgacaggtccactgcaagtgatcactgactttagtttcaagtcgtgtgcggtgtgtgtcgtcgctcgtcggtctgtcgcgccattcaatacaagaaccccctgtaaatcagactaataaataaatcagctgaaaggatcaaagggttcgagggaggctcttcaaaaattcataaacgtgttcgctcttcttctgtcagaggaaagaggccaatgctgtgtctataataaaaatcagcacatgggctcggaacatccaagccccgtcatacatatctcgacggtgtgatctgtagccgtttttccactgctcttcccagtaactctcagctaatggatgcaacagagtccttggaggagttgaagtagctagattactataaactctatcataatcccaactattctggtagattcaatatgactatttgaccactacattgggagttgttgcaaagtgcaatgtaataaataactttgtagctcaaattgtagcaattatgctacgactatatggtgagctgaaattgtcgctatttttgttt

SEQ ID NO: 33954 - DNA, 2115 bp, Zea mays
  Clone ID: UC-ZMFLMO17197B05_FLI
ctccctcccaaaaaaaaaactgctcggttgctgctcctgctccgccgcgccggcatcatgtgtggcatcttagccgtgctcggttgctccgactggtctcaggcaaagagggctcgcatcctcgcctgctccagaaggttgaagcacaggggccccgactggtcgggcctctaccagcacgagggcaacttcctggcgcagcagcggctcgccgtcgtctccccgctgtccggcgaccagccgctgttcaacgaggaccgcaccgtcgtggtggtggccaatggagagatctacaaccacaagaacgtccggaagcagttcaccggcacacacaacttcagcacgggcagtgactgcgaggtcatcatccccctgtacgagaagtacggcgagaacttcgtggacatgctggacggggtgttcgcgttcgtgctctacgacacccgcgacaggacctacgtggcggcgcgcgacgccatcggcgtcaacccgctctacatcggctggggcagtgacggttccgtctggatcgcgtccgagatgaaggcgctgaacgaggattgcgtgcgcttcgagatcttcccgccgggccacctctactccagcgccggcggcgggttccggcggtggtacaccccgcactggttccaggagcaggtgccccggacgccgtaccagccgctcgtcctcagagaggccttcgagaaggcggtcatcaagaggctcatgactgacgtcccgttcggggtcctcctctccggcggcctcgactcctcgctcgtcgcctccgtcaccaagcgccacctcgtcgagaccgaggccgccgagaagttcggcaccgagctccactcctttgtcgtcggcctcgagggctcccctgacctgaaggccgcacgagaggtcgctgactacctcggaaccatccatcacgagttccacttcaccgtacaggacggcatcgacgcgatcgaggaggtgatctaccacgacgagacgtacgacgtgacgacgatccgggccagcacgcccatgttcctgatggctcgcaagatcaagtcgctgggcgtgaagatggtgctgtccggggagggctccgacgagctcctgggcggctacctctacttccacttcgcccccaacaaggaggagttccacagggagacctgccgcaaggtgaaagccctgcaccagtacgactgcctgcgcgccaacaaggccacgtcggcgtggggcctggaggtccgcgtgccgttcctcgacaaggagttcatcaacgtcgccatgggcatggaccccgaatggaaaatgtacgacaagaacctgggccgcatcgagaagtgggtcatgaggaaggcgttcgacgacgacgagcacccttacctgcccaagcatattctctacaggcagaaagaacagttcagtgacggcgttggctacaactggatcgatggcctcaaatccttcactgaacagcaggtgacggatgagatgatgaacaacgccgcccagatgttcccctacaacacgcccgtcaacaaggaggcctactactaccggatgatattcgagaggctcttccctcaggactcggcgagggagacggtgccgtggggcccgagcatcgcctgcagcacgcccgcggccatcgagtgggtggagcagtggaaggcctccaacgacccctccggccgcttcatctcctcccacgactccgccgccaccgaccacaccggcggtaagccggcggtggccaacggcggcggccacggcgccgcgaacggcacggtcaacggcaaggacgtcgcagtcgcgatcgcggtctgacgagagtacgtgctcgcgcacctccctgctagcttctaccgggctgcagcctgcagcatgcactgtgcgagcacagccgatcagcgccaataaactggaggataagaacgactggtaggtgtgtgtgtgtgtcgtgcgtgcccaccggccatatcccggtgcggcagcacgtgctattgttacgtgttgtactgccgccagcgtacgtgtctgtgtgtctcgatcatatctgtacgtttttagatttagaagaaaaaaaaaaaggcatgtccgtgtctgtatgtctggatc

SEQ ID NO: 33955 - DNA, 2291 bp, Zea mays
  Clone ID: UC-ZMFLMO17197D01_FLI
cggatatcaaggatgacattggttccatcacttatggagataatactacctaccctggcggaaaaactttctgatggctgtaacccacttaagatcctaatatttagtggggaagttctgtctgtatcgctgtggaagagagtctatgaatttctgccagaggctactatcataaatctgtatggaacaacagaggtttccggtgactgtgcattctttgattgcaaaaaattgcctacaattttggagcaagaagaactaaacagtgtaccaattgggtttcctatttcaaattgtgaggtttctcttgtcaccaatgatggactatcagatgaaggtgaaatctctgtcagtggagcatgcttgtttactggatatttagctgatcccatgacaagtaactgccctgaaggcagtgaagttttagcatactacagaacaggtgactttgcccggcgcctaaagacaggcgaacttattttccttggaagaaaggaccgaattgttaaaatttatgggcaccgtttctcacttgaggaggtagaatccacattgagggatcatcctgatgtcagtgacgctgctgttacttttcaaagtaatggatctctggattttaaggcatacttggtgctgaggagtaataataaatttcttaaatgtactcagggttatagtggattacattcttcccgagatatcattgcaccacttcgaaactggctcatcatgaagtttccactagctatggtcccaaggctttttatccccatgaaatcattacctttgactttgtcaggaaagattgactatgtcaagttatctagcttggtttgtgcatttgagccttgtgaaattcatccagaaagcagtccagctgatcctcatatgcaagttatcaaaaaggcattttctgatgccctactggttcatgaagtgtctgagtatgatgatttcttctccttgggtggtaactcaattactgcagcacatgtggcccacaaattggagattgacatgagattactttatatttataccttcccgtgatggcaacttgtactcttttgatactgtgtctggtgcccttctttgggtatacaaggctggggatccaattactgcatccacttttgttgatgagctgttaacatcagtgtccatgtcatcagaattagagtagacatcagaactagagtagatgctaagtacaatcaggagcaaggtggtgacggtgttaaatctgaggagttagttcaaggactggatgctaagtacaatcaggagcaagctggtgaaggtgctaaatctgaggagttagttcaaggactggcatccattgatcttccgggggacatattttcgtctcccttgatggttggtggacgcatctttgttggatgccgagatgatcgattacattgtctcaccgtcaccacatagtttcaagtgattttgctggaggtgatatagttttgcccatgcctgctgcccgacaacctctcttccgcgacaagggcctttggcctttcctattggtaaggtgcgtggcaggctggcagcacaacacaggccacgaatgagtttggttgaagctcctgattgcatttggtgatttgggtctccaatgattgctttccatgtctacacaagaagctttccacagcctgctctcgcctaagcaagtgctacttgatgtcttgatcaaagtgagtggaaacctctcaacctcacattctccttgcagcatctgtattcagcccatgtggaacctttgccactgtcctgcaaggctggtcagtcatgccgctgttcccttcagtggaaattaactgataggaagaccagtgatttgcggagactgtaaaaattgttccacatagatctatactatttcctaaaaggagtttatgacagggacaatattctccaagaaatggttcgagtcgatccagcttcctgcaccagaaatgtactagtctctaggagtagaagttttttctttgcattaggtttcatgtttttttacttaccttgcatgcttccagaactctcgctgggaatgcacacatttttcatttcctttggctattagtagggatgccaatggagaattccccgtcgggttttggctccactatagaaaacgatccccgcggggatccctacgaactcttcctaattccccgttctctcgcggggataaattcccgtcggggatctctgtccccgtttaaattataatcatgatatacttttttttgttatgaatacaaaatattgtcacttgt

SEQ ID NO: 33956 - DNA, 638 bp, Zea mays
  Clone ID: UC-ZMFLMO17197F03_FLI
tgcaaatcagaatggtggcatggtcttggtagcttttctttctcagatttgattatacttgggtagattcaaaaggcacatttctcagattcaaaaggcacatttcaggttgatttcagcaatgataattccattatctggacatctgattaagaagttcagggatgcacttgcaaagcacaaagcagataaatgtagccttggcccaacttggggactagaatcagaactgttggccctggctgcaaacaaggatgtccaaggagacactactggtttcaagcatggaagacttcgcggaggtcaggaccgctgacaagccaaggcttctgacatcactgaagctataggcaatatagggatctgatgacatgcgagagatgaaatgtggtgatcgccacttcctttattctcgtgcagttcttcactattctttgtgtgtatagtttgtttgttcctcttcatagtcgtggagtgtaagcttccagattttttacttgtgaagtctgcccacactggctgctagaaatgaaaaaatgtgttagcagtagcagcaacaagcgttgtgggcgtttgatcttctagaagtcgtgtggtggttgtatgaatctatctaccccggtaatgttgcatttcat

SEQ ID NO: 33957 - DNA, 1778 bp, Zea mays
  Clone ID: UC-ZMFLMO17197F11_FLI
aacacggtggacactgcagcatcagggaaaaataattttggtggcgaactttgctgttcttcatcagatccaatccatgtgccctctcctggttctaaatcagctggaacttttggagccataaagcgtgaagttggagtagttggtgctaggcaaaggccagctgatagtgcagcaatatacacatctacttctaatggcttagtcaaagtggtatcagcaccaaaggttagcccacatttggaatggaagcccaaatcagtaagccccagcactgctgcacctcctggtgctccatcacctgttgatgatggaagtaaaacagaagtgtctgctttgtctaagaagctttcacatgctaatgtatcacatgaacatgtcattataccggagcacatcaggataccagattctgaaagaactcatttcatcttcggttcttttgaatctgaaatttatccaaaggcttctttagcagcctattatgatgctgtggctaaagaagacttgaatgatcactctccatcaaggatggataatgttggttcctgcagtccacttccacagtcagagcctgctgtttcagtttctgaacatgagcagtcattgacggagtgtgtggatgttcggagccctggtgttgtcggtggaacaaatgagacgatttcaagcaaggtaacacattctcaacctcgactccagcatcaggaagctgcacagaattttaaggcatatgagccagattctggttatgggatgtcatttattactaaagttgatggtgaagcagcccaaggtatagcttattcatctgaggctatggttttacattctgtaaatggctatcagttacctgcatctacagcaactcaacaaccagtgccccagatgttttctcaacaattccaagcacctcagtatccaaactttttgccatatcggcatgttttctcaccacagtttgggtctctaatggttgttccaaactattcaagcaaccatgcatttcctcagttgccacatgccagcagctatctggtaatgccaaatggagcctcacaactagctgccaatggcatgaaatatggatcaaaccatcagtataagcaagtatttcaaggagcccctgctggatatggctacggaaatcataatggttaccctaacggtgttattggcggcacaggtgctattgaggatatgaatatgagtaaatataaggacaactgcctctatgcacccaatccacaggtggaaacagcagatgtatggattcaaagtcagaaagagagtcccaatatgccatctgcaccgttctacaatatggtgggacaaccagtgtctccacatgcagcatacttaccaccacaaagtggccacactgccttcagtcccgccccttcccatcctggtcacttgcagtacccgggctttgtgcatgcactgcagccaacatccatgaccatggtgcagaacccgcagaccatgatacatcagccggctgcaccgccattggcaggaaatctaggcctggacatgtcggccatggttcctggaaatcaagtaggagcgtttcaacataaccagcttgcccatcttggctggaccacacaatccttttgagattttggtgtgcttctatggctggataagtgaaatttcggttccgtgtggatagaacctaattgaagtgatatgctgtaatatgcaggataggcctgatgaataccaggtttttctttgttttaattataaaaggggaaccgttttttcgtgcc

SEQ ID NO: 33958 - DNA, 1370 bp, Zea mays
  Clone ID: UC-ZMFLMO17197G01_FLI
gattctttggatgagatgcttttgggaagattccttgttggcatcgggatcggcgtaaacactgttcttgttccaatatacatctctgaggttgctccaacaaaatataggggcactttggggactctgtgtcaaattggaacatgtctaggcataattgctgcactttccttggggataccttctgagagtgatccacattggtggcgaacaatgctttatgctgcatgtgtacctgggattcttattgttgctgggatgcaatttgctgttgagagtccacggtggcttgccaaggttggaaggttcgatgatgctagaaaggttgtagagagcctttgggaaccttctgaagttgagaagtccatggaagagatcaaagctgttgtgctaaatgatgattcacggggcagctggtcagaccttctggtggaaccacataatagagttgcattgattggaggatcccttttctttctgcaacagtttgctggaataaatggtgttctttatttttcatcattgacattccgtgatgttggtatcactaatggtgctttagcaagcttatatgttggaataatcaattttggaggggcactagttgcttcaaatttgatggacaagcaagggcgaaagaagcttttgataggaagctaccttggaatggcttttgcaatgttccttatagtatatggtattagcttcccgcttgatgaaggagttgcccacagcttatcaatcgctggaactcttttgtacatttttacttttgcaattggtgctggaccagttaccggtatcattataccagagctcagcagtgctcggacacgctcaaaagttatgggcttcagtttcactgtgcattggatatgtaactttctggtgggactattttttctggagcttgtgaacaagtttggggttggagcagtctatgcaggttttggtggggtctccctgctgacagcactctttgcctacaatttcatagttgaaacaaaaggacgttcgcttgaggaaattgagatgtccttgagcagtgctacccctggcaagcaagagtagaacatctcaattgtatggacaaactgaacaactgacgggaggaatttaataagagcagagggggcctaatcccatgaatcttcagcagcagcagtttgttgcaaacaacatcaactcctatagataatgagcacaatcaaattcagcttttctttggtagcatgagaatcgttgtacaatattaaaaagggtgaagaaaatgcccctttaaatttgttttttttgtacatctgatgtatatattttagtattttacgccttctgtagtacgtaaaataaagggaacagatctttctgat

SEQ ID NO: 33959 - DNA, 1343 bp, Zea mays
  Clone ID: UC-ZMFLMO17197H11_FLI
ctctgttatagatgatgtcgctgaatacgaaataccatgggaagatcttgatattggagaacgtattggtttaggatcatttggggaagtttatcgtgcagactggaatggcacggaggttgcagtgaagaaatttcttgaccaggatttatcaggtgtttcactagagcaatttaaatgtgaagtgagaatcatgtcaaggctaaggcatcccaatgttgttcttttcttgggatatgtgacacaatcgcctaatctctctatattaactgagtacctcccaagggggagcctatatcgtctgttgcataggccaaatagtcgaattgatgaagtacggaggctaaaaatggcattagatgtggcaaaagggatgaactacctgcactctagccatcctaccattgttcaccgtgacctgaaatcccccaatcttttagtggataaaaattgggttgttaaggtgtctgactttggcatgtccaggttgaaacatcatacttttctttcctctaagtcaactgctggaacaccagagtggatggcacctgaggtactacgaaatgaaccatctaatgagaagtgtgatgtctacagctttggagtaatcctgtgggaactagcaaccatgcgtgtgccatggagtgggttgaatccaatgcaagttgtaggagcagttggattccagaacaggcgactagagatccccaaggatgtggatccacaggtggctagcataatatcttcatgttgggatagcgatccgagcaaaaggccgtcgttctcccagctcttgtcccctctaaagcaactacagcatctagttgttacagaaagctgctgacatgcgtttcctgggacaaatctcaggatacatatattcaagtatttaagctctgttacagggctaaaattttcttttttgaagctcgtggaggagtctctgcggtatagatgtgtttgggcgaaggttctgcacatcagtaatcaccttgtgaaaatgcgagtctctgaagctgtgcaaaggcgctgctggagaaagcgtagtgtgtagtctcaagtgaagaaaagtggtgcgacacaaagtgttctgtgccatggtaaataattgttcagttctggatttgcacgggtgataaattcaccacaaagataggatcttgaagttttttccccttgccttacaaaagatggaaagaaaagtgaaaaaaaatcacggtgtctgcaaaaagtcgcagcccgatgccacgtgaaaatgtatatgatgtaatacagttgctttgggaaggcaaacataaagttcacagttttgttcgataatggtgtgtttggttttcctttat

SEQ ID NO: 33960 - DNA, 1301 bp, Zea mays
  Clone ID: UC-ZMFLMO17198B04_FLI
cgatgcacaacaacaactgggccgtgctcgtgtgtacctcccgcttctggtttaattatcgacacatggcgaatacattgtccctatacaggactgttaagagattaggaatacctgatgagcgaatcatacttatgttggcggacgatatggcctgtaacccaaggaacagctatcctgcccaagttttcaataatgagaaccaccagctaaatctctatggtgacaatgttgaggtcgattatcgagggtatgaggtgacagttgaaaatttcttgagagttttgactggccgacatgaaagtgctgtaccaagatcgaagcgtcttcttagtgatgaaggaagtcatatacttttgtacatgactggacatggtggtgatgaatttttgaagttccaagattctgaagagcttcagagccatgacttagcagatgctgtgaagcaaatgaaggagaagcatagatttaaagagctgctgataatggtagatacctgccaagctgctactctcttttcacagcttcagtcacctggtgttttggcgattggtagtagcatgaagggtgaaaactcttattctcaccatcttgattcagatgtaggtgtttctgttgtggataggtttacctattatacacttgctttctttgagaaactgaacatgtatagcaatgcctcactgaacagccttttcacctcatacaatccttccatgctgttgtctactgcatattatcgaatggatctttatgaacgtcccttaaatgaggtgcctgtgacaaatttttttggatcagtcatgaagactctccacactgattcagcctacacaggtttcttggctgcgcatgacaatgaaactccaatgtccacgggagataaccttgatgatcatttcatgttaaagggcagggctatcgcacgaagatcaaccatagaaaaggaggcacaattaacaccgcatggatggactgaagttctggctgaacagctggagggaaagaatactgatactgttgtgatgtatggtctgggagctatgggtatactgttggcactttcaacctggttatcaatgtaggcaccaaaaaagtgtggttcgtagtctcttacgctatccatctctggtccgcgtgcgagagagagaaaagagataatatgtttgggaggtcttttagattttttctcttggtttttaaattcattaacgatgattagagttctttagaaaatgctgtatgtagttctttagggattactgtgttatcgttttatttatttaacatgatcttttggg

SEQ ID NO: 33961 - DNA, 1208 bp, Zea mays
  Clone ID: UC-ZMFLMO17198B06_FLI
cgtccacacgccaccgtaccagtcgagatcaagacggcaataatagacaagaacaaggtgcgtggcagtgcactcgacgatattaatggagctgctttgcacgggcggcagaaagccgtagacagagcagtgacggtcgtcgtacagatcacgatgctgctcccacactcttcgtcagcctctgcaactgctaccactcgtgggctagcactagcagcaccaccaccgccgccgccgaccgctcgcccccggcgcgcgcgcctcctgcctccacgcgcgcgggccgagacgcatgcggcgggcgttggcgccgaccgcgcggccgaggtgcttctccagagcgggctgcgccgtgagtcgctgccgcggcacgtcgcggtggtgatggacgggaactcgcggtgggcgcgcgagcgggggctgacgcccgcggacggccacaaggccgggggccgcaacctggagcgggtcgttgcgctgtcgcgcgcctggggcatccgcgcgctcaccgccttcgtctgctcccgcgagaacttgagccgccccaaggccgaggtcgactacatgatgggcttgtccgagtggctgataggcgataacatcgacaagctctcgaggcaggggatccggctgcaggtgatcggcgacgccgcgaagatgccagcctctctgcggagcgcagcggcgcaggccgacgaggccacgaggcacaactcgcagctgcacgtgatgctggccatctgctacagcgggcgatgggacatggtccaggcgtgccgggagctggcccgggaggcgcaggcgaaccggctcagtccggacgacatcgacgagtcggtcatcgccggcaagctcgcgacgagcgccgccggcgagttttcctgtcccgacctggtcatcagaaccagcggcgagatgaggctcagcaacttcttgctgtggcagtcggcgtactcggagttgttcttcaccggcaagatgtggcctgactttggggaggctgagtacctggaagcgttgcgctccttccagggcagagaccgccgcttcggccaatcaaaattactctaactcgatggagccacgaagaagtggagcgccactatatgttaagagttaggacttgttcggttagatctcatttcatttggattaagtgagattgaatgaatttaaattctgagtaagtcaaatttctttttaatttt

SEQ ID NO: 33962 - DNA, 987 bp, Zea mays
  Clone ID: UC-ZMFLMO17198B07_FLI
ctctcccagaccttccctccggccagcctcaatctcccgcgtgagctcctcgaacgcacctctctcgatccgactgacatggccggcgcccagtcctggaggacctacctgtgctgcgtgggcggcagcgcggcggtcgaggacgacggctcgacgctgcggcggcggcggaggcgcggctgcggcggcggcagcagcaaggacagcccgaggtcgtcgtcgtcgcggatgtcgctcacgagcctcggctcgtcgtcggagacgctctcccccgaggacctgtcgctgacgctgtccgggtccaacctgcacgccttcacgtacgccgagctgcgctccgccacggccagcttctcccgcgccaacttcctcggctgcggcgggttcggccccgtgtacaggggcgccgtcggcgaggccctccgcccgggcctgcgcgcgcaggacgtcgccgtcaagtacctcgacctggagggcggcgcgcaggggcacaaggagtggctggctgaggtgttcttcctcgggcaactgaggcacaagaacctggtgaagctcatcggctactgctacgaggccgagcaccggatgctggtgtacgagttcatgagcttcgggagcctggagaaccacctgttcaaaagtaccaacggcgccctcccatggatgacgaggatgaagatcgccgtcggcgcggccaagggcctcgccttcctccacgacgctgacccgcaggtgatctaccgcgacttcaaggcctccaacatcctgctcgactcggactacaacaccaagctgtccgacttcggtctggccaaggacgggccacagggcgacgagacgcacgtgacgacacgtgtcatggggacgcacgggtacgcggcgcccgagtacatcctgacgggccacctaaccgccaagagcgacgtgtacagcttcggcgtggtgcttctagagctgctctcgggccggcagtcggtggaccggtcg

SEQ ID NO: 33963 - DNA, 720 bp, Zea mays
  Clone ID: UC-ZMFLMO17198F01_FLI
gtttatatgatggttacgcagattacaaactggttccattcttgcccatgagatgatgcatgcatatcttcgtctcaaaggattccgaaaccttagtattgaggttgaagaaggcatctgccaagttttatcccacctgtggttagagtcggaaatcatcgctggttctagtagcaacgttgcatccagttcagaagcatcatcatcttcatcatcctcagctcctacctcttcaaagaagggtgcgaagaccgaattcgagaagaagcttggggcattcatcaagcaccagatcgaaacggattcttccgaggcatacggaggtggttttagagctggctatccggctgttgagcgctatggcttgaaaagaacccttgatcatatgaagttgacagggtctttcccatattaaagcaacagaagtaaaggagggggctttcttccagttgtgaggatacactccacattggaggttttggtttgggttatacatatactgatatgcataccaaacgaggggaattgtctgtaaatcaggagaaccctctgctgcgcggaaacttattgcaaactgtctttttataggaaaacgatacatgcaagttttcagacagggaacttgagaggatcatatgtaatttttgggcacttgtttttgactcctttggttatcaaaaacaaggcaacataataagattgaaatttatcttcatcttt

SEQ ID NO: 33964 - DNA, 1673 bp, Zea mays
  Clone ID: UC-ZMFLMO17198F02_FLI
ctcggttgtggccgtacagacgggcccgcagaagccgtctccgtcgtcgtcccaggccgccgcggcggaggatgaggcggatgcgctgcagaagcttctgaagagggagtacaagtacgggttcgtgtccgacttcgagtccttctccatccccaaggggctgtcggaggccaccgtccgccgcatctcggagcttaaggcggagccggcgtggatgctggacttccgtctcgccgcctaccgccgcttcctcaccatggtcgagcccacctggagcgacaacgagtacgcgcccgtggacctgcagtccatttgctactactccgcgcccaaaaccaagcccaagctcaatagcctcgacgaggtcgacccggagctgctcaagaccttcgaccgcctcggcatcccgctcaccgagcagaagcgcctctccaacgtcgccgttgacgccgtcatcgactccacctccatcgccaccacccaccgcgaagcgctcatggccaagggcgtcatcttctgctccatctccgaggccatccgcgagtacccggaccttatcaggcgttacctgggcagcgtcgtaccgccaggcgacaactactatgccgctctcaactcagcggtgttcagcgacgggtccttctgcttcgtgcccaaagacacagtctgccccatggaaatctcgacctacttcaggatcaacgacaaggagaccggtcagtttgagaggactctgattgtggccgatgagagaagcacagttagctatttggaaggctgcactgcaccagcttacgactcgaatcagctccatgctgcggttgtggagcttgtgtgtgaggagggggcagagatcaagtactccacggtgcagaattggtactctggtgatgaggagggcaaaggaggcatttataactttgtgacaaagaggggacggtgcaaagggcatggttcgaagatctcatggacacaggttgagactggatctgctattacatggaagtacccaagcgtcgagctcatcggggatgatagtgttggagaattctactcggttgcgcttacaaaggattgccaacaagcagacacagggacaaaaatgatccacaaggggaagaattcacgcagccggatcatatccaagggcatatctgcagggaagtcaaggaattgctaccgcggcttggtcctgatgaaccctagtgcggagaatgcttataattcttcacagtgtgactcattgctgatcggggataatgcggctgcgaacacctatcccaccattcaagtgggttgcactagtggccgtgttgagcacgaggcaagcacttccaaaatcggagaggatcagctattttatttccagcaaagaggggtagatcatgaaaaggctgttgccgccatgattggtggattctgcagatcggttttcgagcaccttccctatgaattcgcacaggaggtggacgcactcatgaaccttaaacttgaggggtcagttggctaatttgttggctcagcaactgcgtgtaaaactccatgacagccagttacctagaaaatccatgtgtacagcagtacgagaagaatgaagtgcacgatagatatacatatacatttcctggcttgtaatactgaatgttcacatgatgcctatggcaattggcaac

SEQ ID NO: 33965 - DNA, 878 bp, Zea mays
  Clone ID: UC-ZMFLMO17198G03_FLI
ggtcacttgagctagcatatatttcaaaaactacaaataatttatatcagttcaaagttatttctttgaatcacttttgtaatcactccgatcatgtacaaagtaaaatttttgtaacttgtaaaatttggtaataagatttccgctgtaaactgttggtgtgtgtgatttgtgtttacttaatcccgcggttctggttgtaagtggtttatccgatgtccttgggcaatcggacagatcctgttaagttatctggtgcacatgcatagccgtctaaagtctttgagacaaggacaggtgcatgtgggcccaatagcttgggaggttctgccacagagaggctccaagttgtggagattcctcgcaaacgggattgagaaaagcaagcaaaacaccgtggtattcaagtgggtctttggaccgcttgagaggggttgattgcaaccctcgtccgttgggacgccacaacgtggagtaggcaagcgttggtcttggccgaaccacgggataaccaccgtgccatctctgtgattgatttcttgtggttattgtgttttgttgagactcctctctagccacttggcatttactgtgctaacgcttaaccaagtttttgtggcttaagttttcaagttttacaggatcacctattcaccccccctctaggtgctctcaagctcacacatgatcatagctcaacaagttgtgggaaataatgtgcatgaactcaccaaaggtgggagttcatgtgaagtgtaaggctgatcaacaaaataaaggttgaagctgagcaaagttggtcaagattttattagcaattactaagtataagtaaataccaaaccttagtaataataagtaaaactacccttacacac

SEQ ID NO: 33966 - DNA, 607 bp, Zea mays
  Clone ID: UC-ZMFLMO17198G09_FLI
ggcagatccgagctactgggacaagatctcacagggcggcctgcagagaatctatgagaagtacacctggaagctctactccgagaggctgatgaccctgaccggcgtgtacgggttctggaagtacgtgagcaacctggagaggcgcgagacccgccgctacatcgagatgttctacgccctgaagtaccgtagcctggtaagccgtttgatgcctgcctctgcctctgcctctgcctgccagagaggatcacgtgttcgttcccattccagcagtcttaaacgagtgaatgaactactgacgcatctctttctggaatccaggcaagccaggttccgctgtccttcgattagtacggggaaagaagaagaagaagaagcccaggccggagaaccatcgcctgcatttcgatctgtttcaccgcaattcgcattgttagtcgtgtattggagttatgtgtacttggtttccaagaactttggttccttctcgttttttttccttgtttgagcgtttttgggcagcgctggcctggttcctagtatggtgggaattggctgcaccttttgcttcgaataaaaatgcctgctcgttcacctgtcttcc

SEQ ID NO: 33967 - DNA, 1215 bp, Zea mays
  Clone ID: UC-ZMFLMO17198G12_FLI
ccaccgtatacataatcgaagatatcatgagaaatgattttgttttatttatgttctccatttgtacacttttttttgtttcgtcgctgtaaaagtgtgtccaattttagtaccctgtctctgatatatatgaactatttcatccattcatcaattcagagatccaacacttggacaccgacattcgcattcctaggaacatcgaccgggggggagtaaggaaagctgtgctggtgtaggaagcaaaaaaaatcagatccgttctagctctgttcatttttattattattttttctgttgggaacttcatgtgtatatatatataatatatataatagttcatcaggagccacaggccaagcggcgagacgaggcggtcgagctcccgcccgtgttcacggatctcctgcgacgccatgcgaggggcaaggttgtggagtgggcgccgcgggagaaagtgctcgcgcaccctgctgtcggctgcttcctgacgcattgcgggtggaactcgacgctggagggcgtccgccatggcgtgcctttgctttgctggccctacttcggcgatcagttgaagaataccatgtttaccactcgttgtatgatgattatgtctgggtggagaggtttggagaccccttgctccacaggcatgttgcagtggctagcgtttgggtctgattgcactgaaacttgctgacgacgagatcatacccttcaattatgtctcttatgcctccaactggaggagtgcacaaaagatatcgtagataaatgtaaaggatctcctgtcaatttctctcctttgcagaactccatcaagcagctcgagagtgctgcctccaaaatttacaaagagaagaagttgctgcaagcagaaaactggagcctaaagacaagtaagcatacactgaaagtcagggagataaacgaccggttgatgatggccaagcgagcgttcaccaaccgagaaggaatggtcgggagaccatggtacaagcatatggagtccagtgaagctggagaaccactcgttccggctgcccgagtcgatgccccctgaaagggaattaggcttacacctagtccctaattaattttggtggttgaatcacccaacacaaataattggactaactagtttgcccaagtgtatagattatacaggtgtaaaaggttcacaatcagccaataaaaagaccaagttttggattc

SEQ ID NO: 33968 - DNA, 1652 bp, Zea mays
  Clone ID: UC-ZMFLMO17199A04_FLI
caaaaagatgcttcttcctcgtaagcttctcccatggcggcgccccgctcaggacgcccaggccctggcaggccgtctcctgcgctcctcttcatcctcctttgaccccgacgacgacgaccctccgttcacgcgggttcctaagctcccacctcgggcgccatcgacgccgccgccgaagcccaaggccctggcgggcaagatcaggcccgatgagcctgcgcactccgaccttccctttgacttccggtactcgtactcggagacagacccgacatggaggcccatcgggttccgcgagcccacccggttctcgcccttcggccccggccgcctcgaccgcccatgggacggcacagccgcggcacgcgtcggcgatgatgctagtggcgacgagaggagccgggaggaggttctcggggaacctctgtcggaggaggaggtggcggcgctggtggagaagtaccggcacagtgattgctcacggcagatcaatttggggaaaggtggggtaacacacaatatgcttgatgacatccacaaccattggaaacgtgcagaggctgtgaggatcaaatgtctgggagtgccaacgctcgacatggacaacatttgcttccatctcgaggtcataatacggataaaacaggcggcaaagtcgtatcccgcagcataaacatcattatactgtaccgcggtcggaactacgacccccagaaaaggcctggcgtaccattgatgctgtggaaaccgttagctcctatctatcctaagctcgtgcaaaacgttgctgaagggttgactttcgaggaaacaaaagagttgaggaacagaggattgaattctccaccacttacaaaactgagtaagttggaacattgtttttttttataaccatttgggtttgggttatatggggctcactttgccatcgtatagttgtgttgtcaagctgtttctttcatcaaagaagagtctttctgtgttgagcagctaggaacggtgtgtatgttaatgttgttgataaagtgagagaagcgtttaagactgtggaagttgtccggctagattgcactcatgttgggactactgactgcaagaaaattggtgtgaagttgagggatttggttccatgcattcctatattatttaaagatgaacagattatactatggagagggaaggttcgccaagagcgttctgtttcagcagagtgcagttccagcccacaatgatgcacgcatctgccggtgattcacaggagttattattgcgctgcgatattgatgatggttcgggcggattgccgtctgtggaccgtggtgggggcgaggggcgaggccggccaccagtgattcagtgaagaagaaaacaaaccaacacatttgtgtaatcaactttgatgaaacttcaattgaggcgcggcacaaaaatggtgaatatggcacttagatgcattgtttcgatgaatccagggtttgtgaatttagaccgtttgagaaagtttttgtagaataaagctcagcctgttcatttgtttttaatctttatcggctgtttttacgttgttttgtctctatcaattgtagcagctacaataattcgaacaattgactttaatatgaagcgaacaactctactgttttttaatg

SEQ ID NO: 33969 - DNA, 506 bp, Zea mays
  Clone ID: UC-ZMFLMO17199A11_FLI
accgtccgtcgcaccgtgaccaacgtcgggaaggccaactcggtgtacaaggccgtggtggacatgcccagggccgtgtccgtggtggtgcggcccccggtgctgcggttcgccagggcgaacgagaagcagagcttcaccgtgacggtgcggtggaacgggccgccggccgtcgccggcgccgaggggaacctgaagtgggtgtcgagcgagcacgtcgtccggagcccgatcgtgataccgccggccaaggccgtcgcgtaggcgtagctcccaatccaatctctgcttgacggtcggcaggaccgttctctgctcgtgtcgtgtctccgaggatgaaggtcatcagtattcagtagctttaggtaatcgtgagtgtgcccggtgtacgtatggcgaaggaagtaggcaggcgactgttgtataggctggaggcagggtacccgatcatctgcgacgcagcaagctcagctgcaatggcaatggcgcccgttcgttccgtatgt

SEQ ID NO: 33970 - DNA, 2195 bp, Zea mays
  Clone ID: UC-ZMFLMO17199B04_FLI
cttctctatctagggattcatcttcctctcgtcttccctcttcctctccgaagatacaaggcgccgtcccaggtataggtagggtcgccaccatgctggaggagctgctcatcttcacccggggcggcctcatcctgtggtcgtcctgccgggcgctcggcgccgcagccctcaagggctcccccatcgacgccctcatccgctcctgtctcctcgaggagcgatccgccgacgccagcttctcccaggacaattacgccctcaagtggaccttccacaacgacctcggccttgtcttcgtcgccgtataccagaagatactccacctcctctacgtcgacgatctcctcgccgccgtccgcaaggagttctcccagatctacgaccccaagcgcacctcctacgatgactttggggacatcttccgccagctccaccgcgaggccgaggcgcgcgccgaggaaatgaagaagtccaagcaggccctctcgtcccgtccgcagcctgctctcacccagaagaagcctggtcccaagggccgcggcggtgattcccgcggcggcgctgctaacaagggcggctctggtgccaaggatgactctgatggcgacagctatggcaaccaggaccaccgtactctggcaaatggtgccttcaagggccaagagaatggcgtccgcaaggagaattcttctcatggccgcactgttgttgtcaagggaaaggagaatggggcccccaaggatgaaggggccttcgatgtaagtaaactacagaagctacgggccaacaagaagaatggtgccactgacaatggaaccaagaagctgaccaaacctgacataaagaagaaagggaagcaagatagggtgtgggacgacaaaccttccaacaagaagctggattttacagacccggcagacgagagaggggacgaggtgacagacaatgtggcggtcatcgagggagaaagcatgatggataaggatgaggatctgagcagcgacagcgaggacgaagaggtggaagatggacccaaaaagaaaggatggttctcatcaatgttccagagtatttctggtaacaatgtattggagaagtctgatctgcagcctgcgctcaaagctctcaaagataggctgatggcaaagaacgtggcagaggaaattgcagagaagctttgcgaatctgtcgcagctagccttgagggcaagaagctaggatctttcactagaatatcatcaacagtccagacagctatggaggatgcgcttcttcgtattttgaccccaaggcgctctattgacatactgagggacgtgcacgctgccaaggagcgtgggaggccatatgttattgtttttgttggggtgaatggagttggcaaatccaccaatcttgcaaaggttgcttattggcttcttcagcataacctcagtgttacacttgcagcatgtgacaccttcagatctggtgctgttgagcagctgagaactcatgcaaggaggcttcagatacctatatttgagaagggttatgagaaagatccggcagttgtagcgagggaggctattcaggaagcaacccggaacaaatcagatgttgttctggttgacactgctggacgtatgcaggacaatgagccactcatgagggcactctccaagctaatcaatctcaatagcccagacctggttttatttgttggagaagcattggttggaaatgatgctgtggatcagctcactaaatttaaccagaaattagcagacctatctgctgttcccactgctagattgatcgatggtatcctgctcaccaagtttgacaccatcgacgacaaggttggagcagcgctttccatggtctacatatctggagctccagtcatgttcgttggctgtggtcagtcctacacggacctgaagaagctgaacgtgaaatccattgtgaagaccctcctgaagtgattgcaccaccgtgttgaagtgcagtctgcccaaagtctgttatctattgtatccccagtgacctttgtcatcctcatgttggacgtcgtcgtggatttgtaactgtcggagttgcaacaaaacttgtgtggttgcgtcaacgtgtgccgtcttgctctaataatgcactatctgcattttgaatgggtaaaaaatggatgagtatgcgagtttgctatcatctgg

SEQ ID NO: 33971 - DNA, 915 bp, Zea mays
  Clone ID: UC-ZMFLMO17199B09_FLI
attgaaaatgctattaatatctataatttatggttcttgctagttgtcgtactcttacactagtttgtgttgcacacacctggtgctagaaagagagcatgttcctgctgtccttttggtcgcttggtgctcactcctctgtatttgttggtaaaattgggtttcaaactattcttcagtaattaattaatctgtggtataacttcatattttgtgattgtttcttgaacataggatgtgctatagccttttacctggtatgattattggacataatactagcaatgataccttttcacttttccttgcacttaggatacccaactgcttctctgggatctggcattggacgagattgctgtccctctacgccatccttccggtgggtcaccgacattcagtagtggaagcccttctgcacactgggataatgcatgccctccaaccggtgttctccaaccctctccacggatgcgagatgtgccgaagctctcacctctcgttgcacaccgggtacatgtagatcccctatctggcttggaattcaccagtgaatcaattgtcactatatgccgtgaggggctaatcaaaatttgggcacgacccatccatagtgaaaacaaccagcagccagattcttctgaacaggttataggcagtgccactgctaaggataagatgttaacatcgtcaaataaagcagagtagcttgggaaggcttgcagtaaaggattgaagaggctttgctagcatttttgttagccatttcttatcctgcttcatcggcaacgtttctagttacagaagtgtcattgttgccatcaatgttggcgaaagaaaataacagaacttgctcctgtacatatacagacattgccataagatgaaatattacaagcttactggtttgatatt

SEQ ID NO: 33972 - DNA, 659 bp, Zea mays
  Clone ID: UC-ZMFLMO17199C06_FLI
tgggagatggggctagcttgtgtgtagctgttcaagatagacgaggttgcatagttgtttgaggaggcaagggcggttctggagcaggagtgtggcacttctcatcctaatactcttggtgtgtacaacaaccttgctgcaatctataatgccatgggaagtcctaatctgtagtacagatagatggagtacacagcgacatatttagccctggtgctgaaagggggagccacacacttctgattcaagtattatttacccgctatgaattcaaagtcggcactcacgatggccttggacacaatcctgagcaacaagatgttgaaatactatttggacctggctatactggtcttgcggatcttgggaatagttgatatatggcttcaataatgcaagtcatgtttttaacccaccattccatatcaagatactttgagaaacagagtttgaaagctgcatttgctactgcactagctgatccaacagtagacctaaacatgcaaatcaatcatcattctggctagcatgcacccaaggttgaccaaactgattcgacagttttgggatgagatcataacgttcgtccgacttttgcagagatcattacagaactccaagatattctacaccatatctaggcaccgaagggatctctg

SEQ ID NO: 33973 - DNA, 1130 bp, Zea mays
  Clone ID: UC-ZMFLMO17199D05_FLI
aaggagacctgaagcaagagcaagatgagattgaggacttggcgaaacggctctgctggaagaaggtcgtagagaaaggtgatcttgctatatggcagaaatctatcaaccacgtagaatgtgttgacagtaggaaggtttatgatgctccgcagatttgtaagagcaatgatgtggattctgcttggtacaagaaaatggacacttgcatatctcctctcccagatgtgaagagtgaagatgaagttgctggcggagtccttgagacatggcccaaaagagcatttgctgtccccccaagagtaatccgcggttcagttccaggcctcacccctgagaagttccaagaggataacaaggtgtggtcagagagagtggatcactacaagaaattgattccaccactgggcaaaagacgatacaggaatgtgatggacatgaatgcggggataggtggctttgcagctgcattgatgaagtaccctctttgggtgatgaatgttgtgccttcaggcttggcccatgacaccctcggtgttatttacgaacgagggtttattggcacgtaccatgattggtgtgaggctttctcaacgtacccgaggacctacgacctcatccatgctgataaagtttcagcagttaccaggacaggtgtgacataacgtacatcctactggagatggaccgaattctaaggcctgaggggactgtgatcatcagggacaacgtagaggtgttggtgaaggtacaagctatcactggaggcatgaggtggaagagccaaatcatggaccatgagtccggtccattcaaccctgacaagatcctagtggctgtcaagacttactggaccgggaagctcgtgcaaaaacaataatcgtcgccttgttactgttttgcgtctgcgaaaatgtaggcatgacttgcctgtcagttctgtcttcattgccatttttttatcctaacttcaggatatctgtatataggaggcatgtgaaccatgtagctggaattggtatcaaacatcattagccacgtagcgtatgtgacacattgcaatggtgtataaaatgttcactcatatatttggtgtgatattgcaatctaataacatgatgcttggtgtg

SEQ ID NO: 33974 - DNA, 1498 bp, Zea mays
  Clone ID: UC-ZMFLMO17199E09_FLI
ctcaactcggccgtgaccaccatgacgccggcgtccttcgcgcaccaccaccagcagcagtcgccgccggccgcgcagcagcacttcgtcggcatcccgctccaggtccaggcgccgccgcagtcgggctacaacctgtggaccccggccatggctggcggcgccgcggacatgtcgccgcaggggcaggcgcagactcccggcgccgcgggtgctgctggggtcagcgccgtgctcagcctgtcgtcccgcgaggcgccgccggtcaccgtggccgcggtggccgcctgcaccgacgagggcaagtacctgggcgtgtcggccacgccgcaggggcagatggtcatgagctccaagtacctcaaggccgcgcaggagctgctcgacgaggtggtcagcgtcagcaagggcgtcgaggacgctaagacggccgctgccgccgcgaccaagagcctggccgcggtgaagaagaaggaggactcggagggcgcgtcaggtggcggcaccgacgacggtgccggcgcaaagagcggcggtggtgccgcgccagagatgtccacggcggagcggcaggagatgcagatgaagaagagcaagcttctcaacatgcttgacgaggtggagcagcggtaccggcagtaccacgggcagatgcaggcggtgtcgtcgtcgttcgaggcggcggcgggggccgggtcggcgcggacgtacacggcgctggcgctgcgcaccatctcgcggcagttccggtgtctgcgggacgcgatcgcgtcgcaggtgcgcgcggcgagccgggcgctgggcgaggacgcggacgccgccgtcgccgggggccgcaccgtggggtcccgcctccgctacatcgaccaccagctccggcagcagcgcgcgctgcagcagctcggcatgatgcagggcggcgcctggcggccccagcgcggcctccccgagcgctccgtctccatcctccgcgcctggctcttcgagcacttcctgcacccataccccaaggattcggacaagatcatgctcgccaagcaaaccgggctcaccaggagtcaggtgtccaattggttcatcaatgcgagggtgcggctgtggaagcctatggtggaggagatgtacctggaggagacaaaggaccaggacgctggaggcggcggcaacgacgagggcaagtccggtggcggcggcagcaagagcagcgacaccgtcgacggcgtcatgccgagggcggacgtgatgtccaagtccgctgtgcgcatgggaggcggcggggcgggggcggagagcgcgtccaccaacaagggcatccatggctcctccctgctcgagctcggcggcggcgatcaccagcagtcccacgcggggttctacgacgacgatgaagacgacggcgacgacgtgatggggcggaggctcaagaaggcgcgcggcaacgagccggcgccagcgttccaccacgtgcacgacatagccacgctgcacgcgcaggccg

SEQ ID NO: 33975 - DNA, 2832 bp, Zea mays
  Clone ID: UC-ZMFLMO17199G09_FLI
ctgatggacgatgggttgtcactggtggggaagataacattgtgaaggtgtgggatttgacagctggaaagcttctacatgatttcaagttccatagtggacaaatcaactgtattgattttcaccctcaagaatttttgcttgcaacaggctctgctgataggacagtgaaattttgggatcttgaaacttttgaattgataggttcttctggacctgaggtattgcaagtttttttcttaaatcaagctggatctggttatgaaatcgataatttgaagaccacaaactatggcttctcaaattctttagcatgcatgttctataggcatggtaactacagtacattcttgctgtggccttgtattaatatctttgtctttcttataaatcgtaactgtaagaactttctcagaggaatttagctcgcatttccctacagctgattcagttttataagagttatggtctgacatctagcctgagcttcacgtatgtgttgttccctgttttttaaccgttgctctaaaagcacatgaggagaacatccatcttcctcttctgtgatagcttacatgactcctctctccaggtaccggtgtacgttctatggtctttcacccagatggtaaaacccttttctgtggattagaccaaagcttaaaggtattctcttgggaaccagtaaggtgccatgatgttgttgacatgggttggagtaatttggctgaccttagtatttatgaagggaaactcttgggatgctcctaccatgagtgccgtgttggtctatgggctgctgatatatcactcattggaccctatgctcttggtgtattgcccaaagcgaatttttttgctgagcttgtgcagtctatggaagataatcctgtgaaaccagttgatagcactgcaaattctcgtcctgcttcagcaatggcacattcaagaagttcatacaaaatcaaggagtctgggattgctcaaagcagggttcgtggctcacatttgactccagcaagtacagataagaccaagaaagataggagcagcactattccacgaagacctgattcgtctttaaagtcatctgttcagagtactaccctgatgaggcgtatgaagcttgttgatagtccttccaccaacacaaaaaatgtggaacgtaatgttgggcagagagacatttcattagcgtctcgtgcagtgatggctaataattctgcaactgctaagaaaagcaatcttacagaatcagctttagtgaaagatatttacactacatctcaggctgtttcagcacctattgttgtgcccagagacattttagaggacaaaacagtaagcaatgttcgtcgagggactggagagacagctgcagtcccagatgattttcggatccctgttcacagaagaaaaccctcacttagtggcagtgctgctgatagtgatagctcatcaagatcagtgttcactgaacctgatgtttgctcagagggtttgtctagcttaaaattctcctttgggctaactccatatcacaagaaagaagaatttggcgatgtggataatgaaggtattgcacaaatagcagaaaagatggaaagaacagtgtcgctggaccattctcagcagttaaatgatgataaatgtacagccatttctctttgttcttaaacattgacacggtgtttgctagtatggtgatgtaacagtagaactctattttatgcagcctttgaatcaccatgctcaacaacagagactgccaaggtcaaatatgttagaggagttgctgtgccactggggaaaacaaagtctcttgttgagagatgggaaaaaagagagacttctagcactgattattcaccacaaactggttcttgtggtgatcgggcatcgagaaatgacaaccatccattccatctggcggaaccaagtacaacatttgaaaaggacctgtcaactgtagatgaagcgatggctcctgtcaatttagtgcggaaccatgatgaattcctaaatgctgtaaaacttcggctgacaaaactagagatgatgcggcatgtctttgaacaaagtggtattaaaggagcaattgctgcagtggcaaagctacctgacaatgctgttcaagcagatgttgttagtgctctcaaaggaaagcttgatcttttcaacctggaatttttctcaaattttctgcctgttcttgctgggttactgtgtagcaagactgaaaggcatgctatggtctctttggaaatgttgttggatcttataaagatttttggaccagtaattcattcagcattatcagcaaatttaggcgttggagttgacattcaggctgagcagaggttgcaacgttgttcacggtgctttaaccatttgcaaaagatccaacagagtctgaatccattgattctgcggggtggtcaaacagcacaacttgcacaagaactaagtctttcattgcaagatttggtggtgatctaggcaagatgatgtacaatgtatacgacagagtagataccattggttttggcgaaaagtgcccacagttgtgtagcttgtaattttgtcatagctttgcaagtgggttttgcaactgtgttttaacattgggctggcattcagcctggtcccctgttgtaaatgtgagcctagccgtgaatgagtctgtaattagccagccacatctgctgtgtgagcagccctgaacaaaaagactagttgaaaggaaacaaccgcaaaggggatcattttggttacaccccaggtggtaggatggctcatgtagcatgcggtgattggcaattccattctttg

SEQ ID NO: 33976 - DNA, 1120 bp, Zea mays
  Clone ID: UC-ZMFLMO17199H04_FLI
cgttcatctttcctggtgcacagccagccccccacaggagcttctctgaggaagttgctgcacttaaccgctactttggcggcctgaaatctggtggtaatgcttatgtgattggagatccagcaagacctggacagaagtggcacgtcttctacgccactgagtacccagagcaaccaatggttaaccttgagatgtgcatgactggtctggacaagaagaaagcttctgtctttttcaagactaatgctgatgggaacacagcatgtgccaaggaaatgacaaagctctctggcatctctgaaatcatccccgagatggagatctgcgattttgactttgaaccctgtggctactccatgaatgcgatccatggctctgcattctctacaatccatgtgacgcccgaggacggtttcagctatgccagttacgaggttatgggcttggatgccactgctctatcttatggtgaccttgtcaagagggtcctccggtgctttggcccctcggagttttccgttgccgtgaccatcttcggcgggcgtggccatgccgggacatggggaaaggcactaggtgcagaggtctatgactgcaacaacatggtggagcaggagctgcctggaggcgggctcctcgtataccagagcttctgcgctgctgaagacgctgttgctacctcgcccaaatctgttttccactgctttgacggcgagaacgtggagagtgctcctcctcctatgaagaaggactacaaactagctaatcttctctgctgggaggaggaagcggatgccatggaggagaaggcgggagtgcttgatgagtaagacgggcttctggtgtcgatttgcttctgagttgtttattttatatcgtcgcaatttcgtggttgtcgtttggttattctgtgaagcagccaagccaggctattgttatgaaaatttgtcgtctgtaagcatgtgaacttccgatgttgccacatgctggatcagtctgaataagtaagtatgcagctctaggtggtcagctgcgtctaccacaatgagcatgtacgtatggagaaatatctgtgaacccattttgtttatgaataagatttgttttttttcgagtt

SEQ ID NO: 33977 - DNA, 2247 bp, Zea mays
  Clone ID: UC-ZMFLMO17201A06_FLI
aggatctcaaccttcttggaaggcacctgtttagcttggctcatgctgcttctggttatcacaaagttcttgaagaaaatagaaaactatacaaccaggtgcaggatcttaaaggaagtattagggtatattgtagggtgcgtccctttttgccgggacaagcaagtccgtccactgtggcttccattgacgagggcaacataacccttgtcatcccttccaagtctggaaaggaagtacggaaaacttttagcttcaataaggtttttggctcatcagcgacacaagatgaggtgttcttggatactcaaccccttattcgctcggttcttgatggatacaatgtatgtatctttgcatatggccaaactggatcagggaagacatacacgatgagtgggcccaaaaacatgactgagcaaacccaaggtgtcaactatcgggcacttggtgatctatttaagcttgctgaacaaaggaagagaaccttcatttatgatattgctgtgcaaatgattgagatttacaatgaacaagtcagggacctccttgtcactgacggtctcaacaaaaaattagagattcggaataactctcaaaatgggctaaatgtgccagatgcaagtcttgttcgtgtggcatcaacaatggatgtcatggaattgatgaatgttgggcacaagaatcgtgctgttggtgccactgcactaaatgacaggagtagtcgttcccacagttgtttaactgttcatgttaagggaagggatctgacatcagggacaatccttcgcggttgcatgcatttagttgatcttgctggcagtgaacgggttgataaatcagaggtcactggagaaaggttaaaagaagcacagcatataaacaaatcattgtcagccttaggggatgtaattgcttcgcttgcccaaaagaattcacatgtaccttacaggaatagtaaattaacacaacttctccaagattcacttggaggtcaggccaaaaccttgatgtttgttcatataagcccagaaagtgatgctgtaggagaaaccatcagcaccttgaagtttgccgagcgtgtgtcaactgttgaacttggtgctgctcaactaaataaagaatctggagaagttagagagcttaaggcgcagattgctcaacttaaatcagcattagctgcaaaagatttaggatcggagcaaatcatcagtcatgacactgaggcatttaacataaagatgccttcgcctggtttttcaattaagcgacagggtagctgtgatctactgtctacccaaactaacttcagacaaccattggatgctgttggaaacatagaggctagagccaatcctacactgaggcaaaagaaaccaagctttgacctccaggatttattaacagcaaatgattctccttcatggccagatagcaatttgagggtaaattttcagacgggagatgaaagagaagtaattggtggggactggatagataaggttgtagtgaacaacaataattcagtcggtgactgggagggtgacaatgcagctttacctgacttcttttaccagagatatcattcaggtatgagggagaagcagtaccagaggaataacacaagacaaaaggatgaccatgagtatgaagagcaaaggtctcgattttactctaccaatactgatgattctgatgacattgacatggcaacaagtgattcctcagaatcagatgcgctatggcagcagctcaatgtccaaagcatggataactctattagtttgagcggttcaaaggttaagaaaccacaaataaagcttagagatggttcagatgccaggacaccaatccattctcaaataccatcagcgtcaagaaaagttgcaaacggttcaaacagatctgttaggcagcctttaagcagaagcgacagcagaaggctttcatcaaatggaagacaatctggtgcaaagtagggacttacaatgatcgtgtgcattttttgcctttttctcagtgtttgtcacgagagattgtgaggatgttcttgagtacagcaatgagtgacaataaacccgattgattgtgtcagtgtggtgagttgtgatctcaacaactggtgtgtgaggccattaacctttttttttccttattggccttcaggctatgttgagttatagctagttctttgtatctgttcataatataaatttatataatgaaaagaaagcaaatcgattgatc

SEQ ID NO: 33978 - DNA, 3432 bp, Zea mays
  Clone ID: UC-ZMFLMO17201A10_FLI
ggttgattttgggcatatggaaactgtctcgttgatatctgcaccaaagtatcctgagaagcaggttgggtatattgtgacatcttgcttactgaatgagaataatgatttcttaagaatggtaataaatacagtaaggaatgacataatcggacgaaatgagaccttccagtgcttagcattgacaatgctttctgaaacagattcgctgtcaaaaatctggaatcccaaccaaagaggtaggtaacattggtgggaaagaattttctgagtcactagccccagatgtccagaaacttcttatttcaagcagttgccgtcctgttgtcagaaagaaggctgctctatgccttctgcggctttataggaagaatcctgatgttgtgaatattgatggctgggctgaccgaatggcacaacttctagatgagcgtgatttaggtgtgctgacatctgtcacgagtctttttgtttcactagtatccaacaatgttgaagcatattggaattgtcttcctaaatgtgtgagaatattggagaggttagcaagaaatcaagatattccacaagagtacacttactatggaattccatctccttggcttcaggttaagacaatgagagctcttcagtacttccctaccattgaagatcccaacgcaagacgaactttgtttgaggttttacagcgcattttgatgggtactgatgttgttaaaaacgttaacaagaacaatgcctcacatgctgttctctttgaagctcttgctctggtcatgcatctggatgctgaaaaggagatgatgtcacagtgtgtggctcttcttgggaagtttattgcagtccgggagccaaacattcggtaccttggtctggaaaacatgactaggatgctgttagtaacagatgtgcaggatatcattaaaaggcaccaggctcagatcatcacatctttgaaggatccagatatcagcattaggagaagggctcttgatttattatatggcatgtgtgatgttacaaacgcgaaggaaattgtggaggagttgttgcagtaccttgatacagcagaatttgcaatgcgtgaagagttgtctctgaaggcagctattcttgcagaaaaatttgctccgcaactattgtggtatgttgatgttattcttcaacttatagacaaagctggagattttgtaagtgatgatatatggtatcgagtggtacaatttgttacgaacaacgaagacctacagtcatacgctgcaactaaagcgagagaatatcttgacaagcctgctttacatgagacgatggtcaaggtgagtgcctaccttcttggggagtatggacatcttttggcccggagacctggctgtagccctaaggaattgtttgctattataaatgataaacttcctacagtatcggcaagtactgtagctattcttctctcaacctatgccaagatattgatgcacactcaacctcctgatgttggactgcaacaacaaatcctcacaatatttaaaaagtacgagagctatattgatgttgaaatacaacagagagcagttgaatattttgaactaagcaggaaaggtcctgctttggcagatgtgttggctgaaatgccaaaattccctgaacgtgagtctgcactgttgaagaaggctgaagacgctgaaattgacacagcagagcaaagtgccataaagctacgcagtcagcaacaaacatctagtgctcttgttgtagctgatcacccccctgcaaatggatctgcaccaccagttaataatctcactcttgtgaagatgccaagtcaaactgtttctgacactcaggagagtggagtaagttatgaagaagctcctaagcctcctgttgaagctcccaaagaaaatgggactcctgtcgaagtgcagaacagggacacaaacattactgaaatcaacaatgagattaaagctgaacctccctctacatcccattctacctctcccggagacctcctcctggcagatcttttgggtcctcttgcgatagaaggccctcctgctgtagagcaaaatcctgcccaaggattgaatgctaatcaaagtccagctggtgacttggcacttgctacccttgatgatcagtccaactcagttcagccaattgtcaacgtcgaggagaagtttcatattttgtgcacaaaagatagtggggtgctgtacgaggatccttacatccagattggcttgaaagcggagtggcgtgcccatcatggccgtcttgttcttttcttgggtaacaaaaatacttcagcccttacgtcagtgcgggcgctgattttgcctcctagtcatttgaaaatggaactttcgtcagttcctgatactattcctccaagagcgcaggtgcaagttccccttgaggttgcgaatctccttgcaagtagagatgttgcggttctagatttctcgtatgcttttgggacttcactggtggatgccaaacttcgactccctgttgtattgaataaatttttgcagactataactcttacccctgaagaatttttctcccagtggaaagcgcttactgttcattcgctgaaggttcaagaagtggttaaaggtgtgaaacccatgcctctttctgagatggctaatcttttcatgagccttcacttggcggtcgctcctggacttgataacaacccgaacaatctggttgcatgcacgacattcttttctgaagcaacacgtgccatgctttgtctgatacgagttgaaacagatccacaagacaggacccaactgcggctaacagttgcctcgggcgaccaatatttgacattcgagttgaaagagttcatcaaggaacatctggttgatatcccaaggactcaggtcgccccacctcgcgcagcagtccagccacagttgcctactacagcacctgccacatacaatgaccctggtaccatgcttgctggattgctatgagaagtaacccgaaggaatagtgttttgatgtacatgacagttatttaatacgaggatctaacatctccacaagcatcttgctgccaagacgtacacgtggagcaaccaagaaagagctggcggagtgtagtctccatgaggattctaaaccgagaaagagcttagattctttttgtgcggtttcaaggccccctccctctccatgtagcagttgccgtattgtgtaagcgtaacttgttgtttctcattattatcatccccttttggtccatttgtataacctgtatcgcccatgtctggtggtggacaatcggtagtttttgtgtgttaatataaggtgctaggttttcccaccatgccgattgtaaagttgccctggtgcgcattgcactgcgatttgtacggaatagggaaggaaaaatttataggttttgctttgtgc

SEQ ID NO: 33979 - DNA, 2604 bp, Zea mays
  Clone ID: UC-ZMFLMO17201C02_FLI
tgacctgaaacgattatatgcagcacacagaattctataagatggttgcaatctttcttgttctctccttgtttctgaattgaattaacctatctggtctgcaaggtgatacacttacactgatgatacttattgttgttgttttctacatgcactgtcagttgagttagtgtctctgccatatttgataattgtttgcttagtgtctgatatcccactgcaaactactgtttgcttgtattaagtgatttgttttctatacttccacaaatattattgtcgatgtgtagctttctgtagccctatggctgaaatattcatctatacaatttagtacacatgatgattcacctttgtagattgcatgatgttacttatggtgatgattctgcctctttcacttgcagtgttctagaattagttgatgttgttgtgtatccttcatttctagaaccagtcaaggaaactattttgagggttcacagtgtgaaggtagaatttcagttattccctaaaatttagtttcttctcagtcagttctatatattttaaatgcacagttctgtgaatcttcctaggtcaatcttcttagagatgctttgaaaggacaattttgttttttatgtatccataactaagagatcaaacctcagacttaatataagttataaatggagtacacatattattttatcatttttattgtgcttcttggtgttttttctttcattcatttgacaagttataaattggttaactgatatgatagttgtgctactgctacactagcaataatgtagctactataaagagatagcatataacttggttataatcattttcttttttgtacaaagggaaagcaaaatatagtttaaagaccagaaattaagtttgttccaccatagctacagaacttcgttggtgcaaatattttactgcacagttaaactgtagaagtagaatcttttctattttatctgtaaacataatgaataacatggccaattatgtgaataattaatgatgcacttgatagatacatgtttctttgatttttttagtgctgcatagattgcccgaatcgcacaaatgttgcacaatatgcatatggtctttctgcttttgggaggcaacttcatgcaatgggactgacagatgcttcagaaatccaccctgatagagtatatattttttctgtttctttttttgcaattttgattatcttctcaccttctatctcaattgcagcatttgggcagtcatccacaagcatatttggccacaactcgtttggagcttcgtagggttagtattattgtaaatttttcgagcatgtttggacaactatcccattcaaatggtttacctatgtgatatatagaatttgtagcagcgcacgagttgttcgaaggctaaataattgtgtcactgcaccaggcatgactgactttgcagagtcattgtcttctttggctctctccttggcaagatgtgttactgccattcacatatctgttgttcatagtaaattgtcttgaggagatagctacggtgaaatattctctattttgttccagctccgtaaagaaggacgaagttgttatcactgttcagtttcaacaatgcatcaagatcctagcgaacaaagtttatttactaacacaacagagtgttgagctgctagaacgttattcagctatgcaggcagtacatggaggtatcacaaaagagttggatttgaagaaagtgcttattagtaatctctacaataaactttaacaagaaaaataggtttgtcttggagttttgttactccaatttctgcatttggcaatgaattcccatggtttatggatataaccatttacatttttgctatttatgctaacgagcaaatttgctatggtgtcccatggaaatcattttaacagaccagcaaggagaagatatcatttggtcggttcgaagtctatgagctcgctgtctttttctaaaactctgctgggcactatgtggcgatcaaccgaaactgctcaaactactacttgtctgaggaatccatcgccatgttcaccgagcaccaccggcagcaccctatcagggggttgtgagtactttgggtgactgttgccatgctgcctaatgcttcctgttgaaacaaacaccttcatgatcctgatgacaattgtctgctgaaaagaagggagaaaactatcaactatatatatatacacactgaaatttgttactatacgctcaattctcagttgctttttcaagttatgtttgtatatatgatcaccttcacggtgtaaatagactcgactactgacgctaggcatctcttcattcaagcagactgaatattcttttagctagcatcacattattgttccttcaattggacctatcttttttgaaaaaatcttcattagtagttctggcttatagtagttcagttaggcctcctttgccaatgctcctagagtaggcgattctctattggagacctctgccgaatagaagtgatactctgctaattctgtgaactgaaaattctgtgaagtgaatatctgaaataaattatgaggttgggagttg

SEQ ID NO: 33980 - DNA, 2118 bp, Zea mays
  Clone ID: UC-ZMFLMO17201C11_FLI
ggtcgccatactacaccacccacaagatcatgcagggactcctcgaccagtacacgctggccagcaacgagaaaggccttgacgtggtgctgcggatggccgactacttcagcaaccgcgtgaagaacctggtgcagatccacactatccagaggcactgggaggcgatgaacgaggagaccggcggcttcaacgacgtcatgtatcagctgtacactataacgagagaccagaaacacctgacgatggctcatcttttcgacaagccatgcttcctcggaccacttggtcttcataaagacgacatctcgggcttgcatgtgaacacgcatctccccgtcctcgttggtgcgcagaagagatacgaggtcgttggcgatcgtctctacaaggacatctcgacttacttgtttgatgtggtgaattcttctcacactttcgcaaccggaggcacatctaccatggaacactggcatgacccaaagaggctggtggacgagatcaagatcagctcgaacgaggagacctgcgccacctacaacttcctcaaggtgtcgcggaacctgttccggtggacgaaggaggccaagtacgcggaccactacgagaggctgctcatcaacgggatcatgggcaaccagaggggaacacagcccggtgtcatgctctacttccttcccatggggccggggcggtccaagagcgtcagtggccagtcaccgtctggccttccgcccaagaacccaggggggtggggaggtcccaacgacacgttctggtgctgctatggcacggggatagagtcgttctcaaagctaggggactccatatacttcctcgaggaaggtgagagtgagaccactgggctctacatcatccagtacataccgagcaccttcgactggaaagccacgggcctcactgtcaaccagcgggcgaaacctctgctgtcaacggaccccttcttcaaagtttcgctcaccatttctgcaaagcgaggtgcccgacaagcgaaggtgagtgtccggatcccatcgtggacgacaactgttggcgcaacggcgatcctgaacggccagaagctcaacctgacacccactggcaactcgactaatggtggtttcctgacgattaccaagctctgggccaatgacaccttgaccctccatttccccattacccttagaactgaggcaattaaggatgaccggccggagtacgcgtccatccaagcggtgctgttcggaccgcacctcctcgccggcctgacacacggcaagctgccagtgacagacagcagccactccaacgacggcctgaccgcaggcatctgggaagtggacgccacaggcgccgcctccgtcgccggctgggtcaccccgctccactccgagacgctcaactcacagctcgtcaccctgaaacagagcattggcgggcgcaccctcgtcttgtcggtgtccatcgctgacgcgaagctggagatgcagcagcagcccgcccccgggaccgacgcgtgcgtgcacgccacgttccgcgcctacggccaggcgggcggcagcagccagctgctgcgagggcccaacgtgacgatcgagccgttcgacagaccgggcatggcggtcaccaacggcctcgccgtcggctgccgtggaggccgcgacacgctcttcaacgccgtgccggggctggacggcgcgccgggctccgtgtccctggagcttgccaccaggccggggtggttcgtggcgacggcccccacagcgatgcacgcgaacgccaccacgcaggtcgtctgccgagccaacaagggcggcgcggcgttccggcgagcggcgagcttcgcgcgcgcgccgccgctgaggcgttaccacccgctgagcttcgcggcgcgcgggacggcgcggaacttcctgctggagccgctgcggagcctgcaggatgagttctacaccgtctattttagcctcgtctccgacggcgagagctgattgatcggtgtgctcctgaacgaacgctccgctagtttcgctgtgcaatgagccattgacgctctgtatcccccatgaactatgtgcaatttggagtggagtaaaaatgtatggcgctagttccatg

SEQ ID NO: 33981 - DNA, 830 bp, Zea mays
  Clone ID: UC-ZMFLMO17201D11_FLI
gggatccctccgagcttaggagattggccctgaggaaggacgagatccacagcagccttcgtggtggctcctaccaccagatgaggaacggttccagggagttcatgagcaccctcgccaattacaagatccctatcgctgtggtcaccacacgcccacggaaggttattgaggaagccattgaagctgtaggcgtgcgcagcttcttcgatgcggttgtgacagcagaagacgtgtaccggggcaagcctgacccagaaatgttcctgtacgctgctcagcttctcagtttcatcccggagaggtgcatcgtgtttgggaactccaattcggcggtggaagctgcacatgacgcacgtatgaagtgtgtcgcggtcgcaagcaagcacaagatctacgagcttagcgctgcagaccttgtggtgaagcaactagacgagctatccgtcattgacttgaagaaccttgctgatattgagtccccggagtttggcatggaacctgaaccagagatggaggaggaggaggaagtgcccccaccatcgacgtctgtgggtatagatgatctattctggtaagagaccagattgtacatttgattgattcctctccagaacacagatgtattgttgtcaactgtcatagtgatcagaaagaagggcttatcatccttctgtaatcagtagaatgtgatatgtaaaaaatgttgtctagagctcacacactgtatatatatactcagaaagaaagctgggaactgaatatatgaatcagaacatttgaatctgcagttcctgaaacaatgtaacaccacaaggtttctgtcgccg

SEQ ID NO: 33982 - DNA, 598 bp, Zea mays
  Clone ID: UC-ZMFLMO17201E01_FLI
cttgattgtaaacaatgctgcactgctgcccataaaaaaccgcactgaggtctttctgatgctacacgatagaattgtcgattatcttgggtgtgcggacaaaacgaagaagaagaaaaagaagaggatactctctagtcttccctacaaggaagactggctagatactgccaaggcaaatacaaaaatcaaccagtgggttgccaatgttcagaacgagtacagagcgactccacatgatctgctgcggctcaacagaaatgtaagaagccacatgcatcgctacagcgacggtgacgacatcgaggaagttctgtattgtgaatggcccgagctgctcatggtcatgcagaagatgttgcacttggaaggcgagctcgaaggcactgacattcagaacaagtttggctaggcgtcctacttaagctactgttcttcgatccagttcagggccgaaagtttatgctggtggagtgatggtcgatgtaagtttgtcgctctcatcatgaaggtaaagctggatcagctttataaaatgtatgttaaaatgtaaagtaaactttaaaccattctctctgagaaggtctcttcttaatac

SEQ ID NO: 33983 - DNA, 3105 bp, Zea mays
  Clone ID: UC-ZMFLMO17201E07_FLI
ataagcaagaaaggcccactaaagggcaattgacgctgggcctagcagctagcgcgtggcggcgacggcgacggcgacggcgggggaagactgagcggccgaggagccggtgcggcatcggtgcatcgcagcggcctgaggtcgcgagcagcacagcagggtgcgccaggcgccgacgcggcacggggcaccgcgcgacgcgtgagcgcgtggccggtctcagcaccaagacgcatcaaagccggcgctaggcagggcactatcgcgctgctgcgcagctgtgcctgcgctggtccctggaggattagtgacatcactcaccaatttgtgttttgcagaattgggagaaatcaagtaagtactaactaggtgtataaatgcaattacatttcactgattcaattagcccctattcaattagtccgtggatagtgctgcattggtttaaggaagaacctcttcctgaatctaccatttcttagttttagcctttggggtaaggtccgtaaggatttagtgtttctagacctaagttagtgactctagtaagggtttgtgggagcttatcaatcatttttttacttatccaaccgctacaaatagatggtgtagtgatttgtctgatcaagtttgcttttgtcctgttttctataatcatatggtgatttggaggaaaaaaactgggatgttatttttcacatgttgcgggatggttgcagtaaaggtggttagattactttggaacaaatagttcaatgttgataagcattgggttttctcaagttatggtcctgaattaattctgattagtgttggagcacaggagtgggattcaggtgtacgcaacttacttcaaaatggcgaacaaaagaacaagagatattaataaaaacaagttatgttctctttgtcaaagttctttctatgctatgtgcagccaacttcacaacagatcaggaagctttagagcttggcaatggagatgagagcccgggaatctgtaagcatgtcgaaggatctaactggggaaatcgcaccttttgccactgccctacatgatgtgttcctccactcccattgctcatcatgcttcaccaagttacttccacaagccccttgtgtcatgtcttgcatgacatgctgttctcttcgatactgctgttcagagtgcttacgtgcggattcagtggtgcatgtttcctctggtgaatgttgtttttttgtggatcacctcaagagagcctccccttcctatgttactgaaggaacaagtgatttgcgtgctgccctccgccttctgtgtgtgcttgagatacatggtcttgtttcgcctgattcaatcaatcactacagtagaattggtggacttttaacaagtggtattgaggaagctttgaaggaaggtgaggttattgctgagaggatactggaggggagcttattgatgtcatctgctagaaaatcgagggcacagacttctgctattttttcagacaggcttaaacttgagaagatggcattatgggcagtgattatcaatagcgttgaggtgcaacttagtgaagggttagctttgggagttgcagtgtatggcccgagtttctcatggttcaaccatagttgctttcccagtgcttcttaccggtttgtactggctccaaggaatgaagactgtgcttcacagaaatcaaaatcctgtgtagtccctgctagcaaaggagttgcagctgatgtggtaaaggagaataatgaccattttgtttaggacctgctacaattttgctcgtgtcatacaaagaataagataaaatatttgaatactgttcacaacatactttcattatcataaacaagtgctatttgaatgtttatacagaaatggttcctcaaacactttcataggctgaatctaaatattcatgaatatactcatcaactcatgtttaaatttcaatagttagacaatatttatatagcatttacttgagagaaaatcattaagcttattattgtgcttgtttttattgcagtggcatgcttggcaatacgacgatcattctactcatggcgctgtattgcatcaccagagccatacactgatcttattctgaattgtgatgtgagggacttggataaagcagaagcagagggtactgttacacctccagcaattgagaatttgggtgatgtttttgagtggtttgaagcaagaggatatttcagggagaaaacatatactacagcctcttcaccatatctgtcttactgcttacatgacacttgcctctgcttaccggtttcgcgccttaagtttagaagaagctgtccgttcagatggagaaaatactgatgacttttttagaatggctaaagcagcagcagcgtattccctggtacttgcagggagtgcacaccatttgttcctatcagaatgttctcttatgatccccctgtctcattttttgttaaacactggacagtctctgttatatcttgctgagtctatcaagggaaagacaaggcaaaatatatccgaggccaggctcagcttttcttcatgtccagcaagttctacagacaatgattctccaccgtaccatgtgttcagatcaacctgtgaagcgtttggcaagcaaacgttatccctgtcactgcggtgctggtcatttctagtgcgaggtttaccctgcctggaaaagataaagagccccatggaatttagtatgcccggaacaacaatatttcagtctgtcctttctgaggaagaccatgccaacctttccgcgcacgagccagtaagtttcacggagagacaagcggggtgcatccttagtttggctctatgttgtatcacctactgcaaatatcttgctaccatatgctacggcccacatcattatctggcagaccatgcaaaatatctacttgaaggtatcgatcctgcacaatgaatcttctttcttggcataggtgtgttgtgaaatcttatgctcttatgagttaatgtaaaacgtgtcgtgattatcaaggctgttgagcttattttctatatgattgtatgctgagctcgttatttattattttgtatggaagcaccatttttct

SEQ ID NO: 33984 - DNA, 973 bp, Zea mays
  Clone ID: UC-ZMFLMO17201F07_FLI
gggttcattcgagaagctgctgcccaggtcggccgggatcggccggcgcctggtggtgcgggcagacattaaggtcatatcgacgggcgaggcctgccgccgcgggctcgctgccggcatcgatctgtttggaaggcggctccgtggggtatccgcccacctccgagcccagtttccacgaggaaacccgcccgatctccagacgtcgggcggctatcccgacttgtcttctcctactcgtgtggtcggcgatgctagtgtacccatcatcgccattcctccatttgtgatcctgtccagtggcaatagcggtgggagcagggatggaggtagaggcggctttgggcgggcgcagcctgaccgacgtcgacgacatggtgggagtttgtcgtacaggccaccgagcatcttgccccaacctagggtttgcctacttgagtgagaagagatgctgtttgtggaagaagaccggggccctatttgattcacacagctcgcctgccaggggccatgcccccatctccacctttgagcgcttcgcccaggtttggaagttctttgttacctttggtgttgttcttgggcttccatcattcacattggatgagttcgtgcaggctcttcatgattatacagacaattgaaaaagagaattaatcttttttatgggcaaagtgttgaagatggctttggtgaaggaaatgtcttgttagcatcaagtaagtggcgacatcacaacccctacaagcttgtgccttaaaacaagaagatacaagaagttggagtgcttttgtgaaggcttttgagaatcacttgaagcgttatgacttctatgaatgattttgtaaagtgtttgcaaatttgtgcaaaacataataacatgtgtaggttttgtgaatgattttgttgtggtgcttgttgatggtttatttgatgtggatctatcattgtgcaatactaattaaatttgtat

SEQ ID NO: 33985 - DNA, 1888 bp, Zea mays
  Clone ID: UC-ZMFLMO17201F12_FLI
ccactactcaggactaaagcagtagtgtactcgtacaattgagccgcaagaaaagcatcgcatccatcgtcttctccatcagtccatcccgattcccgagtaccattcgattctatattccgccattgttgatcggctcgctcgccttccttggttcatcactagtaacggcaggaaaggagccgagccattccaatccaagattgattcagtgctggccatggagaaggagactccgccgccgctgcatacggaccaggagactagtgtttcatccgagcaacaacgtccacggccgcatctctccatcgacatcccggcagcatcaagcctgccggcagatcacctgctcccgatggctacggcgacgcaggccggcaccagcatcaccccgccttccaccaggagggggcaacagacaagcagcaacatcctcagcacgcccgctccttcctccagctctagcaagccaagcagcaggccgcctctgcgctcgccgtccttcatgctgaggcagacggtgaagagcctgctgccgttggggagcttcaagtcgtcggccgtcaagagctacgaggcctccatctccaagctgttcggcgccagcgccaccaaggtgatggccaggacgccgtcgctgccgctggaccatgctctgtcgtcgtcgccacatccaccaccagttcagcagaaatcagccgcgctccaccacatgtgccgctcgcagtcgctccccacgaccaccaacatgaagaaggcgaagctgctgaacgcggccaacgccaagagctttaagcggatggactcgctcggcggcacgttccgcgtcgtgccttccacgcccagaacccccgccaccgccgtccccgacgacatagcccctgctccaccaggcggcccaggggtcgacggcggcgaggacataccggaggaggaggccgtgtgccggatctgcatggcggagctgtcggagggcagcgacaccctcatcaagctggagtgcgcgtgcaagggcgagctggcgctggcgcacacggactgcgccgtcaagtggttcagcatcaagggcacccggacctgcgaggtgtgcaagcaggacgtgcagaacctcccggtgaccctgctgcgggttcagagcgtgcagcggcgggacctcctgaatcgcggcggcgccagcaacacgcccagatacgaccggtacagaatgtggcacgggacgcctatccttgtgatcataagcatcctggcctacttctgcttcttggaagaactactggtggcccatgacggcattgttgcgctggctatatcgctgcccttctcatgtatcctgggcctcttctcgtccttgaccaccacaagcatggtggcaagaagatacgtatggatctacgccgcggctcagttcctcttggtcgtcttcttcacccatctcttctacagatacctccatttgcaggccgtgatctccatcatcctggcgaccttcgccggcttcggcgtgggcatgaccggcaactccatcgccatcgagatactgcggtggagggcgaggcgggtggcgcctcctacccagcaggcccgccgtcgtcgtcaccgcaggccgcgtgcacctcaacatcaggctcctgatctgccggcgtctggttctgctgatcagacttccagccagccttcagctgcagacatgggaatgggaattggagcgggacagcaccacgtcatggccaccgccgccggcgatgttgagaacccacccgtccctcaggcatagaacgtcgttactgtggagcaggagcagtttgtagtttgtagtttacctgagagggaccttgttacactagtatatatacatgatagtacagatggagtctgaatcttgtttctc

SEQ ID NO: 33986 - DNA, 1380 bp, Zea mays
  Clone ID: UC-ZMFLMO17201G03_FLI
gcgacggaatctcacctgctctgctcctcagccccagcccaggccttcgctctcgctgccctgagccctccgcgttccccgcccgccacgcgatgccggcgtgggccgaagcggcgctcgtgctcgcctcaccatcccccgccaccgcctcctcgaccacgtcatcatgtggcgccaggccgcgcgccgccgtggggtccgtcaggctcttctgcaagggattcccttgtagcattcgttccaaagctggattccagattcataattaccgtacaaggatgtttaagattaaagcaaaagcagaatctggtgatggctacacacggcttgctccacttagatttgaatctccaagtggccagcttctgattcaaatactacaatcacaccctcatcttatccctgcaacagttgatcagcaacttgaaaatcttcaatcagagaaatctgcccaaagtgaagaagcctcaaaagttccccaggacctcctctacaagagaattgcagaagtcaaagagaaggaaaggcaaaatgccttagaagagattatctactgttgggttacatataggttcatggaaaatgacatatatatgacacctgcattatcaccagggggtggccctgtacgtgacatatccgcattgcctaatcaagaagacaaattgcgaaacatacactccgcagacgcctttgagatgatacaaaaccatctcaatcttatcatgggagaaaagatagcatcaccgcccgatactgttgttgagatcagcaacttgaatcttggaaagctgtatgcagcatccatcatgtatggttactttctgaagagagtggatgagcgattccaacttgagaaaactatgaagactctcccaccaaagcccaaccagcagatagtatttgaaaacctacagcctaatccattctgggatatggagtccttagtacagattacacctgatggggaggagataagtttggacgatgaaaaatcaaatccaaacaagttgaggtcttatgtctcacaactggatgctgacacattgcaaagatatgctactatcagatcgaaggaagccgtctcactgatcgagaagcaaactcaggcgttgtttggacggccagacatcaaagtattggacgatggttcggtcaatgcaaaggatggcagaatgataacaatcacatttacagagctcaatcatctggtcttggaggcagttgctttcggttccttcctttgggaagctgagagttacgtagaatcaaaataccattttgtcaacagttgaatgtgccttttcttatttgaattttggaaatggtttgtgtacatgtgatagggtaggatccatatctgatctattttttcagtgt

SEQ ID NO: 33987 - DNA, 1246 bp, Zea mays
  Clone ID: UC-ZMFLMO17201G12_FLI
caggagtatgaagcaacagtggctacactttcacaaatggagaagagagctgtaatgacagaaacaatgctggaagctacaaagcaataccagactgttgcttcaagttattcttttggctacattttacttccactttccaagcatctatatcacttacgagctattattggaagtctattacttcaaccgcggcatgactacttttcatgtgtcccgctaactattccttgagttggtttcttttcctctccaattattatatttttttcatgtacactactaacattttctcgatattcctacttttaatttaataagcttgaaatctaatttcatactacaatacttcatttacttgtaaccttctatagttcaattcacctcgtgcataccatgttcttgggaagataaatcaagaaccaaaccaagatacgtcaacaagagaatcaacctgctttctaggggacttggatggcttgacaagagcaaggcatgcccctaaagtcaaaagttaaccaaaaataactatctgggttcatgacttctggtaccaggccctacatgtcattatcagagcccttgtttcttactaacctaattgatctagaaagatcatacaaagttgagtatcagtggagtcacatatttgaatttttttagcagggaatgcatgattctgctgaaacatcttgaggctaaactcatctagagtccaagatgaaggcatagctcccgacaagatctggatttttcattaatgcttggattgcctgatcatgacaacaatgtgttgaaatcaacttatatgttttatcgggagattgagattcagctggtattttctatgaagttttgcaggaagtgtatcttgtaccatattgagttcagctatcagataaagttttgttgacggcaatgcgacaccacttagttggggattgaaggaaacaggcgagcttgagagctgtagacattcaacaaagatggcgctacacaaactctacaaggttaaaccaaactgcgttgtactgatcacatgggacgacacatgctaaaatcaatataacagtaacttgatgggactaacagtgcctaatcactagaaatgttatagttctgtcacttcaaacattttttgttgtaattttacatggtaattcagaactctgtttatggcacatgttgctcaaacataatgatcgagtccctcttcatggtcggagaaattgggggcaatgactac

SEQ ID NO: 33988 - DNA, 2338 bp, Zea mays
  Clone ID: UC-ZMFLMO17201H02_FLI
tgatgacatagctggtttcgtcagtggaggttgctatgagtcctgaatttctaacccagtatatataacagagttatgatatccagaaggcagacaattgtttcttttcgttttcttgttggtttgcacttgatgtttcataattggaatggataaaactactcaaggccttgagtttggtggtggtatcaactctccgaagccatattgctattggagcacaactcaagacactactgtgcacaaagatagtacaccagaggcatattccaccttttctatttccaactcaaaagcgtcaaaaaggaagcaaggtgccatgtctggagcaaaaggtggaaaccctttactcactttgggtctaggctgctcaccaagttcatcttataacagcaagctaagttctggcactgcttgcataacatcatcatctttattaaaggagattgatgaagagtcttcaatagatctcggccttaaccttgggttgtatattggaaatgatattggacactgccaacagaaatcccatgctggttttgaaaatgtgctctcgacaaactctcctaaactggatcttcagttgagtttgtctaccagttcgcctgaatcagttgtcattgatacaaatagatcaccagatggcttggcgatgccgatggccaattcaccactcgccattgtagaagaaggatcagtaccgcatagttgggttttcgagcattcaattgtttcgtcatcacatgcttctaaggcaacgcatggctttccattatcaaagaaaaccaatggaggcaatgcctctgtgccttctcatgtcatgtcatcaactatgtttacaagtgtgaaaggtccagttgcctctgcttctgagacaactaactcccaacaacgcaacagtaacgctaaaagctgtcagtttccaggatgtgtgaaaggagcaagaggggcatcagggcgttgcatagcccatggcggcggtaggcgttgccagaaacctggttgtgagaagggcgctgaagggaggacaatctattgcaaggcccatggtggaggcaggagatgtcaatttctcgggtgtacaaagagtgctgaagggcgcacagaccactgcatagctcatggaggtggccgccgctgcagccatgaaggttgctcccgagctgctcgtgggaaatctggcctgtgtatcaagcatggtggtggcaaaaggtgtcagaaggagaactgtaccaaaagtgcagaaggccattctggattctgcattgcccatggtggtggaaggcggtgccagtttccagactgcacaaagggtgctcagggaagcacaaagttctgcaaggcacatggtggaggaaagcgctgcacattcgtcggatgcaccagaggggctgaaggtagcacttcattttgtaagggccatggtggaggcaagcgctgtgcctttcagggcggtggcgtctgcccaaagagcgtgcatggtggcactcagtattgtgttgcacatggtggtgggaaaaggtgtgctagctttggttgcactaagagtgctagagggcgcacagagtattgtgtgcgccatggaggtggcaagaggtgcaagttcgagagctgcaccaagagtgcgcaggggagcactgatttctgtaaggctcatgggggaggtacacgatgcctgtggggccaggcggacacaagctttggtgctggtgcacagcaatgcgataaatttgttcggagcaagaccggtctctgctcagctcatagtgctttgatccaggaccactgtgttcatggtggtggtacattaggttccgctatctaccagtctgtgcatgtcaaacctactgagatgatcaatggtgataaaactttactggatccgggtgtccctgttccaaacagtggtgttcatcctcctgtcctagctcagtctatgatcgatccgctgccagagggcagagttcatggtggtggcctgttggctttactttcgcggggcggaagcagaacaagcgctggtggctcagaattgtgcttcgggcaagatcgtgtggatctgaggctatcaggatctccatgaaactgatgactgcctgcagttttgatccaaattgtgttgctcatgctcgggttccataggatctacccggacgtgtactgtgaatctacccagacgtgtactatgaaaataagagggtagctcctagagcagatgtgttgttttattttagttaattgtttcagtgcatgtaatcacttactttaatgctcatgtttggacttgattaactctcagcaacttaaggttgaaatataatgtgcattttgctttttt

SEQ ID NO: 33989 - DNA, 2109 bp, Zea mays
  Clone ID: UC-ZMFLMO17201H08_FLI
ggcaggcaagggtgatgggccggcaatcggcatcgatctcggcacgacgtactcttgcgtcggcgtctggcagcacgaccgtgtcgagatcatcgccaacgaccagggtaaccgcaccacaccctcgtacgtcgccttcaccgactccgagcgcctcatcggagatgcggccaagaaccaggtcgccatgaaccccatcaacaccgtctttgatgccaagcgtctcattggcaggaggtttagtgatgcctctgtccagagtgatattaagctgtggcccttcaaggtcattccagggcccggtgagaagccaatgatagttgttcagcacaagggggaggagaaacagtttgcagccgaagagatctcctctatggttctcatcaagatgcgtgagatcgctgaagcttaccttggcagcactatcaagaatgctgttgtcacggtccctgcctacttcaacgactcacagaggcaggccacaaaggatgctggggtgattgctggcctcaatgtgctgcgtatcatcaatgagccaaccgctgctgctattgcctatggtcttgacaagaaggcaaccagtgtcggtgagaagaatgtcctcatctttgaccttggaggtggtaccttcgatgtctccctccttacaattgaggaaggtatctttgaagtcaaggccacagctggcgacacccatcttggtggtgaggactttgacaacaggatggttaaccactttgtccaggagttcaagaggaagaataagaaggatatcactggcaacccgagggctctccggaggctgaggacctcttgtgagagggccaagagaactctgtcttccactgcccagaccaccattgagattgactcgctgtacgagggcattgacttctactccaccatcacccgtgccaggtttgaggagctcaacatggacctgttcaggaagtgcatggagcctgttgagaagtgcctgagggatgccaagatggacaagagcagcgtccatgatgttgtccttgttggtggctccactaggatccccagggtgcagcagctgctccaggacttcttcaacggcaaggagctgtgcaagaacatcaatcctgatgaggccgttgcctatggtgctgccgtccaggccgctatcctcagtggtgagggcaacgagaaggtgcaggacctgcttctgctggacgtcactcctctctctctgggtctggagactgccggaggagtgatgaccgtccttatcccgaggaacaccaccatccccaccaagaaggagcaggtgttctccacctactcggacaaccagcctggtgtgttgatccaggtgtacgagggcgagaggacccggacccgcgacaacaacctgcttgggaaattcgagctctccggcatcccaccggctccccgtggtgtcccccagatcacggtctgcttcgacatcgacgccaacggcatcctgaacgtgtctgccgaggacaagacgacggggcagaagaacaagatcacaatcaccaacgacaagggccgtctgtccaaggaggagatcgagaagatggtgcaggacgcggagaagtacaagtcagaggacgaggagcacaagaagaaggtggagtccaagaactcgctggagaactacgcctacaacatgcgcaacacgatcaaggacgagaagatcgcgtccaagctggctgccgacgacaagaagaagatcgaggacgccatcgacgcggccatcagctggctggacgccaaccagctcgccgaggcggacgagttcgatgacaagatgaaggagctggagagcctttgcaaccccatcatcgccaagatgtaccagggcgcgggtgccgacatgggaggctccggcggcatggacgaggacgctccggctggaagcggtggccctggccccaagatcgaggaggtggactaagcggtttgtgtcagtctcgtgtgtctgctgcagtggctggctggcccagtcgctgctcgatttatcgtcgtcgtcgcggtgtatccgcgttagaaccttttgttggtgaacaatattatcgtggcacgcgttttaagtaatacggtattctggttcggttt

SEQ ID NO: 33990 - DNA, 2571 bp, Zea mays
  Clone ID: UC-ZMFLMO17201H12_FLI
cccccttttcccacgccaagaaaccacgctgcgaccatccgtcctcctcgtcgtcgatctcaatctctcttcgtcacgatcgcaaacagatattgacccgtccgatcggctccgcatcgccagtttgcatctgcttccttcggtgagggtgtgtctggttcgtgctcccgcagcgaaggctggagccgagatgacaatgccgggctctccggcgaggccgagtttctcggccctccgcggtgcccggtggcgggcctatcttggcgtcatccccggcttcgccgccgtctccaccgacgagctccgccgcgccgccgctgactcccgccggagatatgctaatctccggcgaaggctgctaatagatcctcatctctccaaggatgaagaaggtgcccctgacttgattgtggagaatccactatcgcagagcccagggagcacatggggccaatatttcaggaatgcggagcttgagaaaatgcttaaccaagatctgtcccgcctataccctgaattgggggacttcttccaaacaagcacatgtcagtctatgcttggacgtgtattgttagtatggagcctcagatacccagagtttggttacagacaaggaatgcatgaactcttagctcctcttctctatgtacttcacgctgatgtgcagcacttcagacaagtcagggaccttcatgaagagcttttgggtgatgattttgacggccaaacttttccagatcgttcaaagctgaacagaagtgacaggaaaaacagtgttgagggtagaacagaaaagttcatggagcatgatgcttactctatgtttgagaatttgatgaatggtgcacaaggagtggttgctatcactgacttctattctctgagttctgccccagaatcaagtatgggtttaacaccagtaagagaggcatcgtctgcaatatatcatttgcttgctagtgttgattcctctcttcatagtcaccttgtggagttaggagtcgaacctcagtacttcgcattacgatggctccgtgtcctatttggtcgtgaattttcacttgacagccttctgtttatttgggatgagatcttctcttctcctaaccattcttattgtactgacatcaggagtagggcagattatcaatttaaagtgttatgttctcctcgtggtgcactgattttgtcgatggcagtatcaatgatgctccatctcagatcctccttattagggagtgaacatgcgacttcttgcctagtgaggttgttaaattttccagaagatattgacttaaagagcttaattgagaaagccaagttactgcaatcttttgcccttgaagcaaatcttccttcatcctcatcgagaggaagttctctcttgtctacacccaactattgggaagagacatggaagattctccagccatcaatggaccaaaagggtggtggtgtcctcaagatgaagggaaggggcttcttgagaagaagcttgtctagcactgagtcgaatgtttccagaagcaaggctgctaattttgaaaacaacgatatgacttcaactaggcagtccactaccgatgaatttcacaatgctgatgtagttcctgcggagctgataactagtgtgccacacatgcttatagaaaaacaaaagcatcatgttggtaaaggtactgcagagactattgggagtaattcaaagaatggatgtgagacaggacagcatgatggttattgctcaacttcaggtgaaattagagatcctcttggagcagctagcgggtatttatcgaggagtagcagtatcactttgtcatgtggtactgaatatgatcatgatacccatcatctggaagaaccatgtgatccctgtgatgacagagtggttaatgaacctgatccactctctgtgcacaatactagaactgatgaagcagcaacaacagatcgaacatctggaatagtggatacttatccagttcgacagcgtagactgtgttctgttgatgggaagctgaaaataaaaacccgaaatgccactagtgctaaaggtgacgaaaaagaaacattggcaatatgttcaatttcaaatgtggctgataaagagttgagcagaacattaagatctcttggtgaatctatggttgagaacatacaggatatcgaattgctgttaaaaccaaattcactctcgacttcagtggagaaacttgaggaagcaattcctggaagcacagagcaagctaaggcagtagcagctctaaaagaactcaggaagatcagtgaccttttacgccaaatctaacccgtacaactacggattcttctatacatatggtgttgtagtttttatacgtatctccattggacaatggatgtgatgtaacatgctaacagtatataaccatctgattgatcggtaaatagtaatttgtatgctccctgcaagctgataaattgtaaatgtacatctgaacagctgcctgctggttgtgaagtgaaggcggcaaacattttttttttttggcttgtgacccaacaataaatattcaaggtttctgcgtt

SEQ ID NO: 33991 - DNA, 776 bp, Zea mays
  Clone ID: UC-ZMFLMO17202A02_FLI
cgacgccacccacatacactcccgcccctacgccccacaaacccacaccaaaacccactcccactcctccgacgtacaccccgacccccaagcctccgacacctaagccgaccccgccgacgtacactccaagccccaaacctccgacgcccaagccgaccccaccgacgtacaccccttcccccaagcctccgacacctaagccgaccccgccaacgtacaccccttcgccaaagcctccgacacccaagccgaccccgccgacgtacaccccttctcccaagcctccgacgcccaagccgacacgtacggcaccggcgcgatccccgacaaggagatcctcaagattgtcaaggagaacttcgatttcaggcctggcatgatcatcatcaaccttgacctcaagaaaggcggcaacgggcgctacctcaagacggcggcctatggccactttggaagggacgaccctgacttcacctgggaggtggtgaagccactcaagtcggagaaaccttctgcctaaggcggccttttttttcagtaagaagcttttggtggtctgctgtgcttaatcatgcttttatatggcttctacatgttgtggttctttcttgatctgcaccgcgcttatcgtttgtgttgtactgccctaataagtggtgcttatgaggactgtttctggttttgctgcttatgttgtaatgctttgaaacaatgaaagaagctacaggccacagctattttgagaagtaatggaacctcgtgccgttttgatt

SEQ ID NO: 33992 - DNA, 519 bp, Zea mays
  Clone ID: UC-ZMFLMO17202A07_FLI
ataagtataatgtcatcatgaccggtgttatcactgtcaaaaaaaatctagctatatattagagctacatattaaagtaaaaccatcttgcctgattctctttgtcatttctgtagtgttaaaataatcataattgatttaatttaagactctacatagcacttatcatcgtaacatttcaaacaaactcttgagcgcattttgtatagctcactcattctattttataacagttgcttcaaactcacaccgataaaggtaaaaaaaggttgtgcctcttcttcagtctcctccaaaaaaagggttaaacaaggatcactgcacatcaacaattctaccaactaaaaggatttatcaatctgactatagcccttcagccataatactacccgctatataacttttgtgcaaatgcttccattaatctcgaaatatgtcctacatatattagcatatgttagtgttttgtaacttgggatagtgcatgaatatatagttagggagtgtttgttcaggtat

SEQ ID NO: 33993 - DNA, 1343 bp, Zea mays
  Clone ID: UC-ZMFLMO17202B07_FLI
cgatgaaattaaggggaagcatcaacagatagcatctttggagagagagatagctcatgcaacattaggaactcaaggaaaggtcgatacgttagagcattcaccgtcttatcatgaactacttgagcagctcaatgagaaatctttagaacttgaggtgaaggctgcagataatagagtgatacaagatcagctgaatgagaagataactgaatgcatggaattgcatgctgaagttactcatctcaaagaacagctgtcccaagctcttgaagctaaggatttggtgtcaaatagcatgatacagaataatagagttaaccgtgaagttgaacaccttgttgatcaagatgttccaagagagatctcttctgaaccacagcaaaaacagcagctaactttcccatcttattagcactatggtcttcagtccgttgaaatcaatgagctgaagcaaaaggtgtctgaactcatggaaatcaaagctcaacttgaggatcgcaatcaaaagctactggaggaaagtacatatgcaaaaggattggcttcagctgctggtgtcgaattgaaggcattgtcagaagaagtgaccaaactgatgaaccaaaatgagaagcttgcgaccgagttgtcatcgctgagaagtccaactccagctccacgcagattcaacaatggaccaagaggtactaggagggaaagcatgagtaggcgagaaccagctagcagacgagacacgaatgcaagccatgaaagggaaaaggctctagaggcattgcttatggagaaggagcaaaaggaagcagagctccaaaggaaagtcgaggagtcaaagcagaaggaagccttcctggaaagtgagcttgccaacatgtgggttctagtagcaaaactgaagaagtcccagggttatgaccatgaggatctggaggccaaacatgatggctcgtgacctcttcagtttagatatctatcggcttggcttgcgtgtgggttttctgtatgtaaggttttggtattcgttttttctcttagcatgaattagtgtctcattctgtatattctccgcgtgttaaatatgccagtagtgccttgcctgactgtgcctagagctttcgatggatgctagagcggcattttgggttcttcaggcacataatctggatttgaagaaacagtgagcaagtgtttggaaatctgacgggtttctgatgcccactcaaatatctaacatgtattagcctgcccatcctgctcaggataacaaatgtgaatatgccctgaagtgtgagctacattgtattagaacactttcgtacaacatctttaatactgcttattgt

SEQ ID NO: 33994 - DNA, 2487 bp, Zea mays
  Clone ID: UC-ZMFLMO17202B08_FLI
caagcaccagttcaaagtaaatctatcaaaatgttcctttgctcaaaccagcctgcattacctcggtcacataatcagtcaagaaggtgtggccactgacccagagaaaatatcagcagttaaatcttggcctacacctcgttcagtcaaggacattcgaagttttttgggacttgccggatactatcgtaaatttgtaaaaaactttggcattatgagtcgccctctcacctctctcctaaaaaaaggccaattgtttgtttggaccgaggaccatgatcaggcttttcaagctctgaaaaccgctttagtctcggctcctgtgcttgccctgccggatttcactaaaacatttgagattgaaactgacgcttgcgattcaggcattggggctgttctccaccaagctggccaccctatcgcttttgttagcaagacattgggtcctagacatcaacccttatcaacatatgaaaagaaatgtctagcaattctcatggctgttgatcactggcgatcttacttgatttgtggacagtttgtgatacacactgatcagaaaagtcttacccatcttgatgaccaaagactaacaacaccatggcagcaaaaagctttgactaaactgcttggtttgcagtacaaaatttgctacaagcaaggtacctcgaatcgagtagcagatgccttgtctagactctcaagtgagcagatgttggccttatcagtgatacaacagtcgtggcttcaggatttagcagataaatatagttcttatcctgatacagcaccaattctccaggccttgtccctaaaatctccttccggcccttaccagattacacaaggcattattcgatatcacaacagaatcttggttccagcaacatctgaattccctctcaaaattttcactgcactccatgctgctccaattggtgggcattctggtttcttggtcacgtaccataagatcaaaaagcagtttgtctggcgaggcatgaaaaagatgatcgctacttggtgcagccactgttcaatctgtcaacaggctcaaccagaaagagtaaaatacccaggcttattacaaccaatccaagttcctgcagccgcatggcaagttatctccatggattttatcgaaggcctacccacatctgataagtataattgcattatggttgtcgtcgacaaattttcgaagtacagccattttgttccacttcgtcatccgttcactgccctgaaggtagctactcaattcatggaccatgtttttaaacttcatggatttcctcaggccattataactgacagagaccggctgttcacaagtgccttttggaaagaactattcaagcttgctggtgtggatcttaggatgactacagcttatcaccctcaatcggatggtcaaacagaacgtgtgaaccaatgtttggaaacgtacctccgttgcttcatccaagcttgcccaacaaaatggaaaaagtggttatccttagcggaatattggtataacaccagttaccattcctctcttcaaagaacaccttttgaagtgctctatggccatattccgcggcagctgggcattgacctccctgggcaatgtgatgttccttcactgactgattggctgcatgaaagaaagctgatgcttcaactggttcagcagcaactcatcagagctcaacagcggcaaaaacatcaggccgataaactacgttctgaaagagtattccaagttggcgattgggtctatttgaaattgcaaccttacgtccaatcttccttggtgaaacgcgccaaccacaagcttgcatttaagtttttcggtcctttccaaatcgtggcacgcattggacctgttgcttataaattgcaattgccagctacatctgctatacatcctgtgttccatgtctccttgctcaagaaagcagtgggctctactgatcaggttagctctgttttaccttccatttcagactccttacaatggccagagcagattttgcagcgtcgagtcgtccacaccccctccggcgatgttccacaagtgctcatcaagtggtctgcatggccagaagaactcgctacatgggaagatgaaccagtggtcaagcaacgctttcctgaagctgaggcttcaaggaggggagaatgtcaggaccatggtgtcaagcaaacaacagatgaaggagaagcgagtcgttcggcccaacagccgtgtctttgggccagattggacccagtaggcttccagccttgtattgtttctgttggcctgttggtcgttttctgtcgtgttaataagggagactgaaccgtatgcaagagagggaggaggagaggacggaagtgttaggagtgaacggcggttgtgccggccggtactggcctgaactcctgtaaaccccaactctgtatcgagtgaatacttcgtgagaggtggagagcaccgggagcggtgctcgcgatctc

SEQ ID NO: 33995 - DNA, 2217 bp, Zea mays
  Clone ID: UC-ZMFLMO17202B09_FLI
gtattcctcctcgttttcggaggagtccgccgtcatagcagctccactgccctgacgttcttcctctggtcggcatacctactggccgattccacagcgatatacaccctgggctacctatctgttgacagtatgtcagacgagcaccagctggtggcattctgggcgccgttcctattgctgcacctcggtggcccagacaacatcacagcgtatgcactcgaggacaatgcgctctggctacgccacctgcaaactctcgccgtgcaggtcctaggagctgcttatgtgatatacgagtacatcgccagcagaggggcattgctttttctggcctccttgtccatgttctttgccggtcttctcaagtatggcgagaggatatgggctctcaagtgtggcaacatcagcagcatccgcagcagcatcagcatccggaagatcaagactgacccttatcagctattgactttgggtactagcgaagaggatttgctgcttggagcccactcccagtttgatatctgcaaaggtgtcttcgccgatatcataatgctaccaactcccttagttcgttcacagcctaaaccacgttctgtgatatcttatctgggagaggatctatacaagttggttgagatggagctgtctctgatgtatgacttcctgtacactaaggcagcagtgatccacacatggtatggcttctgcatccatttcatctcgctgtttggcacagccaccacattccttttgtttcagctcagtatcagcaacagtggaaatcggtacagcagagtggatgtggctatcagttatgttttactggttggggctttggtcttggaaatcatatcagtgtgcagagctgtactatccacctggacatgttctttgttgcaccgcaggggcaggggatgggagtggtctctccacattgtcacttcccttggtcagcgtgtccatccagcaagtaggagactctggtcgggctccattgggcagtacaacttgttccacctgtgcacccgcaacaccaacgagatagggagcagactagcaacaaaactggggctcgaggactggtggaacaagatgcacttctccggaactttcccacacgctaactcgtctttgtcaatacaagatatcaagaaattggttctgcaagcactgcgaagcaaagagcaagcactgcaacaccaggatactgatttgaactcaagaggcagctttatactgaaacgtatggaggcctacaaggactttgctcgctggagcgtcaacattgacttcgacgagagcatccttgtttggcacattgcaaccgaggtgttcatcaggaaatccaaggccagacatgcaaaagaactccttgaggctactgaggacactgtcgaacgcgatttggtgataaggacaacccagtggcgccatcccctgcaagctggaacccgtactatattcttaaggaattgttccaccatgatggtcccagttgctccaggataccacggagggagaagcttgcagaggtggcctggagtttctcccaatttgcactgggatcagtaaaggcaccaaatccacatggggactccatccgtgacagtgctaatatgtatgcaatcttgctcgccaacgagcttctgagcatagagttgcagtggcaggatcagcgtgacactttggaactgatcctgggggtgtgggtggagatgtcgttgtatgctgcggatcattgcagccaagagtcccatgccaggcagctcagtaatggctgcgaattcattaccatcgtgtcgttgctggcacaccacttcaagtactactctggggccttcaggggcgccgacaaccttggagaagataaacccgctagtgaaaataaacccgttactgtaaataatcccatgagtgaaaattgtgggaacttggtttagatgagttcgcacaattttcatttgaaatgacctctctgtcagttcagggaaaaacctgaggattcatgactccaaacaagagtaaatatatttatctgtcgatgaacatagtaattaaagtgctaggattcatcaatgttagctttggactctacattcaacagtttgtaaggtgagtctgactgtgtgtgtgtgtgacatgctcatatatcttccatgatcaaggtaatgatcggcgttgagtgtgttgctcaaccgccagtatacaatatgc

SEQ ID NO: 33996 - DNA, 1683 bp, Zea mays
  Clone ID: UC-ZMFLMO17202C09_FLI
tcgctgctcctcaattcgattggctccgtgccgacctccaggttgagaaggaaagcatcgcgagttcgccatacggatgggttccaaagcgcctttctgtctcacgctcctcttgctgctcgctgcggcctgtggacctgcagcacatgcccacgatgctgtcgagctcccgcatcatggcttagccttgaaggaacaaatttcttcaaccaagattcctgcccgtctcaagagtggcagcggactatgctcggcctgtgaaaacttcacgagcgaagccgtcacttatctcggcaaggaacagacacaggacaggatcatggagttccttcatgatgcttgctcccaatcattctcctttgaacagaagtgtgtcgagctgatggactcttatgcgactctcctgtttgccaagatcacggagatcagaccggaagcgttctgcaaacggtatggcctgtgcagggacacagctcttctctccggtgtgggaagtgacagcacgtgtgtgttctgccaccatctgctcgatgaaatcatgtccaaactgaaagatccagatgcggagtttgagataattcagattcttgtcaaggagtgcaataagatcgaaggtcacgtccagcaggtaggctttttggctcttcctctgtccttgtgattctgtgcaaaaggcgagctcgtcctcttccttaatgaggttcttaagagtgtttcctcagctgtattggttacccttactactttggattttggaaacagtccgagacccttattagttaacaatatcatagttgttgcaaagatactctactttttttcatcatctcttctttaccattcatatctcccagttgttgcaagggaaaattaactccagtaattctttcttgaggggtagaacaggagtgtcgttctcagattcaatgattatcaaacaacatgtactaattatattttagcaagctggcagttgatgtgattctctatgtttacattttgtcaaattaacgacaagagggttaagttttagaagcaactaccctgcactggttaataatatctgtgaggacccaagttggtcccagtcctcttcgattggtgctctgttcctgtgatttgaggaaagtttcagtacaacacattgtattttgattagtgaatgaagcatttagacgatattgttgcaggtgtgcattctctttcttacatttgatttaagctttcttatttgagctttatgatactatgtactcaatacttgtgctcttctaagataggttgagcagatagtggttgaaaggtctgaaggttggcattgtggatatttttgctatcatgcatggattcccagacaatgtgaggacgaaccagaagggcgagttctgggtggcgatccactgtcggagaagtatgtatcctcggctaatgagctgccatgtcaagctgaggaagtttttgctcagcttcccaatccctgccaagtaccactacctgatgcatatcgatagcaagctctacgcgttgatcatcagggacagcccgatggccagatgcttcacatcatggaggacgacaagggagaggtggtgagagttatcatcgaagtggagggtctgtctgatgccattcatcgctgtctttgacctcgtgaaggcgtcttagccacttcaatttgattgg

SEQ ID NO: 33997 - DNA, 1138 bp, Zea mays
  Clone ID: UC-ZMFLMO17202D01_FLI
attcctacaaccgtgcactccatcggcgtctgctacggcacgctgggcaacaacctgccgtccagcagcgacgtggtgcagctctacaggtccaagggcatcaaaggcatgcgcatctactcccccgacgccaaagccctcgccgccctgcgcaactccggcatcgcgctcatcctcgacaccggcaacggcggcggcgtcctgggccagctcgccaggagcgcctcgttcgcggactcgtgggtgcagagcaacgtgcgcccctactaccccgccgtcggcatcaagtacgtcgcggtgggcaacgaggtgcagggcgacgacacgcgcagcctcctcccggcgatgcgcaacctggacgccgccctggcgcgcgccggcttcccgggcatcaagtgctccacgtcggtgcgcttcgacgtggtcgccaactcgttcccgccctccagcggctccttcgcgcagggctacatggcggacgtcgcgcgctacctggccggcaccggcgcgccgctgctcgccaacgtgtacccttacttcgcgtaccgggacaacccgcgcgacatcagcctgggctacgccacgttccagccgggcaccaccgtcagggacaacggcaacggcctcaactacaacaacctgttcgacgccatggtggacgccgtcgtcgccgcgctcgagaaggccggcgcgcccaacgtcagggtcgtcgtgtccgagagcggctggccctcggccggcggcttcggggccagcgtcgacaacgcgcggaaatacaaccagggactcatcgaccacgtcggccgcggcacgcccaagaggaccggcccgctggagaccttcgtcttcgccatgttcaacgagaaccagaagggcggcgatcccacggagaagaacttcggcctcttctacggcaacaagcagcccgtgtacccgatccggttcaactaattaagagtggcggatcggaggaataatacatcttcatcaatcaattaacctaataatatgctacatgaataagctgctgcgtgcatgtatgtggccgccggacttgtggaagagcggtgcaattaactgtatgcacgtactctatctatatatgatgaataaaaagagatagaattctgatgcattc

SEQ ID NO: 33998 - DNA, 1710 bp, Zea mays
  Clone ID: UC-ZMFLMO17202D03_FLI
ggaggaggaggcgcgcctcgccgagatcgccagggaggaggcgcttgcgcgggcgcgggcgcgcgggggcgcgccgcccgagctcctcgacgtgctgtgggaggcccggcgcagctccgtgcgcctccgcgcgctgcagcagcgcaaggaggccgcgcacgtcctcgagctcgagaggcggttcaggctcttcgacgacctcatccagcgggcgtcgcgtcttctgtcccccggcggtggtgccggggccaggatcggcacgggtggtgccgcggtcgaccacgacgaggtcgtcgaggtcgaggccacccgggacacggagctggacgccgcgccagccgagattggtcgcgggagcaagggcggcttgggactggaacccaagtccgtctcgtcgctgcgtcgtgctgcttcggcaggtactgacacagaaaagctgggccttatccaagtggcaagccttatagagtcatcggcaaagaaggggactacagagctcaatctccggggtaagctggtggaccaagttgaatggctccctgtctcgcttgggaagttacaggatgtgactgagcttgatctatctgagaataggatcatggcactcccatcaacaattggtagccttagatacttgacaaagctcgacctccactcaaaccagctgatcaatctgcctgataccttcggggaactttccagcctgattgatcttgacttgcgtgcaaaccagctaaagtctcttcctacatcatttggaaatctcacgagcctcgccaatcttgacctgagctcgaatctgttgaaggtccttcctgattgtttaggaaagttgaaaaacttgagaaggttaattgctgagacgaatgagcttgaggagctaccctatactattggatcgtgcacctctctcgtggagcttagactggattttaatcagctcaaagccctcccagaagccattgggaagttggaaaacctggaaatcctgacgttacactacaacagaatcaaaggcctgcctacaacaattggccatcttaccaggttgagggagctggatgtcagtttcaacgaagttgagactatacctgagaacatttgctttgcagccagccttgtgaagttgaatgtcagcaggaactttgccgacttaagagccctgccaaaatcaataggggaacttgagatgctagaggagctggacatcagtagcaaccagatacgagtgcttccagactcttttgggcatctctcaaagctacgtgtgtttcatgctgatgaaactccactggaagtaccgcccaaagaagttgtaaagctaggggctcaggagctggttaattatatgaagaatatggttgctgcaagggaagtgagccagaatcaaacagataagaggagcttctggacctggctccgctcactgtttggttgttacaaaaagaatcaaggattgggaccagttccagcctagctgaaccatatcgtccgcatgtattgtcatgaattattcagttttgctccatctctcaagtcagcgacgaaatgaggcatgactactattattatttcaactttatgtttgtgtatacaatggataaatattgtagcgctttcttgtacataagattaggttatgtgtaagttcatctgtacgaaacactatcatgttaatccatgaaacacgagctgccgaatattactagc

SEQ ID NO: 33999 - DNA, 490 bp, Zea mays
  Clone ID: UC-ZMFLMO17202D12_FLI
tagctattctattcctagttgtattcgctgcgtgctggtggaagagacgccagaacattctccgtgctaaaagattagctgcagcaagggaagctccttatgcaaaatcaaggacccagttcacccgcgatgtgcaaatggccaagcatcaacggacacatgaaaatgctcggagcagcaacagtgaaggctcgccacatttgctttcctagctcggtgagaagactgcgacagtgacttggcttccatctattcttcagttcctcctttgtatgctcctctgcagtcttgaaagacgaagctgctgtacatactagctaggtcacgaatggtgtatatacttgtattttttttggtgatctagaactcagtccaggagagggatcagtctatcagatgagagaaattacccatttcatcctacttactgttctgattactgctgttgatttccccttcactgttcaagtatgcttattgtcagttttgt

SEQ ID NO: 34000 - DNA, 1071 bp, Zea mays
  Clone ID: UC-ZMFLMO17202E05_FLI
caacactcacgtttctccagacacagagggcagagcgccgccgccgccgagtcaaggatgatgggcagtgggatgggcgcgtacggcggcgcgctgcgaccggtggagagcgcggccggggagacgatgctgctgtggggcctggggcagcccgagtcgcaccgcaacaacgcgctggtccgccaggcggcgcacgccttcgagctcgacgcctgcgggcggcgcctgtccctgctgcagtccccctcctccatggccaccccgggggtcacgggggcggtcgtctgggacagcggcgtcgtgctcgccaagttcctcgagcactccgtcgactcccagcggctgctcctccgcggcgcgcgcgcggtggacctcgggtccgggtgcggcctggtggggtgcgtcgccgccctgctgggcgcccatgtggtcctcaccgacctcgccgaccggctcaagctgcttaggaagaacgtcgccctcaatgtcgacgacccccacgtcccgggctccgctcgggtcacggagcttgtgtggggcgacgatcctcaccatgaattgctcgaggagccactgcccgatttcgtgcttggctccgacgtcatatacaacgaggaagctgtggacgatcttctgatcactctcaaccaactctcagggaagcacactactatacttctagctggggagcttcgcaacgatgctgtgttggagtgcttcttggaggcagccatggaggacttcctaattgcgtgcatcgagcaggaccaatggcaccctgaattccgcagcaaccgtgtagccttgtttatcttggtcaagaaaccagagaaacctagcgcagagtagtcgtctctcgtctgtttctcgccttggtgtagaacaaggataggaggcatctgggttttccctttttccaattccaattatgttgttgcgatagccaaggttttagcgccggcttaagccatggaagtttgatagctcattgtatggtttgcttgcaacctattctgaaagtttgtacaagagtgaaagaaaggattttagataaccgatgtctgaaactgc

SEQ ID NO: 34001 - DNA, 478 bp, Zea mays
  Clone ID: UC-ZMFLMO17202F06_FLI
ggatgtgcatggttggtgatagactggacacggacatactatttggccagaacaccggctgcaagaccctccttgttttgtctggttgcactgccttaccagaagtgcaggatgctcgtaacaatatccatccagatctctacacgaacagcgtgtatgatctagttgggttactgcagaagtaattctccttggtcgcattgcagcgcaatctcagcgcgctttggataacctgtgcttacatgaagcccttgtgcttgaaacaacaattttcaactttctttggggtaacctgtttgacagtaacaaaatctttcaagtggattcctacaaattagaccaatttgacaaccttgtaagcgtgattgtaaagctttaaatctggcaacttgattccgttgccggaaaatatattggttggagtatggaattgtacagaatcgaattgtaataaagcaacgtgttatactttgttgct

SEQ ID NO: 34002 - DNA, 2231 bp, Zea mays
  Clone ID: UC-ZMFLMO17202G01_FLI
aaacaaatgccactatgcggctgctagaccgtcgtctcctttcctcccccaatccgccatttggcttcgctggcggcggcggcggctggggaaggcaggaatcccggcctttgcttgcgcgccactccgggcaccggctgcagctcgcagaaatggttagccagtagtatgtatgtgcattctgtatatatacaagagagcaatcatttctttggaaaatggcacttccactctgattgttaaatagggtgccttaccctgtggaaaggggttgaactgtatctgtaatctgacactccacatctccagctgaacaaaatggcctccaatggtaatggaaatctcaaatctgatattcaacaagtagagtcaacagcttcggacaatgttcaaggcgcaacaggcgtcaacactcttgctactcagggtgtttcacgacatgaaaagccgtggagcgggtttagggatttctggaatcgccttggtactggccccaagttaaagaagcttggtccctccacttcgttcaagtttcaacagatcgcacttcaacgtgatgagttctcacgttcgatccattcggacaaccatgttagccacgagcatttccagtttatccggaagattaattgggaacaactgtgggtgatggctaggaactggataaaagagcctatgaatatggccctttttgtttggattgcttgtgttgctgtatccggtgcaattctcttccttgttatgactggaatgctgaatcgtgttttgcctagcaaatcaaaaagagacacctggtttgaagtgaacaaccagatcctgaacgcattattcacgctcatgtgcctctatcaacatcctcaacggatctacaactttgtgcttctttgtcgatgggagcagcaggacatcttaaggcttaggaagatatattgcaaaaatggaacatataaacctaacgagtggatgcacatgatggtggttgtgatcctccttaatctgaactgctttgctcagtatgccctgtgtggtctaaatgtagggtaccgcagatctgaacgccccgctatcggtgttggtctcactatttctgttgcaattggggctgcagcatttgctggtctgtacaatataatcagccctcttgggaaggattacgacacagagcatgcagataccgatcaagaagcacaaatccatgccacctcaaccgagagtggcagaccaacttcacggcttcagtcattcgagaggagatactctttcatccagagcgatgaacgccgtttcgtggagagaaggcctcagtgggttggcgggctaatggatttctgggaccagatatccattgcgtacttatcacttttctgcagctgctgtgtctttggctggaacatgcagaggcttgggttcggtaacatgtacgtccacatcgcaacgtttctgctcttctgcctggcgccattcttcatcttcgtcctcgcagccggcaacgttgacaacggatccgttcaggtggcgttggtgctcaccggacttttcctgtgctttttcggtctactgtatggcggcttctggaggatccagatgaggaagagattcaacctccccgaaaacagcttctgctgccacaacccggacgcgtcggactgtttccactggttattctgctgctcgtgctcgcttgcccaggaagtcagaactgcggattactacgatatcacagaggacaggtcacacgcagggcaagtagttggtgaaagccaccacataatgtccccgttgcagcgtgaagacggtctgcctcttttcaagtcgagcccaagctcgccctacaggagcggcaacgctagtccgtcgatcttcatcctggagagcccgtcaccgtcggccccacgtaggtcgtctggttcatcgcctcagggtggtggttcaccgacgatgggccatagggcgatgaaggcgccagttccatctgttcttcaaagagagagtggaccagatcatgcacagggatgatccaatgaagcagctaccgcttgccagtccaatgagatatgtatatttttgtaaaggagatacatcgtcggcagatttttttttctgtgctgtctttcttgttcgtaagaaatgtatagaccttcgagttctgttgtgcatttgagctccgtcatgcatggttgcttctgatgtgaggcacgattattgaagagacctctcgtttgctgctcggt

SEQ ID NO: 34003 - DNA, 3517 bp, Zea mays
  Clone ID: UC-ZMFLMO17202G02_FLI
ggcaaaaccagctccaagaacttgtccatgagagaggtatttttcctatgcggcaaccatccacagaacctgagtggcagctgtgtggtgttgaaggaccatatagaatgaggaagaaacttgagcactccaaatttaagatagatactattcagaatgttctaaccagcaaccttggatcaaatggtggtaagattatcaataaagaggatggagaattgttgttgacatctgggtcagacacaatgtcaggcttgaatcttttgacctatgacactgagcagagggatcttgatgctgtcgagttttcgtcattcaaagatgatgatgacatattcaaaggaggaagcacaatttcaggtccaattggctggactgatgataaaagcagcgttaatgagcagagccttcattctgcgacggaatttggagcaaaatcaagttccctttcttttcacatgactgagagtcaccagggtaaatctgaacttagttcaccaaggagggcaccttcagtcaaaggtactgatgcaagaacctcagaggataaatcagaaaaggagttgcttgacaatggtgagtatcttatcaggccttatctggagccctatgagaaaataaggcataaatacaactgtgaacgggttgctggtcttgataaacacgatggaatatttttaattggagaactttgcttatacattattgagaacttctacattgatgattccaattgcatttgcgaaaagggcagtgaagatgagctctctgtcattgatcaagctttaggtgtgaacaaggatataatgggaggcagtgaatctcagttaaagtcacctaccacttggggtgggacagcaaaggtcttgcttggtggcagatcatgggcatataatggaggtgcttggggtaaggagaagctttgcaacagtagcaacctgcctcatccatggcatatgtggaagcttgatagtgtccatgagttgttgaaacgtgattaccagctccgccctgttgcaattgaaattttcagcatggatggttgcaatgagcttctagttttccacaaaaaggagagagaggaagttttcaaaaatttgattgccatgaatctcccacggaatagcatgttggacacaaccatatcagcatcctctaaacaggagagtggtgaggggagccgtctttttaaagtcatggcaaaatcattttctaaaagatggcaaagtggagaaattacgaacttccaatatctcatgcatctaaatacacttgctggtcgagggtatagtgatctcacacagtacccagtatttccatgggttctcgcagattatgagagcgatgttttagatctgaggaatccacagacatttcgcaggcttgataaacccatgggatgccaaacggaggaaggtgaagaggaattctgcaagagatatgatagctgggatgaccctgatgtaccaaagttccattatggctctcattattcaagtgctggaattgtccttttctatctcttaaggttgcctccttttagcacagaaaatcagaaattgcagggtggacaatttgaccatgcagaccggttattcaacagtgtgaaggatacatgggtaagtgctgcaggcaaaagtaacacatcagatgtgaaagaactaattcctgagttctattatttgcctgaatttttggagaaccgttttaatctggatctgggcgagaaacaatcaggagagaaggttggtgatgttgttttaccaccttgggctaaaggcagcgccagagagttcatcaggaagcatcgggaagcactggaatcggattatgtatctgagaatctgcatcattggattgatcttatttttggatataagcagagaggaaaggcagctgaagatgccgtcaatgtcttctatcactacacatatgaaggcaatgttgacatagacgcagtatcagatcctaccatgaaggcttcaatactagcacaaatcaaccattttggtcagacccccaaacagttattccagaaaccacatccacagaggcggactgacaggaaagtccctcctcatcctctacggtactgtgcctatctaacacagcaggagattcgcaagacagcatcttcggtgtcccagattgtctcctacaatgataagatcctaattgctgcagttaactgcttgctcaagccgctaacttataatgaatacatttcctggggattccctgaccgaagcttgagaatattaacatatgatcaggatagacttttgtctactcatgaaaaccttcatggtggtagtcaaattcagtgcactggagtgagccatgatggcaacattctcatcactggtggtgatgatggagttgttgcagtgtggagatttgtgaaggatggcatccgccgtctcctgagaatggagaaggctttgtgtgctcacacgggcaagataacttgcgtctctgtcagccaaccttactcattaattgtctcaggctctgatgactgttctgttatcttgtgggacctgacaagcctagtctttgtgaagcagctaccaaggttcccggcatcagtatccgcgctacatgtgaacagcctcactggtgagattctgactggtgctggtgttctttttgctgtttggagcatcaatggggactgccttgctgtggtgaacacctcccagcttccttctgacctcatcttgtctgtgacaagcgcgacacactcagactggcaggacacaaactggtacgtgacaggccatcaaagcggcgcggttaaggtatggaagatgttgcactgctcgtctgatgaagcagtaaatagcaagagcaaatcacctgcggtattgtctggtgggcttagcctgaacggccaagcaccagagtataggctacttctgcagaaggtgctcaagtcacacaaacaccctgtcactgccctttgtataccaccggacttgaagcagcttctgagtggcgatggcagcggtcacttgctctcatggtcattgaaagacgacagtttcaagggttcatagcacagagaaatatagggattcagctgcacatatagagaaacactggttaaattgtaccactgatttcttcctcgtccagaactgagcattggcgtgcattgacaaaagatctcggatcagcaagcttctacatggtatatgaaatgttcccttgatgtcccatgcctgggccatacagcagtccgggcaggagagagaatacaacagacacaattggaaggatgaagtggacgtggatgcgccgctgcgctgacatcataatcttatactgtgaattatgagatggttgtaccttctcttgtttttttgaggagaaaaggattcatgtgggctgtaggtgccattgtttgtaaagtctatacagggtaattttggtggtgccggttgaggtggctgatggtgtagtgtctcgatgttttgttcggggttgcgggagcaaggaaagaggtattaggttc

SEQ ID NO: 34004 - DNA, 633 bp, Zea mays
  Clone ID: UC-ZMFLMO17202H05_FLI
tgtgtgcgctgtttgccttccttatgctggacgagcacaagtacagatctgggcataacaagatctcatcgccgctggtccccgtgctgctgtcgtgggcgctgggttatatagttgcgaagcttttcttcgcagtggtggaggtgtcgatcgacacaatggtcctgtcattctgccaggactcggaagagcatcaggggaacgcgcggtatgctcccccgctgctgatggagacattggacgaggagagcgagttgcgaaggctgacacaggggccatgatcgatcttccaaatacgagacactgaactgaatggctgtgatgttggctgcatgtcttttttatatgaatcatcactggggttgatggatggagctataggtgcaagcatgtctttttatatgtatcagctaaatacgagtaatagaatagaatagggcttagtgctggaattgaaacccaccgtctgtaatgtatgttcggctttatttaaccatgtcttttttgtttatatattgttagactgtgtgtggcccggcaccactgttgggctgccgcctattagggttagagttgtgagtctatatattgtatcctatctcctatcaatatatcaaccactttacatgattg

SEQ ID NO: 34005 - DNA, 1206 bp, Zea mays
  Clone ID: UC-ZMFLMO17202H10_FLI
agcatccccttcctcttgccatcgatccagtcattgacctcgattcatcctgtagttcatcagataatgcgttcgcttcacattctgcattggttgaaggcatggaacaggacacaggggattccagggcctcaaagaataacaaggcctggagaagatctatggatttctactcccatcatgacacaaatcagtccacaaattatgaacccagagaaagcgcactcgttccacacaatcctgataacacacaagaagcgtctgttgatccatatgattcagatatgactccaagcctccaggaggctttgcaccggtcaactatggacataagtggtgcagagtatagagggaaggaggtaccacttcttgtggtccctacaaggtatctcctcaagctggacaccacgatgacctcttactgtgatatgcaacgagtcctctttgaagaggagaaatcagcatataatcaagctatgcaacaaaatatttgtgatgggaagattcaccctcttacatccattcaccatacatctacatacaactcctctatctgcaaactaatggagtactgtttgagtccagctgttactacgcttcaggatcgcctgaaggaaaatgaacttcggctatcaatgttacaagaggaggctaagcaacttgaggctgatacccaaaacatgagaaacggttctcctcgtcgcctcatgaatcatggagctggtggcaagagttcacctacggctcagagcaggcatcctttctccaaccaagggagccctagaagcccgagcggtggcagccggaggagggcttgttgatgatcctgttccgcctgatccattggcttgtggcttaaccagatgctccctgaatccccgatatatgatggatggacgaagtgccccggcaatagcactgtacctgtacatacccattgccgtccagcgctgtgctgttgtggaatcccaacggtctcactttgttttgtagtattggcctattggggttccttatcctgttgtcggagttgtgccattatcctttccatggttgacctgagctttagcctgtacactgtagactctactagaggttaacctgaggctgaattcccgctgctaagatgtgatgttcccggccataagcaaagatgcaggttgtctttgctttgtaaagatgaaggttgtctttgttttgtaatcg

SEQ ID NO: 34006 - DNA, 996 bp, Zea mays
  Clone ID: UC-ZMFLMO17202H12_FLI
gggctcacagtcgatgtcttttgggggctcggtttcacttaactcacccactaccaaagatggtcctgttgacaacaaaattggtcgtgatgtgcagaaccagaccctttttagccctcaagttgactcttcctccctactgtacaatatggtacctaatttgacctcaaatgttgcggataataatatatcaacgattccctctggatcaacatatctgcaaagtccaatgtatggttgtctggatgactcttctggtttattgcaaaatacaggagagaatgatccgacaactagaacattcgttaaggtttacaagtcaggatcggtggggagatccttggacatcacccggttctctaattatgctgaacttcgagaggaactgggtcagatgttcggcattaagggtcagttggatgaccctgatagatcaggctggcagcttgtatttgtcgacagggagaacgatgtgcttctccttggagacgacccatgggagtcatttgtgaatagtgtatggtacatcaaaatactttcacctgaggatgtgcataagatgggaaagccaggaaacgatccacgctacctatcttaaattgatacccagagctctttcgggctcccgtgacgattctgtggcacactgtagcactgtccatggcggtccggtgtgctgtgctcgcatgttcgcccgtgtcatctatagcatgtacaccgtgcgcgtcttcagaactcccccgttacttgtatccggtgcaggccaccgctctggactgatatcttgtaggttccacttaggaatcagtatcagcgactctatcctagttggtttgtagctcgcacggcactcgttcttgtgtcgcatcgaaatcttcaggctaaatgcttagttgaaactgttcccgtgattcttaagctatctatgtatttgaggattccccggcatgcttttgacgatgaactgcaataatttgaatgcaggaggattgtttg

SEQ ID NO: 34007 - DNA, 1093 bp, Zea mays
  Clone ID: UC-ZMFLMO17203D12_FLI
gggcaagttcaagacaacctacagcatttgaacctgacaagaacagctggggctggaattggctagagagatggatggctgttcggccttgggagagtcggttccttggcacttacgggacagatgggatttttgtagttaatgaaaccagacaacctgacagaagtgcaaccaagaccccatacagaaaacctgttaaaaagcatgattcaacccttcaatcaaacatgttgaaccagaaggtcttcccatcaaactcagagggtggtggctcctcgacaaatcgatcaagtggtttggtatcaactaaatctagactgaaggttttacccagagaaggttctgaggaagcctcatctcatccttcagtaattgtgcggtccactagtaatccgaaggagaggatttccagtattaattcaaaggagaggactggggacttggattttcaagttcataaaagatcctccttgcctggcattggtccagaagctggcaaacacctgacaaagaaaggcatggttaaccgatccctgaaggccacaaaagattcccaaatactggggtcaaggcatcatcttgccagttccattgatccagttcccaccagagttgaactggagacttgagaaggcatgttatgctcgaacatcgccatggattgcacctagcagcttggatgccgttcatgcctcaatggctgcatgaatgtgtcgcaacatctatgttatactggtggtggcggttttcgagtttcgacaccatatatgtaggctcatttcatgagataaaatcagatgcatgtgagcatgtccatatatgttaagaggattaccattggttttattgttgtatttgtaagttgccgttaggaggtgtaaatttgtgtcgtcgagtggtacttattatgtgttgtcgtatagttgtgactcgaaggttaaaggtggttttggttctactgcgaagtgtgaactgtagtgagctgtgttctgtaaaaaaataaagttgttgtgatttgtctactgtaaaaaaaatggaagtaacttggttcaagctgccgtgaaaatgtagattttatatgattttttttttt

SEQ ID NO: 34008 - DNA, 2209 bp, Zea mays
  Clone ID: UC-ZMFLMO17203G05_FLI
gtcctctgttacttctccctccgccgccactcccctcccattctccgccaccgccaattccataccgtcctccgccacctctgctgagagcgagaagagatggcaggcaagggtgatgggccggcaatcggcatcgatctcggcacgacgtactcttgcgtcggcgtctggcagcacgaccgtgtcgagatcatcgccaacgaccagggtaaccgcaccacaccctcgtacgtcgccttcaccgactccgagcgcctcatcggagatgcggccaagaaccaggtcgccatgaaccccatcaacaccgtctttgatgccaagcgtctcattggcaggaggtttagtgatgcctctgtccagagtgatattaagctgtggcccttcaaggtcattccagggcccggtgagaagccaatgatagttgttcagcacaagggggaggagaaacagtttgcagccgaagagatctcctctatggttctcatcaagatgcgtgagatcgctgaagcttaccttggcagcactatcaagaatgctgttgtcacggtccctgcctacttcaacgactcacagaggcaggccacaaaggatgctggggtgattgctggcctcaatgtgctgcgtatcatcaatgagccaaccgctgctgctattgcctatggtcttgacaagaaggcaaccagtgtcggtgagaagaatgtcctcatctttgaccttggaggtggtaccttcgatgtctccctccttacaattgaggaaggtatctttgaagtcaaggccacagctggcgacacccatcttggtggtgaggactttgacaacaggatggttaaccactttgtccaggagttcaagaggaagaataagaaggatatcactggcaacccgagggctctccggaggctgaggacctcttgtgagagggccaagagaactctgtcttccactgcccagaccaccattgagattgactcgctgtacgagggcattgacttctactccaccatcacccgtgccaggtttgaggagctcaacatggacctgttcaggaagtgcatggagcctgttgagaagtgcctgagggatgccaagatggacaagagcagcgtccatgatgttgtccttgttggtggctccactaggatccccagggtgcagcagctgctccaggacttcttcaacggcaaggagctgtgcaagaacatcaatcctgatgaggccgttgcctatggtgctgccgtccaggccgctatcctcagtggtgagggcaacgagaaggtgcaggacctgcttctgctggacgtcactcctctctctctgggtctggagactgccggaggagtgatgaccgtccttatcccgaggaacaccaccatccccaccaagaaggagcaggtgttctccacctactcggacaaccagcctggtgtgttgatccaggtgtacgagggcgagaggacccggacccgcgacaacaacctgcttgggaaattcgagctctccggcatcccaccggctccccgtggtgtcccccagatcacggtctgcttcgacatcgacgccaacggcatcctgaacgtgtctgccgaggacaagacgacggggcagaagaacaagatcacaatcaccaacgacaagggccgtctgtccaaggaggagatcgagaagatggtgcaggacgcggagaagtacaagtcagaggacgaggagcacaagaagaaggtggagtccaagaactcgctggagaactacgcctacaacatgcgcaacacgatcaaggacgagaagatcgcgtccaagctggctgccgacgacaagaagaagatcgaggacgccatcgacgcggccatcagctggctggacgccaaccagctcgccgaggcggacgagttcgatgacaagatgaaggagctggagagcctttgcaaccccatcatcgccaagatgtaccagggcgcgggtgccgacatgggaggctccggcggcatggacgaggacgctccggctggaagcggtggccctggccccaagatcgaggaggtggactaagcggtttgtgtcagtctcgtgtgtctgctgcagtggctggctggcccagtcgctgctcgatttatcgtcgtcgtcgcggtgtatccgcgttagaaccttttgttggtgaacaatattatcgtggcacgcgttttaagtaatacggtattctggttcggtt

SEQ ID NO: 34009 - DNA, 1853 bp, Zea mays
  Clone ID: UC-ZMFLMO17203H07_FLI
agcgtttggaccatattaacagcagatacagtgattacccactgctgaagcttatgactgacatattggggtctccaatgtggttcaatactgtccttgtaatgactcactgttcctcatctcctcctgaaggaccagatggttacccattggaatatgatacttatacgcgttactgcaagaatgtggtgcagcgtcacatccaggctgcagtttccaacacgcagttggataatccatttgtgctcatagacaatcatccaatgtgcagacgaaacaccaagggtgaaagggttttaccaaatgggcaggtatgggtatcagaactgctgctgctgtgtggggcaaccaagttgctgacagaagcaaattccttgcttaagtttcaagatagcttcctactgtcacaagcaaacaccaggctgccttcgctgcctcatcttctttcttcacttcttaagcctcactcttcatccagttcagatgccattgacagtcaattgacagaaatgtcagatgaggaggatgaatatgatcaactaccacccttccgcattctaaagaaatctgaatatgaaaatttgaccaatgaacagaagtctgcatatcttgacgaactggactaccgtgagactttgtacctaaagaaacagtggaaagaaggaatcagaaggaaaaagcttactgaagctcagtgatgaagttggtgatgattatgatgagagtgcatccccagagattgtgcacatgtcagatatggacattccactaagttttgactctgattatcctgtgcatcgttaccgtcacattataactgatgatcagttgtttagaccagttttggatccccaaggatgggaccatgatattgggttcgatgccatcaattttgaagcatctcaagagttgaaaaagaatgtctctgcggcaattacaggacagatgagaaaggacaaggaagacatgtatatccattcagaatgttcagtaagttacaatgctcagagaggctgctccttgatggggggtatggatatgcagacggcaagcaaagatttggtctgtactgttcatggggatgccaagttccacaatctgccttggaacagtattggaggtggcatttctgttactaagtttggcaacaagtactttgctggggctaagttagaagactctgttaccattgggagacgagttaaactggtagccaacgccggtaggatgtctggctgtgggcaggtggcacatggaggtggtgtggagattacagcaagggggaaagattaccctgtgagggaagggagtgtcactgccgcggtctctgctttgtcatttgaaaaggaaaccgtaattggggccaaccttcagtcagacttccgagtgggccgtggatcaaaaatatcagtcagcgctaacctaaatagtagaaatttgggcaatctcagcgtcagaactagcacatcagaccacgctgagatagctttgataacagttgtctccttgatccagttcattcttaggagaagatcagcagcagataataaagatgagcaacagattggcaccaatttggatgactaaataacaggtacaaggaaaagacaatgattgcatgctttagatgctcatcgtcatcaggatttgctgcaattatgttaacctaaggcgcctgtcaatctagagttccaatttgtacagaattcttgtatatcaattatgagtataaataatgtatgaaggaggcattttccatgagaagagctccttctgcccataagcgatttttttaggttttaaggatgtaatcagacgccgttttgagttttaacatcacacaaagtttattt

SEQ ID NO: 34010 - DNA, 1444 bp, Zea mays
  Clone ID: UC-ZMFLMO17204B05_FLI
ttgagtggaagactgcatgcttgttgctagctgcatcaagagcatccagacatatcgatcgagctcctactcctggcggtggcgggaaatataatattgtatactatacgtccacagccacagtttcttggtagaaagatcggcagatcatggtagtcaaggagttcggaagagaagtagtaatgagcatggacaaggtgaagaggggtggagaagcgctcacggccgccggagccggagatgaagagaaagatgacgcggtgctccctgggttccggttccacccgaccgacgaggagctcgtcacgttctacctccgccggaaggtggccaggaagccgctcagcatggagatcatcaaggagatggacatctacaagcatgatccatgggacctccctaaggcgagcacggctgctggtggcgaaaaggagtggtacttcttctgcctgagaggaaggaagtaccggaacagcatcaggcccaacagggtcaccggctccggcttctggaaggccaccggcatcgaccggcatatctaccctgccaccgcgaaccccgtcgagtccgtgtccgtcgggctcaagaagtccctcgtgtactaccgcggcagcgccggcaagggcaccaagaccgactggatgatgcacgagttccgcctcccgccggccgccgccgcctcgccgacgccgacgagcatgcaagaagctgaggtgtggaccatctgcaggatcttcaagaggaacatcgcctacaagaggcagccgcagctgccggcgtggaggcagcagcagtccagctccaacacggggagcttcgagtccgacggcggcggcggcggggacgagtacatgaaccgctgcctgccggtgccggccacggccaccgctcatcagatcggcggcatgctgaacggaggaggcgtcgtcagtgccactcgcagcagcagcagcagtttcttcagggacagggagagcgtgcacggcggccagcagttccacttccacgagcagtggctgagccgcttccccgccgcgccagcagtcgagcagaagccgcagctcctggacccgtcggcgatggccatcgcgttccatcagaacgacgaccagagcgtcgccaccgctgccgctgcgagcgagtgctgcaaggacgggtactactgggacgagatcgcgaggttcatggaggtcaacgatccaacggtgcttcacgactgtagatacgcttgatcggtagcaagttcagacagatcgtagacagacacccaggttaggtaaccaaggaacgatgatgcaagcatgagagactggcaatgcaggagccaggaggggctgccccagtgaggctaggttttgcgcacccttctgcgtctattttctacctgatcgaatgtattgtatacaggacgttgttgtgaccaaaataaacacatagttcagcc

SEQ ID NO: 34011 - DNA, 704 bp, Zea mays
  Clone ID: UC-ZMFLMO17204C10_FLI
gcgcgctgcgtacttaagctctccgccccgtccacggcgttgcatctctcatggcactcggtgtctcctgatagctgctgcctcgatctactccacctaaccgaaagagcgtcgtgtagggtcttggattcttggtccggtgctgttggcgtgtttcttgagatcgaagatccaggagatgatcctgcggcggagatcgaggtcgatgaacagcagcgccggcgcgcagaggagccacgtccccgatcagtccgcgagatcgtcgaccagtccatgcgacggtgacagtggcggggccggcgccgccggcagcaagattgcgaccgcgcgtgccctgttcgcctccccgaggctgctgcactcttcttccctgcccgccggcaccgtcgtcttcgccaagagccccgcgccggacgccgagccccagacggccttctccatgagcccgacgtccgtgctcgacgcggcggcggccttcgtgccgggcacggacggcgccggcaagcgccgcccgccgtggcgggcgcgggacaacaacggcctcgcggacgcgctggactgcagcgaccaccaccaccagcagcagcagcaggagcggatcgtcctcgcggcgacgccgtcgtcgtgctcgctggccagatcgtgctccctggaccgccgcgtcgagttcggcgtcaagaacaggagctcgtggctgcccctcc

SEQ ID NO: 34012 - DNA, 1075 bp, Zea mays
  Clone ID: UC-ZMFLMO17204C11_FLI
aaagggtagcagtgatgctctttatgagaatctttgaggaagagagatgaccccctaacacatcaaatccaaacttatttttgaactattatttataagataatctcatttgtcccagttttaccgagcaaaacttcaaacaagtacttaaaagggactttcctgtttatagatgccactttgataactgatgctgtctcaatattattgtggccttctggtgcttcaccattagttttatttccaaccatatgataggcattgaaaggacaccagctggcttagcctttcggtgactctaaacaccacggcactttcaggtgacacttccacattataaacattgttgtgagaaactaggagtgcacatcagtagccggcggtaggaatgtaaatttttaaattcgcaagtaactagtagtttgtaatgaagttttctttatacctatttgtggatttgaagatgtttgtaacacaagcttttgtgcttgtactgtaagttgacaatttacatttgagatattaaaaaaaatccacttattgaaacaccctagcttcaaatccttcagtcttgcacacagagctacatgtctgtccagtccaaggtggttgcgcttggtgcactgatcttcttccttatctcgtatggctcttgcactggaggatggactccaagcgccggctgcaggggcccttctcgctgcgcatcactaacgagtccggcgagacactggtggcttaccaggtcatcccggcaaactgggcgcccaacagctactaccgctccaacatccagtacgaggcttttggctctgctgctggacaggctactggctctgctgttggactggtcattagctctgctgctcgactgcacacgttaattaccaggatcattggcttgatctgtttggtattgttgtatcatttgcaagggattgaggtgccttagttttaattagcacttgacatgttgggtgtcctacgctgtgtgtctgctggaggcgtcgtcgatccagagtttcatcttttcgaaaaagttttgaacccaaataattttcctatgaatttcgtt

SEQ ID NO: 34013 - DNA, 1553 bp, Zea mays
  Clone ID: UC-ZMFLMO17204E10_FLI
gaactacggcacgaccgccgacgtagcagagggatctgttcgcctcccgtaccgagacccccctaccctttcgtcgacgactaggcttgcggcgaccgcccttggcttcgccgtcggcgagcatcaccagggactgacgattggcgggggagcgaatgcggagatgggctgatcagaactgcgacaaggtccggttttctctctaaaccgcggtctctggaggtgggtttgctttttccgtagtcacagatggacgacgacgacggcagcctgggcattcggaactggggcttctatgacaccgtgaaaggcagcctcggcctgcagctcatgtcgcccatgccacctgatcgggacacgaagccactgctcccgagagctggtttcttgcagcagcatgggcatcacaatgccccacaccagctccacgcacagcagccgcagcattaccgtgactccgctggtggcggagtctctggtggcacacctgccgagcagcaccctatccacatggacttctcgcgcaatgaagcttggctgcacccatcacaccaccagcatccccatgaacagaaggtccttcattctcgccctatcggaccagctgggcatgttgggcatccaggccatgttgcccatcctgtgcatgccgtgcatgttgtgcatcaccatcctactggctatgggatgatatcagatgcacaacatactcttcagatgatgcaaccacagcttgagtcacagcttcaggagcctcctccttgcaaggaagacgaagcaccacctccactggttgaggatcactccgtggttagtaccgggccacccgtgaagaagaggcagcggggccagaagcagagctgtcagcctaagtcaccaaagcctaagaagcctaagaagtctgctgtcccaccggagggtgggacaattaatgggcacgcgacccggaggaggggacctaagaagaatgtggggatgatgattaacggtattgagttggaccttgccaacataccaacaccagtgtgctcgtgcaccggagctccccagcagtgctaccggtggggtgcaggtgggtggcagtctgcatgctgcacgacttctatttcaacgtatccactgccaatgaacacaaagcgccggggcgcacgtattgctggaaggaagatgagccaaggtgcattcaaaaaggtgcttgagaagcttgctggtgaagggtacaatcttgttaatccaattgacttgaagacgttttgggctaagcatggtacaaataagtttgtaacgatcagataaagaagccgtgctatgtttgtcgctttgtaggttgtagagctgcagttaggcctgatttattgtttgtatgcctatgtgccagtctgcagacatttgtagtagtagtttttagccatgtttagtttcgttgtcttaattgtcatgtctatctcgagctttggatatcgaccaactgaagtccttgtatcctcactttgcaaattgtattgtacccataatagtctctaatttagggcatcaagatcaatgctttagtt

SEQ ID NO: 34014 - DNA, 783 bp, Zea mays
  Clone ID: UC-ZMFLMO17204G05_FLI
atagaggtgtccctgacgtcattcacttcctgaaggcgtcgctattgaagtttgtcttggccacgacgtcgccttcgattgatgctttcgcttctcgatgcctgatatgtgggtggaggaagggacttgcaacgtgaggccggagctgctacgttagggaatgtggcttgacaatatcacaataatgacatgaagcaaaaccctccctctttcgtggactggtttgctttggaggttgggcatatgtcgggagcggggcggcaaatcaagattggaagtcggagctgctccttgtttgagctcaacaatgatgacctgttgcgacctttcgctttgggccgcctgcctgttttcgtttggatcatctaaggtttcccatggtaagtcagagtcgctggctactttgcaatcatgcttggcaatgataactcatggcagctttaggtgctcttctgcgttgcgttgtgggtttgcccttcgtggtgttgttagttttggttgtagttgtaggagttggtttgtggtctggtgcatgaagtcggagctgctaagcctcggtgctaagctcgacaacgatgacttgagccaggctttaggactgctgacgaggtgagtggagtagagcaaaagtgttgtgtggtcatctgagcccacttttgttgtttctagttggttcgagtgttgtgtggcacgtgtccaaccatccgctgttgtttgttcgttttgcctagtctgggtctctttttctttttaatataaccggcatctctgcctagttcgttt

SEQ ID NO: 34015 - DNA, 469 bp, Zea mays
  Clone ID: UC-ZMFLMO17204G09_FLI
tacaggaagactggagcgaaccggtcgatgctgaacgccgcgtttgtggcgaggagggagcacatatacggtgaagcgcctggcgtggaagttcaggggaaatcagacgattctcgtcgacggcttgcctgtggaggtgttctgggacgttcacagctggctctttggatcaacggcgagcaacgcggtgttcatgtttcagacatgccaggcgcctgagaagtcgctgccatggtcgtactcgcagatttttagggagtcccagttgcaaggtcttggtttctcgctgatcctgcatgcgtggaagcttgaatagggctctttttttttttgcaggatcacaatttgcttctgcacctgcccccttttctttagtgctagcagaaaacgttttgttgagtctgagtgcctgttcatcagaatgctatggaggctctccaatatatgttctttcgtttcattttgtttt

SEQ ID NO: 34016 - DNA, 1951 bp, Zea mays
  Clone ID: UC-ZMFLMO17204G10_FLI
gtgaaaagcgccaccttcggagtcctatgtttgaaattaactcgctgctggggtcgccgcctgaaccatttggattccctcacctggaattcgaaaaacggcgactactcccctagagcagatccatctagactctagagtacatccgagggggaagcgagcagatcgatggcgatggctgagaaggtgaaggagaagatgctgatgctccgcagcagcgacaaccaggagttcgaggtgaaggagtcggtggcgatgcaatcgatgaccctcaagaaaatggtcgaggacggctgcgccgacaaaggcatcccgctccccaacgtcacctcccacatcctcgtcaaggtcatcgagtattgcaacaagcacgccgagccgaccgggccgggcgacgcggccggcaccaccaacaggtccgccgaggatgagctcaacatcttcgacgcagacttcgtcaatgtagagcactccaccctcttggacctcatcctggctgcaaactacctggacatcaaggggctcctgaacctggcccgccaaaccattacagacttgatcaatgggaagatgcctgaggaggtctgcaagaccaacatcaagaacgacttgaccatcccttccacgtcggccttggccaccacaatgccctcctccgagcgaaagcagatggaggccaggtttatcgcctatatgcaagaaactgctgaggagaggatgactgggtttgctgttcgtggtgaaaaatacagaaagcatggtgaacgtccgccacaaccaccattggagatagttaaatacccagctcttttggaaagagcttggggatgggattcgatactgccgtactgtcctgtgaattcttggcccctatacaagacttacctccaggaatattatgagcgcaattctcgtgaagtattggctcatcaagtggaagctaatgctgcctctggtcccaatctcaacggggctgatgagaatgatctggcaactctgttcaacttgtgtatcagtagggaggttcaacttttgaatctgctgaagcgccgtgatcaaaaacacaatgttgatgagatcagcctgaatgaaaagctcaccaactgtgcccgtcagataacttttgtggaatatgctggttttcctttccccagtgttgccttaaagtgcatcatggcggagtctgatctgttgtgcatgttgctgatgtgtgggactggaatgatatcccaagtcaacatttgctccaggattcgaaaggtggccttcagatttatgacctacaaaggacctggatgttttgctgctgctgccaccatgatggccaccacaaaggaggccaagttgatgagtggactgctgaggaacagatgtagggaaaataatggtccattttcaaggagtgtctttatcaggaaatggacctttgcagctatgttcagaatatgtgaggaatgttctcctgtggaagagtctacagggggctacactgctactaaattgatacttgatggatctgatgacaagaatccttgtgataaggaactagttaataaggacaacctgctgcagaggaacaagataaatcaaaaataccaaggactgttcaaaggaaaaacaactaaatgccgacaccctgtacaaaagcaagaaccaggagatggagcaacgcccgcatcacccagtccggccaatcccatctcaactgtggtgcaaaaactttggtaagaaggaatactgaaggaccttccaaactagcatgaagtgcgggcaccttgcttttcttttgccttctttttgtgaaaacgtgtgcttagcgacaatgctggctaagtgttagaagcatctctggaatgcttcgtgtagtatcttttgactctcttttcttttgtcgtctcaatcatgttacatgagaaatgcctgatggactcaaataatgaaccggtgattc

SEQ ID NO: 34017 - DNA, 2438 bp, Zea mays
  Clone ID: UC-ZMFLMO17205A07_FLI
cgaacgcccagggctagctctatctccctcccgagatctcctcccttcccccccttcttctctcccttgccgacgattacgccaggtgcccaggtcttcttcgggccgaggtcgctgccgccatacacttggtgcccaggtcttctccgggcccttcgccagcgtcgagcagcaccaggctgagctccacagtggttcttggagaggtctgtgatagactactaggctgaatacacctacacaaagaagagaaaaggggatcttggagaggtttgtgacacactactgtggtgaatagacctatgcagaagagaaaaagggaaagagagaatgttctcaatgaattgaagtccctatgtcaaaaacaagagcaaggagctgttgtacaagtggcttgtggaaggagcatatcatatatttgtaggagataactttacacttgattcatgggcgactggattataggggcgttgataaacatcgtggggagtgttggcataaactttggtaccaaccttctgaagttgggccatgatcagagagaaaagctttccttaattaacaacagcgagggaaatgaaaaattcgttccaaagtctgtaatgcatttccagacttggagaataggtaaccctgtctgctagaatttatttactaattttagagtcttttaatcaagaccaactttaatgctacatctgcattcaggtatacttttttttgctgctgggaactgcctcaacttcatgtcatttgcttatgctgcacaggttcttttcgttgtcctcgagacctcaaaagaaaaattagtttaacatgtaggatgtaatataatatgggaaactcatgaatggttgtgtaaacatgtaaagaataaaactctcatggagactgtatttgcgccctgtatttgcgccctgttttttttccattagttcttgggggtaaaaagataagagcttatcagtcatacagtttccatctctccttgtttcttagagctaataatgccatccaatcatattttcttttctctttctagcccagtgttttggtttgaacattgattatttacttgctatattacagtcactacttgcagctcttggatcaatccagtttgtgtccaacattgcttttgcctactttgttttgaacaagactatttcagtgaagtatgtatgattctcactttctggtagctggaatgaaaattacaataactacatggaatcatgtgactatgaagcttctgctattctttccagagtcatggtagccacaacatttatagtctttggcaacatcttcttagtatcctttggcaaccatcaatcacctgtttacacgccggagcagctgatagcaaaatacagcaatttggtgtttgttctttattgcatgtcattggtctttgttgttgcatttaaccactatctctacaggagtggagaaactattatttcaaatagttcaaaaaatgctggcacatattggcgaacaatgttgccattttcttatgctgttgtatctggtgctattgggtcttgctcagtcttgtttgcaaagtcattgtctaacatgatgaggctgactatgaacagcagatacgagtttcatagctggttcacatactcaattgttcttctgtttctgtgtaccgctggattttggatgggaagattgaatgaagggttgtcattatttgatgcaatactgattgttccaatgtttcaaattgcttggaccttcttctctatctgtacaggatttgtttactttcaagaatatcaagtatttgatacgctcaggataattatggttgtattgggcatgacatttgtctttgttgggatctccttgctagcacccgatgacactaaagctgatacgaaagatggttcgagcactgccgaggaatctataattgatatggacagaaatggaaagatgcagatggaggagacagacacagatgatagcaactcgtttgtcacttctgtaaaagcaaaagcaaaacgtgtactgttgaaggcaaagtctgcatgctccatgtcccttggccttggggaggacacaataagcgcttcgtccgtgcttgccatgcctatggtctcatcaagaacaaccggcttcagaggaattgaagatgaccgttcaaagtacgttcctttaagaaccacagattggagtaatctttagcggacggtgatatatagatacacagcaaaggtctttacttttgatgttgcatagcgggtggcagtaaagtattttgttgctccagaggctattgtttgttgtaatcatagttagctgtaacacgagtgtatagttcaacgtttctcccttcaaaacactgtccatagccagctgcatagtacatttgtaagttttagaatacagatcaaatgattcaattcgcttcttatttgctc

SEQ ID NO: 34018 - DNA, 628 bp, Zea mays
  Clone ID: UC-ZMFLMO17205B11_FLI
ctgcaaagccagtgggagcaacactgagagcatcctggagagtgcgaggcagcgtggcatcgagctgaatctgtcaccaacatagtgtatcccttggatccaagctgcatgatgttttgccagtcggagatgttggtagtgctgtgttaactggagatggcgtgtagatatatcggtgatcatggtggtgtgagatcatttttgttctttaggtgcaggtttagtgggacatagtcgtcggtatcttacagcatgtgtttctgatggagtgatatggttagtaagcagtggtgaaggatacaggcatacgggcactggggcatataccatacttttggactagaccggctagagactgattttggagtccgttatgtttccgttttccgttctcttggttttctctgtcgtcaatgtattataatcatgatgatgaatggagaaatgagatggatttttttttgagttcactcatgcagtttcggttattatatttttgtgctgtcttcgaatctaatttggtcgacgggtcccaaagctgctgtgcgtgatttggtcgacggcatgtttgggcatgtatgtttgggcatgtttggaagtaaagtattttaaaaccaggttttggaat

SEQ ID NO: 34019 - DNA, 1385 bp, Zea mays
  Clone ID: UC-ZMFLMO17205C07_FLI
cttgagcgtcaaatattggagaaggaaaaagaagaagaaaaaaagagaatgagcagtcaaaagaaaactgcggatgaggaaagggtgaggcttctcaatgaacagaggcagagggagcaggaccggattcgtagagagatagaggaaaaaaataaagcagaagcaaaaaagttgctagaagatttgaataaggcagggaaaaaacatgtcgttgttgaaggggagcttactaaggaggccatcatggaattggcacggaatgaacagttaaaggagcgccacgaaatggagaaaaaactgcagaagtttgcaaaaacaatggattatctggaaagggcaaaaaggcaggaagaggcaccactgattgagcaagcttttcaaaaacgtcttgaggaagagaagatccttcacgagcaagagcagcttcgggagattgaactcagcaagcaacaccatgccagcgacttgcaagagaaaaatagactttcacggatgttggagcacaagaatgctttacaggagagaatcatccaagaacgtgcagctgagtttggccgtctgaagaaagagagagatgaacggatgaatcggttgatatcttcaagaaagcgtgaaagggagacagtaaggaagttgatgttttatctgaacctggaggaacagcggattgaaatgcttcgtgaggaagaggaagctagaaaacgtgaagcggaagagaggaggaagagagaggaggctgaaaggaaagctaaacttgatgccatcgctgaaaagcagcgattgagagagatagagctggaggagaaggcaaaggcaacaagggagaagctcttaaagggatccgaggctgtgcgcgctccagattctgcacctgttgcacagccacctcgagagtcagcagcagcgcctgcagctgctgcggctgctcctgctcctgctcctagtaaatatattcccaagtttaaacgcggtggtgatagcagcagcatcccttctggcagccgcgatgaagatcgctggggttcacgtggtccgctcaggcaagatggtcctcctgcacgactggatgcaccctcatcacgccaagatactgatcgctggcgtggatcaagattttcctctaactcaacgtcctcttcatcaacctggagccgttcacggaactgatcctatgctgcaggacttttttctagccatgtgtcgacctccgtgcacaatgtctaatcgtacctttccaggcactgcactacatgcatattattgctgttttgtacttttgtagtaatactctacaatccatgattattgtccctgtttgttagtaatgctgttttgtctgtgcatgaaacactctatacctacatatagccaagaattgcaggact

SEQ ID NO: 34020 - DNA, 821 bp, Zea mays
  Clone ID: UC-ZMFLMO17205H09_FLI
tccccatccaagaaatactacgcccatcggatccaccgccgaggcaggcagaggagcacacaccccaggagctgaggaccggtttcgccatggccgccaagaagctggtgctcaagctggacctgcacgacgacaaggacaagcagaaggtgctcaaggcggtctccaccctccacggtatcgactccatctccgtggacatgaagggctcgaatctgacggtggtcggcctggcggaccccgtcgacgtcgtggccaggctgcgcaaggtcgccgccgccgaaatcgtctccgtcgggccagccaaggaggacaagaaggagggtgacaagaaggagggggacaagaagaagaaggacgacgagaagaagcagcaggtcctgtggtacccgcacccgtggcacgccgccgccgcagcgcagcagtaccacccccacccgtacccgccccagtacgccgtccacagcgccgaggaggaccccaactcctgcgccatctgctgatccgaatacccggtcccgtattctttttgtacatcccgccatcccggtatatgtagctcgcctgcctgcctacctacctcaggctcgatctaccacgtcgtcggtgatcgccgggatcggggccagaccgccagagcggctgtggtggttgcctgctgctctgctcatctctatcctgcgggcgtgggccatgggctgtgggccgtggggttggtcgttggcccgtccacaggtcgttatacgatggctcgtgcaaaatcatacacgcgaccccccaaccatccaagagtagctagctgttggggtttttcacttttc

SEQ ID NO: 34021 - DNA, 2137 bp, Zea mays
  Clone ID: UC-ZMFLMO17206B11_FLI
gccagccgcccccgccccactgcctataccgccagctacagtcggaaacggccgcaaggcagtcggaagagggaagccgcagccgggcactgactccgatccccactctagccaaccccacgcggaccggtccacctcggacgaccacgacgccatctcgcacgcgtgcttccacccaaccacacaaatcttctctcccaggcctaaccttcctccccgcgagctgcctctactgattttgcactggcatgccgtgacgcggaaagatgtggagatccatcttggactgatttcttccttactcggtgaggaactccaaaccatccagctaggttattcgccctctgccggcgcaagatccattttagtttgcccccctcccccaaattggactacccaaggttgaagataccttggtagtcagagcatagaataagggtggactgttattaattttccataggatggaatccttgtggaagctgacctacttgctcgagccggcatcacttgctctcattgccacagctatctctgtggcctatgcatccgcatcgcgtgctctagattatggcaaagagatggagagaaacttggatttttcagaggcttccattacattggatcggtcacaggcactaatgattccccttgcaagctcatgcagtctgttgctgatgttctacttgttctcgtctgtctcacatcttgtgactgcttttactgctgtggcctctgcgatggcactgttcttttgcctgtctccgtatgtcacttatctcaagatgcagttcaatctaatggacccattcgtgtccaggtgttgttcaaagtcttttacacggttgcaaggtttgctgatgctcttctgcatagccacagtcttagcctggttggtttctgggcattggttgctaaataacctactgggaatttccatatgtatagcgtttgtcagccatgtgaggcttcccaacataaaaatctgtgcgctgcttcttgcctgcttgtttgtgtatgatattttctgggtgttcttctcagaaaggttctttggagcaaatgtcatggtttctgttgccacccagaaggcatctaatcctgttcacacagtagcaaataagctcagcctgcccggattgcaattgattacaaagaagctggagcttccagtcaagcttgtatttccaaggaatttgttgggtgggattgttccaggaagcaatcctggtgactacatgatgcttggccttggagacatggccattccagggatgcttctagctctggtactcttttttgataatcggaagttcaaggatgtgaattttccaccagatgtgtctcccccaaaacggcggaattatgtgtggtatgctgtaacaggttatggtattggcttggtagctgcactagctgctgggatcttgtctcagtctcctcaaccagccttactgtacctggtgccatcgacactgggacctgtcatgtactccctccggtgtaccaaaaactgacgttttggacagcttctcacataccaaggaactaataaataccacactttttcattcctagtcaaatccctttaatagccggagtggtcatcttcactccttcccaggcaggaggcctaggttcgattcttgactcacgcaatactaaattttttaccattttgcatgcaaatgcatggcgtggagaaggccaacggacggctggtgaatttacttcttgctgcgtcaatcgagagttctcctcgctccacgtgaaacgtcaatttatcgtgcactttggactcaaagctagaacgtcgattattgatgcaccggagggagtacttgtcatggttacggaatgagctatgggagctatgggaagggtctgggacgattctgaacgagaaagctcatttgttggaggtctgagatccaagtggacaataagaaggatctgaacccaccgtgattgaatctaattaaacaatacttgacctcctcataccgaaggagagtatttataagctagaatgttcagtcatgtaagccatcacctagtttcgctcgcaagaggaaacacttacaaatcatgtaactgtttgtaatagaaaagttcaatgcatttcagctttttaacc

SEQ ID NO: 34022 - DNA, 1153 bp, Zea mays
  Clone ID: UC-ZMFLMO17206F07_FLI
gccgcacaggaagcccccccgccgccttcgactgaagcctccttcgagtgggggcatcacatctacctctccttccctttaggttctcgttcttcagtgcgtgatgtcaatccactgaggcgctgggtgcagttaatttcccaaactatatttgggggtgttcagcaaaaaccgcgtccaactgcgcccgtgcgggtgagggatcactagaggctggactcgcgctagagatggtgaaggcaaaagcaagggtccgctatgagcctggaccagcttttgaggaggtcaaagaagaagccatgcttgatatttcaccaacagactcgacagagttttggttaattcagtggcctaaagaccagatagatgttttggattttcatggcaaagagctttctctcaagctgcatagtgatggaaacttgggcaacttggaaaattcctcagggaaatcttatgagattgcgagctttgcagctcagaaaccagatgcaaccgtcttcctgccttcaggctcagaaacaaaacctgtggggaagatttcacggcgagtatccttagttcgttatcctaaacctgaggaatttacaaaaccaagttttgggagtcttactcctagcataaagaaatctgcaggttctaagaagaccatgtctcggttcaccggtgtatcaaagaatcccagtagccaaggttcggcgctttcactgggccaaaggagcgcagagccaacacccaaacacaaggggaagagaaaggatgaaagcagcctggggcactcaaatgtgtcgggcaaggccacagaaggatctgaggctcgaggcgtggggagcaacacggcttccgagatgccacagtcgccaccggaaaaatcaaagaagaggaggaagaaggataagatcgttgagtagtagtgtcaccttggcaggagatcaagttcccttgaattatcaagcagtggctcgagcagctgtgctggaagttcacgttcaggtttctttatgaatttctggttctcattttatccatgcagaatttttttgctggagtgcccggtgttgtttgacctgggagcaacctgtcgcgtggtgctgaaataccatatgtatcgctctgtttttggtatgtgaaaggttatctttgttgcgctgtt

SEQ ID NO: 34023 - DNA, 666 bp, Zea mays
  Clone ID: UC-ZMFLMO17206H01_FLI
gcggcgatgccgcgcatggcgcgacgcacaacagtgacttcgcgaagtcgcgaagctgcacgcgtctagcgagcgcgtgtagctcgcccccctggcggaagccgccaccacaggcacggcatctggccggcggagcattcgtctggccggcgtcagacatgacgcggccgagatcaagccggagacggctcgttgcctcttctcaccaccacagccgcagcctcccagtcgccaggatactaggatgcggtcgtgaagactttccattacgttggatcaaaggtgagaccttgacattgctcgccgatcgatcgcctaatactactgctgaagttgccgtcagtgacccacagcgacaccaaaaaaaagaggctgggccgggctatgctaatgctacagcctgcatgccctttgcaacttggatcggttgaacacacggcatcacctttctatctctctttatttattataaacctacaagtgcacatacatatcgtacgtacgtgcgaataattaaacttgcccctttctgctcggaatgtgttctcggccggggccctgacacagcaggaaacctgtgctgatccctatcgttgaacacacttcatttcatcgatcacctttttgtgcgtgttcttcattattttaggcaagatatagtaccgt

SEQ ID NO: 34024 - DNA, 3256 bp, Zea mays
  Clone ID: UC-ZMFLMO17207B11_FLI
gttttgatgagccgatcattggctccattctcaaggaaactcttaaggctctggattaccttcaccggcagggtcaaatacatcgtgatgtcaaggctggtaatatccttatcgatggtgctggggtagtgaagcttggagactttggtgtttctgcttgtatgtttgatagaggtgataggcaaagatctaggaatacatttgtaggaacaccatgctggatggctccagaagtgctccaacctggcactggatataatttcaaagctgacatatggtcatttggaatcactgctcttgaactagcacatggccatgctccattttcgaaataccctcctatgaaggttcttctcatgaccctccagaatgcaccacctggtcttgattatgaacgtgacaaaagattctcaaagtcatttaaagaaatggttgcaatgtgcttggtcaaagatcaaacaaagagaccaacagctgagaagttgcttaagcattcatttttcaaaaatgcaaagcctccagagttgactattaagagtatcttgtctggtttacctcctctctgggaccgtgtaaaggctctccagcttaaagatgaagcacaattggctttgaaaaaaatgccttcttctgaacaggaggccctctccctggtctgtgacatacccttcctattttttatgttttgtttggtagttggtactgttcttaatattatggatccctttttttaattataatcattacagtagaaaggcaggcctgtgtagtggtgagagctatcttacagtgtcactaagtctcgggtttgaagcagcctctccacatttgcagagggaagacctgcctcagtttatctcttccccgtaccccgctcatgtgggagcctgtggcactgggtctgccttttgtttttcaattatcatcattacaatactgctctggctatattagagttgtgagttgaaagttctcctttatttagtgcgcatgcatttttttggtaaacaggattcatcaattctgcattgttgacatactaactgaagtcagatcttgcatggagttaattgtatacatgtcacctttcgagtgtgatagtttttgttgaacatgtattatgactaattggtaatgtttacaataagttatttactttatgatagacagcaatagtccaacaatttcagtaccatataacaaaatatttgctcatatactacctgtctacgttcttccaaataatttgttaacaagttgactgttaagctttgaaaaggctaagcacataagaataatacatgcatgccatgtttaaatggtaggcattgactgtgctaagaactttggggtatggatacatcgcggaaaccttttgaagttcattttctcttgtatttttcacttatctggttcagtctccgcacaaatgtgtaatgctgagtatttttccctacatgctattccgtaaatagtcacatgtcaaatatattagcagcattccttttgttgtacaattagggtaaatgccacagatattttaatagctttcttatcataaaaaactgcatggattcatacagagtgaatatcaacgcggcgttagtgcatggaacttcgatatcgaggatctcaaggctcaagcatcattaattcatgatgacgagcctcctgaaataaaagaagacgaggacattgcaagaaacattgaggacttgtcttcacggaaccatttgggaaagtcatttgcaaatgagtgcaattccaggcagcgagcctttgtcaccactttaaaatcggatggaaacagccccaccacgaatgaagcttttgattttgattttgattttagcgaggctgccactacaagaagggctgatggacatgaaagaaacataagagagaatgattcattgccctctacagcaaagcgagatccagagtcgaatcattggacaaatgacgttgggcagagacaactgtcttctggtgggagcaatagctcaacagctgaaaggggctatggttttgagagggatgcagttgtgcaaacaatacctgacaaacaaagaagtgaggcgagaaaaacagcaagccttagtggtccactttcactgccaactcgtgcttctgcaaatagtctgtcagctcctattcgatcttcaggaggttttgtagattcatcaggtgacaagtccaaacgaagtgtagtagagattaaaggccgcttttcagttacatctgagaatgtcgatcttgcaaaggttcaggaaggtccacttagtagcctctcacggaaatcaccagagggttcactgctaagaaaatctgccagcactggtgattgtttgattaatactaagctgatgcgtaacgctaatcagctgaaggaattctgcaatagttctgtatcatcttcagtattaattccccaccttaacaaccttgtgcaacagaccatgtttcagcaggatgtaatcatgaacctacttagtaacttgcaacaggatgagaaagttgatagaacacagcctggaatatcttctcaagtccgaacgatggagaatggtaaagtggctgatacagctaactctgagaaggaacggtcattacttgttaaaatttcagaattacagtctaggatgataacactgactgatgaactaattgcagctaagacaaaacatgttcagttgcagcaagagctaaatgctttgtactaccgagaagaaattgaggatgttagggatgaggatatcgaagaaacataatgtatgaattatctgcctctccctgagacagatcaattacccgcctctccctgaggtcaggggagaacaagagaaggaaagcggcagggagaactagcgatggaaagtggcgatgccgcaaatatttgctggatctagagaccagctgcggctctacggaatttgttctttgaaggttgccgtgcccctggcctgctgccatccagtgtgtataaccgtcttagttcgtttgtttttttgtgaccacaagattgaggcgtggtcatgcagctatttcggccatgcctatcattgggagtagctgtagtccgtaggctaccgggtggttatctatgcagaatttcagaagactgcaaaataaaactgtattttatctagcaataggatgtatattggcgcattcgttgatatgtatcatatagggctattcgcaaacatccaaacagagttgtttgcacatatctaataaagtatgcatttactgc

SEQ ID NO: 34025 - DNA, 826 bp, Zea mays
  Clone ID: UC-ZMFLMO17207C03_FLI
ggccaatccaaatgcgaatccatggttcatgggcacaggagtccctttggctaatgcgcgctgggggaactacgcattctcagctgctttcgggggactattccctatgcttagcttccaagttcatgggtttccagatgctgctgcttatgcgcagcctgctgggttccactatgggtatggccatgggcatggattccatggcggccatatgggacacgcccatggcgtccaccgacaagcaccattggggcaacagcagcaggcagatatctacttgaaggccctgctcttcatgattggaattctagtgattgcaagcctcattgcgttttaaaatttgttggcaacatctaccaggaggcctgctcgtcacggctgggacgtggaattctgggaatgcaatcctcctgacatgtcagagtccgttgatagcttgacatttgtgatggcatattggcccatgaaccgccagaatttcagtgtgtttgtactatagcttggcgctggatgttgcataagttattattctgtttgcatgaagtgtccatagaatatgtatttacgtctagataagtacctacgtttcgtaacaccttatatagagtactaggaggaacatggtgaaattattactgtctagtcttgatttttttaaaaacattttggagatgaatgtgatgtgcacttaaaaaggtaagagtgacaaatgatcgtgccgtagagctttgcaatatttgtcagtgcctagctttgcacaaacaatggttctagtgttgtgatgggttttcgattttcatattaatatttaagattttcatatatt

SEQ ID NO: 34026 - DNA, 2623 bp, Zea mays
  Clone ID: UC-ZMFLMO17209B01_FLI
gaaacaaggaaagtggtcagctagcacttttgccttacaactggactacaacggttgcggtatcacgccctctaactcatgtaaagaaattgcgggctaaggttttgggccttactgatgaaacaatgcgggtttgtgctgttttggcaaattggaatgggagcgacaatgaaagttttgaaggttttgatattggcaatggacccgaatgggatacaacaagacaaatgtttgaacaatttgtggatatattcattaatgctatgtttgatctaattgggcctagaaaatattctcagtggggaggatccctaattgattctgtggtgggtactttccttacacagaattctgctgataatttatcaagccaagcttttatgaatatagcggcgaagtttcctaagagtgagagacactgtcaagataatgcgactcaattaatagatggtgtcgatagaaaaatgaagtcaaaagaagcatttgataactttgacttggttcattcacattttgatgaatacattaaatctgaggaagaagttgactttgataaaaaggtgaaaagtcaatacggcgaagactacaatagaattataggaaattttgctgcaagtatgaagcagaaaaacatctctacttgggacagtgatcttatgaatttagtgaaagataaatatggaaatccagtgtgcgacgagaacaacttgagaaagatcttagcttcactacgacaaccagtcacagcatctaattggaaagagttacaggaggaagcatataaaaaaggatacaataacaaaagtcaaactgaaacaagtgatgttgtagattgggaatcagttctaaacgctccattttctgaggttgcaaaatgcattgcaatcaggggacagcacaacattttggctgtgcggatactggcttttctcgaccatgtaaagaaagctcaagatggaagctttgacctagattggcttagatttgtatcacgtgaaaaagccaaaaaatttctgcttagtatacatgggattggagtgaaaagtgctgactgcatttgccttttgtcattgaggcatagagcatttccagttgatgtcaatgtagctcgcatagtgacaaggctaggatgggtcaaacttcagcccttaaacggtgctgatttccacctaattgacctttatccgatcttggatgatgtacaaaggtatttatggcctcgattgtgcaccattgataaggaaaagttgtatgaactgcactgtcttatgataacttttggaaaggtagtttgcaggaaaaaaaatccaaactgcggagcttgtcctttcagtgcaagttgtaaatattacaatagttcacttgccaaaaagtcgctacctcttccagagaagcatgaacaaggagaacagcaaacaagcatggttgcttatgggagttgcacaccaagttctcaacaaatgtatcggtatcaaattgcaataagcagcactactactgaaacaccacccatccatagctgcgagccaattgttgagatgccaccaagcccagaatatgaatacaatgaaacacctaatgagcaagaagatttctacgaagattatgcatgtgatattgaagattttgcaccaggagtacaatatgattctgaaataaatatttgttcaaacaagcatacgctgaacaataattcttggacaccgaactgtgggaaggacttggctgtgatcaatccaaagtgtagctttggccaaagtaaaaaactaaaaaataccggtcgtcttaggacagaacacaatgcatacgtcctcccagatggtcatgtaatcctagaagagttcgaagacagagttccgggagatagatgtccttacctactagtggttatttcatgtcctgatgactacaaagttaaaggcacggttctgataccgtgtcggacagcaaatagaggaaagtttccactgaatggtacctacttccaggaaaatgaggtttttgcagattactcatctagccgaaacccaataactgtacctagggaatgtattgggatgctggagagaagcattgtatactttggttcatctatacactcgatcacaaaaggtcaaacaaggcaagatatacaggaatgcttgaaggaaggatatatctgtgtacggtcgttccaccggaagaccagaataccactacgcctatgtagcacactacatgctaccaacaccaaacctgctcgtgagaagcctatgaagcggactaggacatcgccggaggggaagaagaacgggacatcgccggaggggaagaagaacgagagcctcttctgatgcttgacttcgtgtacaagttgtagctgaatgttcctcaaaatataggattaactagttctgtaacactaacaccccggcttggttatgacttagaaactgttaggccatgtttggttcacatctcctaaagtttagtcacttgtttaaacatgttaaaggaggtaactaaaaaaaaacctcttaaataggacattatagggactaatgtttagttcctaaaatttaggagatgactaaaggaaccaaacatagtttactaagccttagtaaacgtgtgaataaatgcc

SEQ ID NO: 34027 - DNA, 1160 bp, Zea mays
  Clone ID: UC-ZMFLMO17209B06_FLI
gaggtggccaactactgccgggagaggctccaggtactcttgaggcaggagctgaggctactcggcgaggatctggggcagattagctgcgacgtggacatgaaggagcactgggacgagctgttcaccgggtgcttccagaggctggatgacgaggtgtcagggcaggcgagcaggctcgtcggtgccgtccaggagtcacggccggtggccgccgagaacgtgggctccactgcggttgtcgccgtcgtgtgctcatcccatgtggtggtcgccaactgcggggattcgcgtgccgttctctgccgtgggaaggagccagtagagctgtcgattgatcacaagcctgacaggaaggatgagcgggcgaggattgaggccctgggaggcaaggtcatccaatggaacggctatagggtctccggtatacttgctatgtcaagatcgattggggaccgatatttgaaaccattcgtcattccaaaaccagaagtcaccgttgttcctagggcgaaagatgacgactgcctcattcttgcaagtgatgggctgtgggatgtagtgtcgaatgaagaggcatgcaaagctgcgcgtcggcagatccagctgtggcacaagaacaacggtgtcacatcatcattgtgtgacgagggtgatgaatccaatgatcctgctgcacaagctgctgctgattatcttatgaggctcgcactgaagaagggtaccgaggacaatatcactgtcattgtggttgacttgaaacctcgaaagaaggccaagagcaactcataacactgggatggatccatcacggtagagctgaccatgatatgtccaaaggcttctgctgctagttgttggtcgtccgcaagagacttgaccccacaggtttttttcgttgggcctcaagaactgtaggtgcattttccatggagggttatgatgcttaaccccactctggtttctggtggctaaaacattctctccagtcggcttctaccatgagccctggcacttagtatattcctaatgttgtatgatggttgaacttgtaaagagacaagcggctgagacggtcactaaaattaacatattgttacttcatgattcaaggactatccatctgcctgaatccgatgaaagttttgtattgcagcttc

SEQ ID NO: 34028 - DNA, 847 bp, Zea mays
  Clone ID: UC-ZMFLMO17209B07_FLI
cggccaagttcggtgctgcccagcaggtggagaaccgaggcgcgctgtccaaaaggtcacgtaacgacgagaatgatgccaggacctcctgcttctggatatgaccggtcacctctattttacggaggaggtggtggcgccccacctccaattccgcttggaactggtagctatggtgctccatatccacaccttgggatgcgatatggctatggtccaccagtaggacctcctggttcatacggtcttttctcttcatatggtcacctgggccaatgagtggtatgggatatggcccaggacctgagctaggccgatatagctatgggtttagaggttctccaatgccggtttctagcccatggtctggtggagcattagctgaaaacactgacaacattgcttcacgaaagcgccgtggaggccctgatggactttctgagggtgactggacctgtcccaaatgcgacaacattaacttttccttcagaagcacttgcaacatgaagaaatgtggagccccaaggccaactccgggaggtaacacgagctcatctcgcaaggacaacagcaataaggaagcccctgaaggaagctggacctgcccagagtgcaacaacctgaactacccattccgcacggtgtgtaacaggaaaggatgctcgtacagcaagccagccccggcgaacaactgaacccaaccttcgcgcatcgtccagctattgttgtacccgtagattgtatcctagtcgtgtgcaatctttgaactgcacgaagatgtttgtgcctggagacgagagattcgattcgttacgcttaatttactattatacatttttattaaatg

SEQ ID NO: 34029 - DNA, 619 bp, Zea mays
  Clone ID: UC-ZMFLMO17209B09_FLI
ctggaccgctcggtgccgtgcccgccgcgcccgccgccgccgcaccagctgaaccacccgtcggtggccgtgcgcgggctcaacggctcggtgaccgtgcgccggaccgtcaccaacgtcggcccgggcgcggcgcggtacgtcgtcgccgtcgtcgagcccgcgggcgtatccgtgacggtctcgccgagacggctccgcttcgcgcgggccggcgagaagagggcgttcaggataaagatggaggcggccagcagggggaggagcggcgcacgcgtggcgagaaggcaggtcgtggccggctcgtacgcgtggagcgacggcggcgcccatgtcgtgaggagccccattgttgttatcttcgactgatcatcgttcggtaagctagtggctagctcgcgcggacagagaactctggacgaggataggtttagccataccttgttcgaagcagtggatgcaaggcaatgaaaaccttcggctatgtgtgtggaagaataatcacatcaagcaggaaaaaaatccagttgtcttatgtgcctgaaaatatcacgaatttgtggcgcatatcctgtattcctgtgacgttataaaccactacttgatgttatattctcgg

SEQ ID NO: 34030 - DNA, 1806 bp, Zea mays
  Clone ID: UC-ZMFLMO17209B10_FLI
gcgcgccgtacaagctgcggcggcggaactcggagacgctgcgcgcgcagtacatcaacaccaaagagctgagggtctgcgtcggcacctggaacgccggcggcaaggcgccgccgaacgacctcgacatcgccgagtggctcggcactggcggcgacgccgagcccgccgacatctacgtgctcgggttccaggaagtggtgccgctgaacgccagcaacgtgttcggcgcggaggacgggcggccggcgcgggcgtgggagtccgtgatccgcggcgcgctgcggcaggcgcagccgccggcgcccaggtacaggtgctacagccaccctccctcgccgtcgcggttcgagcccccgatcggtgccgccgaagagctcctccccggcggcacggacaccgagaccgacaccgacgaggacgtgcccttgggcgaccccgtcgcggcagccactccgaccccgagaaagctgagcaggctcaaccacttcagcgtcgtcgtgggcgagaacgagaacggctcatcggagctcaacggcgacgaactggacgacgggcctgaccagccgccgcagcagctaagccttcagcagcgggcgctgctgaggtccctgagccgggcggacagggtaggggtgctctggccggagcagccgctggacctactccccgcgtcgtcggcgtcggcgtcggcgtcagcgtcgttcagggcgtccaagtcgttcagccgggccgcctacaggtcgtcgttcagggggtcgtcccgcgtggcggccgacgtggtggatgacctgcccatgatcccggacctcgacctggacggcgcgctgcggaagaagggccggtcgccgttcgtgcgcatcgtgagcaagcagatggtggggatcttcctgacggtgtgggtgcggcggggcctccggaagtgcgtgcagagtctcaaggtctccaccgtcggcgtcggcgccatgggctacatcggcaacaagggggccgtgtcggtgagcatgtccgtgtaccagaccatgttctgcttcgtgtgcagccacctcgccgccggcgagaagcccggcgacgtccacaagcgcaacgccgacgtgcacgagatccgccgccgcacgcgcttcgccgccccgggcgacctgcagctgcccagaaacatccacgaccacgaccggatcttctggctgggcgatctgaactaccggctggacgcgtcgtacgagcgagcgcacgagctgatctcggcgggaagctggcgcgagctggccgagacggaccagctgaagcgggagctgaggaaggggcgggcgttcgacgggtggacggagggcgtcctggagttcgcgccgacgtacaagtacgagctcggctcgaggaggtacgtcggcgtcggggaccaccagggccagagccagagccagaggggcggcgggcggcggacgccggcgtggtgcgaccgggtgctgtcgtacggcaaggggctgaggctgctgggctaccggcggtcggagctggcgctgtcggaccaccgtccggtgacggccacgtacgcggcggaggtggaggtgttctccagccggaagctgcagagggcgctgacgctcacggacgccgaggtggagggcggccaggtcgtgccggacctcgatttttgaccgggggtcagccttccttctattttcgcgggaaaaatgtcagtttaattgtaaatatgggtactgagtaagagtgagcacaatgagcttctgaatgcattggcagatcgatgtatcatctccatttaatcatgattgaatagtgtgcctc

SEQ ID NO: 34031 - DNA, 1604 bp, Zea mays
  Clone ID: UC-ZMFLMO17209C02_FLI
catttccattccatccggtttcttccgacgacggtgtgtacagagagcaggatcggacaagtctctgctggtagaagcatggcgcagcgccggctgttgggcacggcgccggcgcccgcgggcgatgcggcgtcgcacggctcgggctccagccccgacgcgatgcggatcatggtgggcgtgctggtaacggtcatcgtctgcacgctgctctactgcgtctactgctggcggtggcggaagcgcaatgccatccggagatccctgctggacagcctatggcggcggtcgagctcggacctgccgctcatggacctcgcctccatcctcgctgccaccgacaacttctccaaggccaacaagctcggcgagggcggcttcggccccgtctacagaggcgtgctgagcggcggctccgagatcgccgtgaagcgtctgtcggcgcggtcgcggcagggcgcggcggagttccggaacgaggtggagctcatcgccaagctgcagcaccgcaacctagtgcggctgctgggctggtgcgccgagcgcgaggagaagctgctggtgtacgagtacctccccaaccgcagcctcgacgccttcctcttcgatccgagcaagagtgcgcagcttgggtggagcacccggcacaacgtgatcctgggcatcgcccgcggcctgctgtacctccacgaggactcgctgctgaaggtggtccaccgggacctcaaggccagcaacgtgctgctcgaccacaagatgagcccaaagatctccgacttcggcatggccaagatcttcgaggacgactccgacgcgatcaacacgggccgcgtcgtcgggacctacgggtacatggcgcccgagttcgcgttggacggcgtcttctcggtgaagtcggacgtgttcagcttcggggtcctcctgctggagatcttgagcgggcaacggaacggcgctttgtacctcgaggaacaccagcagtccctcatccaagacgcatggaagctgtggagtgaagaccgcgcggccgagttcatggaccagtcgctggggcggtcctactccaaggacgaggcgtggcggtgctaccacgtcggcctgctctgcgtgcaggaggaccccgacgtccgccccaccatgtccaacgtcctgctcatgctcatcagcgaccacaccaagttacccgagccagccatgccgcccttgttcgcgcggctcaggaacatctccttgctggcgccgccactcactaccaaaaccgagtccaccacgtctccgctgtcgatcaacgacgtctccatcaccatgatcgaaccgcgatgagctcatgcgttttctacttctgacaactgagggagaggcttcgagtgtaaatttataagactgcaatcgttcagaatgactactcctatgtactagtaagtttttttttatgctgtgcacaagtgtgggatttaactactagactagaacatgcggcgcccgtaatcgggtcataacagatttttttttatgtttatgcattctcctatgtgatccaatggactaaaatgtgtcaccactgctagcaaagaccatataactattttaattagtttgtatcc

SEQ ID NO: 34032 - DNA, 590 bp, Zea mays
  Clone ID: UC-ZMFLMO17209C11_FLI
ctctgactccccaactgtgctactggccagtctgaaagccgcgggagccggcgtgaacctcacagctgcctcgacggtgtacctgttcgacccctggtggaaccctggggtagaggagcaggccatggacagggtgcaccggatcggacagaagaaagaagtgaaggtgataaggctcatcgtgaagggcagcatcgaggagaggatactggccctgcaggagaggaagaagcggctgatcagcggcgcattcgggaagaagggaggcaagaacgagaaggagatgcgtgtcgaagagctccggatgatgttgggcctaggtaagtaaggaaaaggctggttggtggtgataggaggagtgatgcttgtgttgcttgtgatatagctctggcggtagaagttgtagctagggcgatggagtttcagtgtaggcatagggtagggctggaagaaaacgaaatccaggcacgcgtgcatgtatctctgatgctaaacattagcactagatcagtgctaaatgattgggtcctcacttcctcagctgtgatggtcaattactgaacacggtcaaatctagtagtagctgtgct

SEQ ID NO: 34033 - DNA, 2047 bp, Zea mays
  Clone ID: UC-ZMFLMO17209D06_FLI
ggaagctgagctggctagggaaaaaaccaatgggtacaaactcgacaagtctcacatctttgcagtcaatttgctcgatgatttcgagaagtacatgaaagttcctgacacatggacccctgctgaaattaagccatacactgctggagaaaatcttctgaagtggctaactgatgaaaaggcccgagatcaatttgtcattcgtgctggcacactaactgaagtttattggaatgatgcaagaaagctagcacctgagcttgtttttcaaaagcagtactggacagatagtttcattcagtggtcccctctgggaacctacatggcaacggttcataggcagggatcacaggtgtggggcggtgaaaatggcttcgagcgtttgatgcgttttgctcattccatggtgaaactgattgacttctctcctggtgagaggtatttggtcacatacagcagccatgagcccagcaaccctagagacacacatagagttgtcctgaatatatttgatgtaaggactgggaaagtgatgcgagactttaagggaagcgctgatgattttactactggcgggaatattggggtttctggtgtttcatggcctattttcaggtggggtggtggaaaggatgacaaatattttgcgaggcttgggaagaatataatatctgtatacgaaacagatacattctcccttcttgataagaagtctctgaaggtagaaaatgtagtggacttcagctggtctcccactgatcctatcatatctctgttcgtgcctgaaatgggtggtggaaatcagcctgcgagggtgagtctagtgcaaatccctggcaaagaggagctgcgacagaaaaaccttttcagtgtcagtgattgtaagatgtattggcaaaacagtggagaatatcttgctgttcaagttgatagatacacaaaaacaaaaaagagcacctacactgggtttgagctgtttagaattaaggagagggatatcccaattgaggtccttgaactcgagaacaagaacgacaagatcattgcatttgcatgggaacctaaaggacatcgctttgctatcatccatggtgatggccctaagcctgatgttagcttctacaccatgcgaacttccaataacactagccgtgtatccaagctcacaaccctcaaggccaagcaagctaatactctgtactggtctcctgctgggcgcttcatagttcttgctggactgaagggtttcaacgggcagctggaattctacaatgttgatgaactagagacaatggcaacaggagagcattttatggcaacagatatcatgtgggatccaactgggagatatctcgcgactgcagttacctcagttcatgaaatggagaatggctttcaaatatggtccttcagtggcaagcatctttacaaggtgtcaaaggatcatttctatcagtttatatggcgcccgagaccgccctcactactgacggccgagaaggaagaagagatctcaaggaacctgaagaagtatagcaagaagtacgaacaagaagaccaggatgcattcaatcagttgagcgagcaggaccgcaagaggcggacacagcttcaggaagaatgggactcatgggttgccaagtggaagcagatgcatgaggaggagcgtgcttacaggagggagctcagggatggggaggccagcgacgacgaggaagagtatgaggccaaggaagttgaggtggaggaagtcgttgatgtccgtcaagaagttcttgcattcgacctagatcaggagtgaaaacacttattatagaatctgttgatttctttcctgttggtgttaaagttcattggggtcgcattgcataataggccctagtgatcaagtgcgcaatttactgatcgttgtactgcttatttgtacacttgctgcttgaattgttggatcatgtgtttagatatcaaattttgctgctggattactaatctgtctggttctgcaaaattagttgtactgcattcacaattcatctgctttcatatt

SEQ ID NO: 34034 - DNA, 687 bp, Zea mays
  Clone ID: UC-ZMFLMO17209D08_FLI
gggttggcgtcaaaggtgccaacagggaatctccggggtccaacgcgaggctcttggccacggtggttgcgggtgcggtcctagctggggagctgtccctcatctctgcgcaggccgctggccatctggtcaagagccacatgaaatacaacagatccagcaaggatatgtccaagacccttgcagaggaaacagacaaagccaagaaatgctgaataatatgaagtagttgttctatagccctttgggagaaaaggagcagaaagggtcgtacaggatgattttcttgcggcatgctcaggtggaaagggggaaaaaaaagaccttcaggcgaaaagagagaattcagtcgccttgtcatatttaccaggcggtgagacctgttgtggatcctggagtatgacctatttaatttgttgatgtcgttgttatagttcctctaccgtagttgaccccgtttgcgtcttgttttgcccgtcccatgggcattggagaatctgaccatgggttttgtcccaagcttgcatcacactggggggacctctgctttgcggcggtcccgtctcaggaaaaaaaaatttgcgctggtaactgccgggtgctgtgtcctgtgtatttcagctttgaaatttttatccaatgcttttgagtcgaagagtcagtggactcgatgatgtggttgtaaag

SEQ ID NO: 34035 - DNA, 793 bp, Zea mays
  Clone ID: UC-ZMFLMO17209E01_FLI
ccaaagtccaaaagcgaggaaaggaaggaggacgtcgcgcaagaaacgaaagccacccgccccgcccgcctccaaccgcgcttaaatgcgcgcctttcttcttccgcgttaaaccctccggctgtctcatcgctccgcgtagtaaactcttgttacaaaaggccagctgctcgtttgctccgccgcgcgccgtcggttggctgctcgctcgctctggctgggcggcgtcggttgctcggctgagtccggccggggagcgagcaatgcacattgcgacctgcgtgtggcaagagaaggcgtcggccggcggcatggggggagctgctgctggaggcggctgcgtcggcggagagtggggcgcggcgcgcgcgaaggtggcgtcggcgctgggcgtggccgggtgcgcgctcaactgcgcggtgagcttcgtggtgttctcggcgctggacgtgctggacgtggtgctgtgcctggtgtacaagctggtggactacgcggcggaggcggagtggaagtcgtgctactgcgcggcggcgtcgggcccgcgggcggcgcagctgcccctcgccgccgcgccacccgcggcgggcgggcccaaggtggtgcggctgtcggcgtcgtccgcgaagctgcagctggaggacgtgtcggacacgctgtacgtgcggccgtcgctgctggccgacgcgacgcgggcgggcaacggcagcggcagcggcagcggcgtggcccccgcgctcaccgtgagccccgccatcgcggagctgatccgcgggaagatggaccgggcccc

SEQ ID NO: 34036 - DNA, 1730 bp, Zea mays
  Clone ID: UC-ZMFLMO17209F05_FLI
cagaaattggcagggaattccaacacagatttgtaagtattcaaacagctggggatgatcttatgtctgatagataccacttgagttctgcacctggaaataatgtgtttgtgggatttggagtgcggccagcgggcgggcgggtgcagcatgcaaggagcggatgggtccaggatgcgtggagcacgattgagcatcgggtcggtgcacgttaaaacataatgcaaatgagctgcacctgcactactgtgtagtgactacaaactcgtgaatcaacaaaatctacaacttgaaggctgtgatagcgagcagggggtgagggagcgaacagagtggttgtcccctcattcgagatgtaaagtcggccctctccttacctcaatgtactgctcctctgataatcaatgtagttgctgctgtcagttctggaaacgtgccgttgaatgatgttcagttgctgtgggttaacctaattatggatactttgggtgcccttgcattggcgacagaaccacctacaaaccatcttatggagagaaccccagtagggagaagggagccattgattataaatatcatgtggagaaacttaattatcatggctttgtttcaagtttcagttctcctcactctcaacttcaagggaataagcctcctgcagttgaaaaatgatgatccagcacatgcagataaagtgaaaaataccttcatattcaacacatttgttttctgccaggtgttcaacaattcaattcgtgtaaaccagatgagctgaatgtattcaagggcatttcagagaaccatctgtttattggcatcatagctataacagttgtactccaggtagaatctctagaatgagtttcctttcttaactaagataaattgatttaggtctaagaaactgttttagatcacctggactttgccacgaataccttttatcagaaaatggggggaacgataaaggatgctggaaaatgaaatatattattatagctaataaattggctttcctggaggcactaggatttggacccagccaagtggccaagtgtatggaagaatcgtgtcgtggcacagacgaccagctgcttgactctccctcttctgtctgatcacatttgtacgcaagatatagatagtactactatacagtggagtcttcttgcagtttgtctattttacacaactgacatagtcttcaggtatcttattgtctgttcttatttagttatattaatgatgtttactattaattttgaccatcacaacttcgacttgtccagctctgcctctattagtcggttcagctctgcttctataatttttttttggtccactgtacaatgggctcctttattacctccttgagaatcgttttcagtttggtccactgtctcatcatccatcgaatcacggcccaggcacacaatctaaaaggcaaaagaattatagaggcagagctggacatagtcttcagttgaatttaaggttcctcttcccttgtttggaagaggttatgatcattgtacgctcccggctcaatgttgaacactcttgaagtacactgtgaagttgcagaggatggtcatcagaatctcaaagatgaagaattgccataaaggtgctgatgagttctttgatgatatatgtaatttcaattacatgaactataagaaagtgcaaattgaataagtagagatgatataatattacatatttatatc

SEQ ID NO: 34037 - DNA, 3370 bp, Zea mays
  Clone ID: UC-ZMFLMO17209F11_FLI
cagcaccgcatcactccgcctcgtcccccacttctcgcacttccgcttcagcttccaccgtgcccaagagtcacgaggcggcggcgggtcacgccgacgtactctcaggtgctgcggtgggactgcccctgctgctgccgcgggggcggcggaggggaggatggccgcggcgacggcggcggacatggtgtgggtgagggtgcttgaggatggcgtgttccggttcgacgcgtcggaggcggcgcgcgccgccgcggggcccagcctctcgttcgcggacccgcggcggcgggaggcgccgcatgacggggccgacatgcccgccgttgtcccggtatgcgaggtcgcggcggggggatcccagaaggtcgtgataaagcttcctcctgggacatctttctatggtactggagaagcgagtggcccacttgaacggactgggaaacgagttttcacatggaatacagatgcatggggttttgggccaggaaccacttcgttgtaccagtcacacccttgggttttggctgtcctccctgatggaaaagcattgggtgtccttgctgataccactcggcgttgtgagattgatttgcgacaagaatcaactataaagttctctgccttatctgcctaccctgtcatcacttttgggccatttaatactccagctgatgtcatgacatctttgtcgcatgcaattggtactgtgtccatgccgccaaaatggtcacttggctatcatcaatgtcgttggagctatgattcttctgagaaagtactcaaggttgttaggacatttagggagaaagacattccttgtgatgttgtctggatggatattgactatatggatggttttaggtgcttcacgtttgatagtatccgattccctgatccaatatcaatggtagatgatctccattccattggttgcaaagcaatctggatgcttgacccagggatcaagaaggaggagggttactttgtttatgatagtggctcaaaaagcgatgtttggattcaaaaggcagatggcagtccattcgttggggaggtgtggcctggtgattgtgttttccctgactatacatctgaaaaaacacgagcttggtgggctagtttggtaaaggacttcatctctattggtgttgatggaatatggaatgatatgaatgaacctgctgttttcaaaactaccacgaagacaatgcctgaaagcaatattcataggggagatgctgatattggtggtgttcaaaatcattcatactatcacaatgtctacggaatgctaatggcaagatctacttataaaggaatggaaatgggcaatgcagctaaacgaccatttgttcttacacgagctggttttattggaagtcagcgttatgctgcaacatggactggtgataatctttcaaattgggagcatctgcacatgagtctaccaatggttcttcagttgggtctcagtggtcaaccattgtcaggtcctgatattggtggttttgctggaaatgctactccaaaactttttggaagatggatgggtgtgggtgcattgtttccattttcacgtggccatacagaaactggaagcattgaccacgaaccatggtcctttggtaaagagtgtgaggaagtctgtcgccttgcgctactaagacggtaccggctactgccacatatctacactcttttttaccactcacatacaaagggtattccagttgctactccagttttctttgctgatacacaagaccctgaactgaggaaagttgagacttcctttctccttggaccactcttagtttgtgcaagcactttacctaataaaggagctcatgaatatgcacataagttaccgaagggcatatggttgtcttttgattttgcggattcacaccctgatctgccggtgctgtatctacaaggtggagcaattcttcctgtaggtcttcctattaagcatgttggtgaagcaagtttggaggatgacctgtcactaattatcgcattgaatgaaaatggtaaagctgaaggtgttctctttgaagatgcaggagatggatatgcattcacacagggagactatcttttgacatattatattgctgaactccactcatcagtggttactgtcaaaatcttaaaatctgaagggtcatggaagagaccaaaacgaaatctgaaaataaatatattgcttggtggaggtgctatgataagtacagatggtgttgatggtgaagtaatacaccttacaatgccttctgaatctgtagtgtcaagcttagttgcaaccagcgaatttgagcacaagaaacgaatggagatgattcagcctatacctgatatagaagagccatcggggcaggaaggtgctgagctatcaaaaatacctgttgatttgaaaagtggagactggttccttaagattgtaccatggattggaggccgtattatatcgatggcccatattccttctgattcccagtggcttcacagcagaattgagataaatggttatgaagaatacagtggggctgaatataggtctgctggttgcacagaagagtacaaagtcatcaggaggcaccttgaacaatctggagaggaggaatctatttgtatggaaggagacattggtggtggtctggttctccagcgccagatatccattttgaaggacaacccaaagattgttcagatcgactccagcattcaggcaagaagtgtaggagctggttctggtgggttttcaaggttggtctgtttacgagttcatcctacattcaccctgctgcacccaactgaggtagtagttgctttcacggccatcaatggttcaaagcaagagatctccccggaggcaggagaaataacattcgagggagacctcaaacccaacggagaatggatgctagtggacaagtgtgtcgggctgagcttggtgaaccggtttaatcccagggaggttagcaaatgctttgtgcactggggaactggtgatgtgaacatggagctctggtcagaggaaagaccggtgtctaatgagacgccgttgaggatttgccaccagtatgaggtgcagcaaacaacctaaacacctgcccgaagagcagaaataaaaataccaatttggaggatacttcagttgcttgcacttgttttacggtctctgtattgacggtcgcgcaccataacttccatggtattttggagtcgtgtcgttagtcattaccctcttggaggactttgggtctgctgaaaacatggttactcagcaatatctgctactgttcacgactgacattcaaagggttactcagcaatatatggataaaatttgtgttaaagatag

SEQ ID NO: 34038 - DNA, 1559 bp, Zea mays
  Clone ID: UC-ZMFLMO17209F12_FLI
ggccccatgtgcgctgctggggagccccgccgccgcgccggagaaaatgccggaggaggacgaggagatcgtggccgccgtcgtggcagggaagatcccgtcctacgtgctggagactaggctgggagattgccgccgggccgccgggatcaggcgggaggcgctgcgcaggatcaccgggagggagatggacgggctcccgctcgatgggttcgactacgcgtccatcctcggccagtgctgcgagctgccggtgggattcgtgcagcttcccgtgggcgtcgccggcccgctccttctcgacggccgccggctctacgtaccaatggccaccaccgagggctgcctcgtcgccagcaccaaccgcggatgcaaggccattgccgagtccggtggggcctccagcgtcgtgctcaaggacgggatgacgcgagccccggccgtccggttcccatctgcacgccgcgccgccgagctcaaggccttcttggaggacccagcgaactttgacaccctggctatggtgtttaacaggtcgagcagatttggaaggctgcagggagtgaagtgtgcgattgcagggagaaacctttacatgaggttcagctgcagcacaggggatgccatggggatgaacatggtctccaaaggtgtacagaacgtgctggactacctccaggctgacttccctgatatggatgtcatcagcatatcaggtaacttctgttctgacaagaagtcagctgctgtgaactggatcgatggccgtgggaagtcggtggtttgcgaggcggtaatcaaggaagaagttgtgaaaaaggttctcaagacaaacgtacaggctctcgtagaattgaacgtgatcaagaaccttgccggttcagctgttgctggagctcttgggggtttcaatgcccatgcaagtaacattgtggcagccatcttcattgctactggtcaggaccctgcacagaacgtggagagttcccagtgcatcaccatgttggaagctataaatgatggcaaagatctccacatctctgttactatgccatctattgaggttggcacagttggtggaggcacgcagctggcctcacaatctgcctgcttggacctgcttggcgtcaaaggtgccaacagggaatctccggggtccaacgcgaggctcttggccacggtggttgcgggtgcggtcctagctggggagctgtccctcatctctgcgcaggccgctggccatctggtcaagagccacatgaaatacaacagatccagcaaggatatgtccaagacccttgcagaggaaacagacaaagccaagaaatgctgaataatatgaagtagttgttctatagccctttgggagaaaaggagcagaaagggtcgtacaggatgattttcttgcggcatgctcaggtggaaagggggaaaaaaaagaccttcaggcgaaaagagagaattcagtcgccttgtcatatttaccaggcggtgagacctgttgtggatcctggagtatgacctatttaatttgttgatgtcgttgttatagttcctct

SEQ ID NO: 34039 - DNA, 958 bp, Zea mays
  Clone ID: UC-ZMFLMO17209G12_FLI
cttgacagttctatctatccccaccacaaataagagaccacctctctgccttcttctcggaggtcggagaagagctctctgcttcattcggccggtccaactccaccgaccgatccaatccaacccactgaccatggggttcccgccggtgtgctgctgcgcccccatccccaagccggtcgtcgccttctgcaacctgctcggcgccatcaaggacgccgtcctgctgacgctcgccgccgtgggcttcccgcacgacgccgcgcgcggctcggcggacgcccaccagcccgaggaggtgaagacccggctccccgccgtggagtacgcccagctcctggccgagcagcagccgtcgcccgccacccacgcggcctgcatcgtttgcctggacacgctggaggcggcggacgaggtgcggcggctgggcaactgcgcgcacgccttccaccgggcctgcatcgaccgttggatcgacctaggccggacgacgtgcccgctgtgccgctccgacctcctgccaagcccccggggccgggccgggctgctcgggctgggccggctcgccagccgtctcacgcgcgttcgcgtttggtgaggaccgtctcggaggccacttttaccttttcggtggccaggccgcggtcgcagcccatcccggtggtgccggaacggcgcggacacgttagcgacggcgaccgggccgccggatggtcttaaatctgctctgccacttgccaaccgctaatcaaccagcgggcttaattagcagcggattggcttggtgtctgacagtcgatattatgacagctaaataagcagttaaatgtttctataggattgagtatacacggcagctaaatgtttcgtatagtagtgctcctaacagccatcttcattgtacatgaatgtcctctatccgatcctttcatatagtataacagttaaattattcatc

SEQ ID NO: 34040 - DNA, 1835 bp, Zea mays
  Clone ID: UC-ZMFLMO17209H09_FLI
gcttcatttcagaagagaaaagattatttagatgctgtggcttcagatggttgtttgactcagagttcacaggggttggctgcaggggagatgatttacagtttgagagactacttgaaagattctgtcagcaataacatctcaaaccttaactggagtgcatctaaaaggcggtctgggagacggtttagacaaggagacactgggacttcaactccaacctttagcggaagcccaggcaaagggggttttggccactctactgacacctcagagaagaaaggcactgaagaaactcacagtgagaacacaggagaccctctcagcatcgatggtgttaagtctgattctccattacctactgcagtaaccactaaccactctaaacacgattcaacaaatttagggctttctttatcaagtcctgtaaaaatcacgcaaaggccactccgaaactgcagcatagactcaaagtcaaaagaatcaaaaacaagggataccactttgcatccactgattttcaaggaggatggccttgcagataatactttgttgacttacaagttaaagaatggagaggctctaaagcaagggtataaacggggaacatgtatcatctgtaactgttgcaatcaagagttttctccttcccactttgaagaacatgctggcatggggagaagacggcaaccgtatcacaacatttatacattagaaggattatcacttcataagctagctctgcaactgcaagatcatttgaatccaaatggattcgacaatgctagtgtttccagcgtcagtgactaccataaccttacttcttcaggttgtggcagagaaccttccactaccagtggacctattgttcctctgaaacggactttacaagaaagagtggtagaaacagagagttgctatttctgtgggtatggccacacaacgattggaaatatcaatccagacacgattattttctgtaaccagtgcgagagaccatgccacatcaaatgttacaacaatagagttgtaaaaaagaaggtgtctctggaaattttgaaagaatacatgtgttttcgcttcttgtgctgccaagaatgtcaatcactccgtgcccgtctagaagaaggactggaaaagtgtgtagggattactgtccttagacggataagatctaatatttgttggcgacttttaagtggaatggatgcaagtagggatgtcaaactctacatgcctcaggtcattgatatcttcaaagatgcatttatggattctactgatgagcacagtgacatcatctcagacatggttaatggcaaaaatggagaccaagagaaggattttcgaggaatgtattgtgcactgttaactgcaagcacacatgttgtctctgctgcgattctgaaagtgcgcatcgaacaaatcgcagaacttgtcctcattgctactcgtagcgagtgcagaaaaaagggttacttcatacttctcctaaagtcgatcgaggcaaatttgagagcctggaatgtaagccttcttactgcgcctgttgaccctgaaatgacacaaatctggtcagagaagctcgggttcaccattttatcagctgaagagaaggagtcaatgctggagtcgcaccccttggtgatgttcaagaacctagtcttggtgcagaaatcacttgcttgagcaaatctgatctatgtttgcttgtactactttagaaatgaaaacccggtttcgagagcttagacagtacggggttaggccgtgttaagtcattttgtttattatttagatttaaaatattttaaactatttaaatatatattata

SEQ ID NO: 34041 - DNA, 701 bp, Zea mays
  Clone ID: UC-ZMFLMO17210B02_FLI
cactggggtcttggcaagctgattgctttctacgatgacaaccacatttccatcgacggagacacggagattgcattcacagaggacgtgagcacccgcttcgaggctcttgggtggcacacgatctgggttaagaatgggaacaccggatatgatgacatccgcgcagccattaaggaggcgaaggcagttactgacaagcccaccttgatcaaggtgactaccacgatcggttttggatctcccaacaaggccaactcatacagtgttcatggaagtgcactgggtgccaaagaggttgaagcaaccaggcagaaccttggatggccctatgacacattctttgtactagaggacagtcctatgcctcggagcttggaataatgatgatggagggagcggaaggatgcctgccatttgttggagcgtgcgtggtagtatttctaggcctgtaataaacaatgcctttttccatttacgttgttgcttttatccggtgaccctcacacgattcatcaaggtggtgagcctggctattaaatcgggtgctgttttttttgggtaaacattggcaatggccttactgtcttgcagcagtgcttcgttcgtttgctggattgtgggtttaagatgctgcattttggctcttttgttgatacattttcccattggcttttgtttgtgatacatacatagcattt

SEQ ID NO: 34042 - DNA, 1523 bp, Zea mays
  Clone ID: UC-ZMFLMO17210E05_FLI
tacagctagcatagcaaggaccacgacgtgccgacggcagagaagcgcaactcaactcgtcgggcttcctttgtcccgttctttgaggcgcaaaggaaaaccaagcaagagggagaaggctacctaacctagctagctaaggacgagcaatggaggtggccgcagcagcgagctacagctactacggcttggaggcggccgacgacgacgtcgacaacctcagggccacggagctcaggctcggccttccgggcacggaggaggcggcggcggcggcggcggaggcggaggaggaggagccccggcaggcccagaaggtggcggcgccgccgtccacgcccaggggcaagaagcgcgacggcgtcagcggcgtgaccgaccccgcgccgccggccgccaaggctcaggtggtggggtggccgccggtgaggtcgtacaggaagagctgcttcctgcagcaggcggcggcggcggcgggtgccaagggcaagccagcggcggcggcgccggcgctggcgaagggtgctccgggtccggcgggcggcggggtgttcgtgaaggtgagcatggacggcgcgccctacctgaggaaggtggacctcggcacgtgcgggggctaccgccagctgcgggaggcgctggaggccatgttcctctgcttctccgggccgggctcgggcgacgcgtccggcggcggcggcggcggcagcccctccgacttcgccgtcacctacgaggacaaggacggcgacctcatgctcgtcggcgacgtgcccttcggcatgttcatcggcacctgcaagcggctgagaatcatgaaggggtctgaggccagactaggcctcgggtcagccaagaacaacgactgagggagagggagacgacgaccattgtgcaggcccgaccgagatccacgcacacggcggcgcggcgcggcgcggcttgtgcacgcgtaagcgggggattgttgtgcgtccactccgaggcatggggtagtatgggcttgtgttgtaccatccccacctcgtctgccatcaatggagcagcaagatagaaaagctgcttggaacaggagaagatgaagctgcttgcttggattggaacgagggggcggagatggagagagatagaaaagctttagagggtgtttggtttctacatactaatttttagtccctacattttattccactttagttacaaaattatcaaatatagaaactaaaactctattttagtttctatatttatcaatttatatactaaaatggaacaaaatgaaggaactaaacattagtccctagaaaccaaacacctccttaatttgtgcatccaaccaagtggagtggagtggaatgatgtgtggtcgctttgttcttttgtttttttaattattttgtggtactactagtaggaggggtgttagcaacacaaaaggagtggagtggagttgagagtggaattgaatctccatgcacgcgtgtctgtacaaaagctaaagatcactcttctttccctgtctt

SEQ ID NO: 34043 - DNA, 1348 bp, Zea mays
  Clone ID: UC-ZMFLMO17210E12_FLI
ggattgctttgagcaaatcctacccaaacagcaaattctttcaggagatgaatgatgcatctgaggtactgggtgtaatctttgagtgtttgcataagtcatacacttctcgtactgtctaccatggtgtatcccacgagaaaaattctattggatcatgggattgtgcaaatatttcttgcataacacataatctttttgggatggacgtatatgaacggatgaactgtcacaattgtaagatggagtctaggcagctcaagtatacttcatttttccacaatatcaatgctagttcactccgaactgcgaagatgatgtgtccagattcttcatttgatgaacttttgaaggttgttataatgaatgatcaactagcttgtgatcaagacgttggcggctgtggaacaccgaatcatatagaccacatcctttctaattccccacatgtctttactgttgttttgggatggcagaacaacaaagagagggtggatgacatatctgcaactttggctggtatttcaactgagatagacattagcatattctaccgtggtctagatcaaggaggcaaacacaccctggggtttgttactatggccagcattaccattgttttgccttcaaggatggacggtgggtcatgtatgatgaccagacagtcaaggttattggtagttggggtgatgtgctcgtgatgtgtgaaaagggccatttgcaaccccaagtgcttttctttgaggctgcaaattaattattcttcagagtcgcaaaacgcgctacagcggttaacatgccctcaaatataggttttttccctgcggccatgaagattagaaatagggtagcagattcgttttgagcggggatatatagtactagcattcaacggtgcttttcgttgtgagtccgtaataagcagtcatctgagcattctagagcaaaaaagggagctgtttatcccccccttttttgctttaacctttggtgtaggcgctgaacttctgatctcatctgccaataaatcttcactgccgatcaagcgggtggagcattcgacttgaactgccatccaacagttgtagccgaatctgcatgaactcttcgttatacaccaatcatctatagaattttctgcttacattgggccgggcgggcgttctctctctctctgttttttttttggggtgggggtctggtataggagtgacagttttgaggccaccagatatagaatggaatgatatgggaatgggtgatgcggtgtgaactgtattttgctgtggatgatcttttgaaaagagtaaagctatctggaatatggatatggtaagaaatctgtagt

SEQ ID NO: 34044 - DNA, 1862 bp, Zea mays
  Clone ID: UC-ZMFLMO17210F12_FLI
gccaagcgcctcgaaggcaaagcttccactagccacaggccaacgaaatcgcaaagcgaagctacggccaccgaccgacgttccaagaagcgaaacgaaacgaaaatgatgatgatgatgggagagagagcgcacgcgcctccgtggcagcgctcgccggcggccagcggcgtcacggacgcggacgacgcgtctccgtacgccctcctagcggcgctgcagcattacctgccgtcgaacgaggtggcggcgtacgacgaagacgacgaggaggcggccctggcggcggcgaccgccgccgtcgacgcgtacgcctgcgacgagttccggatgtacgagttcaaggtgcggcggtgctcgcgcgggcggaaccacgactggacggcctgcccctacgcgcacccgggggagaaggcccggcggcgcgaccccaggcggtaccactactccggcgccgcgtgcccggacttccgcaagggcgggtgcaagcgcggcgacgcgtgcgagttcgcgcacggggtgttcgagtgctggctccacccgtcgcgctaccggacgcagccctgcaaggacggcaccggctgccgccgccgcgtctgcttcttcgcgcacacgccggaccagctccgcgtgccgccgccgcggcagtccagccctaggggcgcggcggcggcggcgtcgccgctggccgagtcgtacgacggctcgccgctccgccgccaggcgttcgagagctacctcaccaagagcggcatcgtgtcgtcgccgccgccgaccagcacgctcgtctcgccgccgaggtcgccgccgtcggagtccccgccaatgtcgccagacgccgccgccgcgctccgccgcggctcgtggccgggcgtagggtcgcccgtcaacgaggtcctcgcgtcgatgcgccagctgcggctcggcggcggctcgccgaggtcggcgccttccggcgggtcgttcttgggcggaggctacccgttcgggtccccaaagtcaccggccgggctgtacagcctcccgtccacgccaaccaggccgtccccggtgaccgtgaccaccgcctccggcgccaccgtcctcaccgtggaacgcctcaacctcggactcatcggggacgaggagccggtgatggagagggtcgagtccgggagagccctccgcgagaaggtgttcgagcggctcagcaaagaagccgccgttcccagcgacaccgccgcatccgccaacgttgagggagcggcccccgccccggatgttggatgggtctccgacctcatcaactgagggaactcgtggaactaccagctcagaagttcaggggggaataacaaaaaaaaagtaggaagatttttaattttttagttctttacaaatattttcctggtccttgtacagatgttcctgctttgtgaatagtcttggatggttgtcgaagggaggggaggcagggaatggttgatttgttatgaggtttcagatgatggcatgtcggtgaaggagacaaggtgcccagcaaaccatggtggaaaatggatcaagaagacatgtgcaggcgaccatgtatacgggttgtctagatgcacatggtgtcttccctgcctgtgaggtgggagcatgggaggcgatcatggcggcgatccaagaccgaacccataatttccgcgagcgattccagaacgaacggcgtcttgagttgatgttcattctgctatttgccttttaagattcgacgagttattactgctctgtgatttttctcaaagtatttccatattgatctatgcatgcatgtacaatgtcagtactgctactttcgctgatactccgtaacaaaattaattaaaaccggcgttgct

SEQ ID NO: 34045 - DNA, 1176 bp, Zea mays
  Clone ID: UC-ZMFLMO17211A05_FLI
gtcgaccattggccgccttcggcggttgcagtatctggtttttactggaaactcacttcatggcgaatcactgatggattaagtaactgcactggtcttttaatcatctttcttggcaacaaccatcttaccggggaaatcccctcttggcttggtggttttccaaagcttgcggctttggacttgtcaaaaaacaatttgaccggcagcatcccgccatccctgggcaatctcacgaacctgcaggagctgtatcttcagattaaccagcttgagggttccatcccaaaagagcttggaaggctcaagaacgtccaatggtttgcgttgtttgcgaaccacctctcgggtgaggtcccgaaagctgtgttcaacctatcatcagtggttgggttcggtgtggatcaaaatgatctgcacggtacactgccgtccaactggggaaacaaccaaccagaccttgagttcatctacctcgcaaagaatcacttcacagggaatgtcccggcctcccttgccaatgcaaccatgatggacaccatagacctgggtgtcaacaatttcactggaaggatgccaccggagataggaactctttgcccaataatattttcctttgactcaaaccagattgaggcaagcgccactgagggctgggagttcgtcacgctcttgaccaactgcaccaggctacgcgtgcttagcttccgcaacaatatgcttgcaggtgagttgccaccctctgtcggaaacttatcatcaacacatctgcaggtgctttacactggatggaacgagatctatgggcgcataccacctggcattagtaatcttgtaaacttgcagaagctttccctcagccagaaccatttcaccggtgctctgccaaacacaattggtcggctgaaaatgatgcgggatttgggaatcgatggcaacctgctgtcggggacaattccaccctcaatcggtaacctaacactgcttgagttaatcactatggacaacaacaatcttgagggatctcttccttctaggggatgaaagtggtaatcccaactgttagaataaatttaatattttaaaatagatatgtataaaatttgatgttgatattttcttatgttatcaagcacattagtacaaatataaataaaatattacataaattgtttt

SEQ ID NO: 34046 - DNA, 1721 bp, Zea mays
  Clone ID: UC-ZMFLMO17211A12_FLI
ccactctctcgcacttaaccgcctgctctctctgtctgacgcgccggcgccgccctcgcgatcgatgatggcagctgcggcgtggttgtgtggactcctctcgctcctggccctcgccggcgctgcgtcggctgcggatggggcggagggtgagtgggagccgctgatacggatgccgacggcgaaggggagtgacgctgcttctgctccggctgctgaggatgatgaagtggggacgaggtgggccgtgctcgtcgccggatccttcggttatgggaactaccggcaccaggccgatgtgtgccatgcgtaccagatactgcagaagggaggagtgaagaaggagaacattgtggtgttcatgtatgatgatattgcccacaacattctgaaccctaggcctggagttatcattaaccatcctaaaggagcaaatgtttatgatggtgttccaaaggattacacaggtgatcaggtcactactgaaaacttctttgctgtcctcttgggcaatagaagtgctaccactggagggagtaagaaggtgatagacagcaaacctaatgaccacatcttcatctattactcagatcatgggggtcctggagttcttggtatgccgaacctgccatatctgtatgctggtgacttcatcaaggtcttgaaaaagaagcatgcttccaatagctactcaaaaatggttatatatgttgaagcatgtgaaagtggcagtatctttgaggggttaatgcctgaagatctaaatatttatgtcacaacagcctcaaatccagttgaaaatagttggggaacttactgccctgggatggaaccatcaccccctcctgagtacattacctgtttaggtgatttgtacagtgtttcttggatggaagacagtgaaacccacaatctaaagaaggaaaccatcaaggatcagtatgaagtggtgaaaacaagaacctcaaactcaaataagtacaaagagggttctcatgttatggagtatggtgataagaccttcaaggatgagaagctttccttttatcaaggttttgatcctgctaatgccaacattgcaaacatgctgctttggccaggcccaaagggtgcagtcaatcaaagagatgctgatcttctcttcatgtggaagaggtacgagcagttaaatggggggaccgaagagaagctgagggctctcatagagattaaagaaactgttcagcacaggaagcatcttgacagcagtatcgatttcgttgggaggctcgtcttcggatttgagaaagggccttcgatgcttgaggctgttagaacctctggtcaaccattagtcgatgactgggactgtttgaagaggatggtgcggattttcgagtcccagtgtggttcacttactcagtacggcatgaagtacatgagagcgtttgcaaacatctgcaacagtggtatatctgagatgaaaatgagggagtcgagcatcagcgcttgcagcagctacaactcggcgaggtggagcccgatggctcggggacacagcgcttgatggtaaggtcaaaatagcaaagcccccccgaggtctgctgccccatgtccctgtgagcgagctcgtatcatcttgggactgtggacccatcgtcggttgtacatatcatgcacttatgctcgtgcctatgtaaagtagtaataccaactcaactctgatctccatccaaataccg

SEQ ID NO: 34047 - DNA, 1166 bp, Zea mays
  Clone ID: UC-ZMFLMO17211B04_FLI
caacgccattcctatcctccgtgagcatctctctccctcggatatttcttcactgcaggccatcggatttatctgcgccgcgggtgctcgcctcagcccaaaccgcgcccatgggccatggcgtgctcttcccatgtgctcgccggcgctcctccctcgcccatgccgcaacgctccagctcgcatccactccctgctctcgtgctccagctcggttctcctccctgccgcacgagcttgcccctgctcggagttccctcggctcggttccagctccgtgtgcgcgcacctatctcccatggtcgtgtgccgtggtgctccggcgtcatttcctcagtccctgcgctcggattccccttcttccatggcgctcgcccagccgtcgagctcccttgcgcgcgcgtgctccttccctgctcgcaccgccgcgcagctccctgtgttcatccatggctgaacgcttctccttggtcggcgtccgattccctgctgctgggccaaaattcctcatccccttcacataggtcgtccttgtttagccatggtcacacggtggtgggcacaggaacatcttggtctgtccatggccgctctcttcgtcgttggtgctcggcgatcaaccccctgcgtcgcgctcggtcctgcccatctcaccgtgcgcggatcccgtctgtgtcgccgccgtcgagttccctcgccaagtccagcccctgttgccgtgccctgcgtcctcgccgcgtgccatctccctcgcgttcgctgtcgcagtgcacgtggcggtgtttattaaggaagaatgcgaagccctgtggtgttcgatggactattcgaaccgaagagcgtggacgatctcgcgaagttaaatcgaattggtcatggtaagctgacaagttattcagcatagtttgatcgatgaatgaattaatatgctaagtgcgatactcattaaggtgctcgataaattgcgtaagtcacgaaactctcgtcgacttcacagttcttgcgattatcgagccagattcagttatagcgagttatttcgctatttcggtcaattagcggaattagtgtaccgagtagaatatgagtaggcctatgtgatgacaaaatattttaatcacttctatagatgtatatatatatttacgataaagaaatgtttgaat

SEQ ID NO: 34048 - DNA, 916 bp, Zea mays
  Clone ID: UC-ZMFLMO17211B07_FLI
tgatgataatacagagacatttccgaccatcaaagctgatgttgaagccgatgaggtgggtaaatctgaagtttctgctgcagttggcaattcagacatcaatagcaatgttgatactgggcaaacatctgataagagtgaccgacatctagacacagttgagaggctcaagagacgaagtgagcgtttcaaacttcccatgcctggcgagaaggatacgcctcaaagcaaaaaggtggataccgaaatgcagcctccccaaaatgaatctactgctgctgatacggaagtgaggcctgagcggccagctcggaagcggagatggactgggagttagttgaactagtacaacgtttccacttttcagcagatttcatggcagatgcttgcgctttgccacgtttttcctcgtacagttgaaagttgaattgatgtatggttttactgtctagcatacatatgtacgtgtaaacttagttttttttttgtggctgggaactggatactgtactaaaaccccatccattttcccactatgattctggtgacctcaatgtgtggcacaggagccactgtactccgggtaagttccgaggctgttatgggaagcagtggcctcggagtttcccagttgaatatctgggttcggcatgaactacattttgatgaagctggagtgcccctgctgcaaggttcttttgtttgaagtgcaggtggcctgaagcaccgggtcttgtaacaatcttgtgttggtgggagatacttgcaagatgtgatggttgaatgtttggcacgtgatgctgatgctgttttaggaaccaccaataggtgatagaaaccaagggctagagatttcagaactgacataatcacagatttgtatgcttaatactatattagtcatgtacattctgat

SEQ ID NO: 34049 - DNA, 498 bp, Zea mays
  Clone ID: UC-ZMFLMO17211B08_FLI
gtccctcaagctaggaaggcgtcccttgctcgattcttggagaaaaggaaggaaagggtgacaactgccgcgccttacccatcagccaagagcccactggagagcagcgacacgttcggcagcgggagcgccagcgccaacgccaacgacaagtcctcgtgcacagacattgccctctccagcaaccatgaagagtccctgtgtttaggggggcagcccaggagcatcatcagcttcagcgaagagtcccccagcaccaagctacagatctgatcgtgccgtgcccagtgttcatagatttgtccaggctgaccgatgcagaaaaccataagaatacttttttccactcaagaggaagagattactatcgatgccgttgttgtttaccgtgatgctgttttgccgtgttaggttactgtactgctggtacagatggtagtgccccccacccacctaactaacaagagagctgtcacttgcagactcttgatttttttt

SEQ ID NO: 34050 - DNA, 2083 bp, Zea mays
  Clone ID: UC-ZMFLMO17211C03_FLI
ctcttcgtcgcctcacactggtgctcctctccccatcgctccgccgcgcccatggcgtccctcttcggggctcgccgccggcgatcaccggaggacgacagcgaggacgatagatctggcagagggaggaccaagcgcttccgcctctccccggaggaggacgcggcgtcgccggcggaggcggggcccggcgcggcgacggagaccggctggctctccggtttcgtctacggagcgaagagggtcatttcttccgttttactgttctcctcgcccgaggagaccggctcgggggaggacgaggaagaggagaaggacgacgacgacgacgaagagggcatccacttgaatgaacatgaagctactcatgacactcatggagcaatagttccttatagcgagccaaagcttactattgagcaaatggttatgaaggaaacattctcaagggatgaatgtgataggatggtagagctaataaaatcaagagttagagattctacttttcctgaagcccatgagtatgtaaagccagaagaaatccctagtaggaatgcaggcattacacatgacttcacaggaacatggcgctccttgagccgtgatcggaatgtccctgaatcagttccactctctagtatgagaacaagacctggtagtttttctcaaggctctccactccaagcatcacctgagctaagcactgcagcagttacggaagcaaaaaaatggttggaagagaaaaggcagggactgggcttcaagcctgaagacaatggaccatgcacactaaatactgatatacttagttctgtaaccacaaaggaggactacctttccagcttttggacaaaattggaggaatcacgaagagctcgtattggatcatctggaggttctgctgatgctcctaaattctggaattatggttctaattccaggttatttgagaatgacacctctatattttcattgggcactgatgaaaaagttggagatcctaccaaaatctataatgggtctgggaaatttgcagcaacagaaccagttggtggatgctgcttacctattacacccactgaagatagaactgatggtattactgagcctgtggaccttgcaaggaacaacgggaatgcaccccaagaaaaccaggttgcatctgaaattctccctgataaagttccagagggtaacgatgtgtcttccactggaattactaaggacactactggccatagtggagatgttaaagctcccacttcagaaccacatttaggggaaacacgtatcaactcagcatcagaatccataccaaatgatgcgggtcccccaacccagaacaaaaagaatgggccgacaatcaagaaaacattagtaaacggtctcgtggaccaaccaaatgccaactccgggctagaatcttcaggaaacgataaccctagctacaccaactcgagcagtgctgtgccagtgccacccgcaagcacccaaccagtcgagtctgctgccgctgctgtagacgttgattcggtcgagaaaggcccaggtacgacaccagagcaaccggcgaagcgaagggcacccaacgttcgacgaggacagagaagggtgctgcgaagcgcaacgagagaaggaagagcgacgtaggggatattgtgttatagcgaattaaagggggcaacacatgatccctagctaggttaactagagctatagcaatgactggccgtttccacgtacgagatgcgtagtgtgcatcaaactgtatccatgttgtattatcgtagtagtcgtaggccttacagtgaccacgcttactggttagagttggtcgttcaggaccagtagtagctgcttgatttgggtttcggtgtcaggatttggttaggtcctgtgtgtagtttgcgcagtcggaaagagactgttggttgtatttgcaggttgcaagcagacagtgttgtagccaccaggtaggaaatccagcgagagctgctcctctctgtatcatggacgctggtgtttcaagcgatgtactcatgtaacccttgttttgtgctgtgctatatgggcctttctgtgt

SEQ ID NO: 34051 - DNA, 2120 bp, Zea mays
  Clone ID: UC-ZMFLMO17211C06_FLI
cgtttaccaggcagtgagaacagatggtgttaaggttagcatagataataagggcacaccaacaaagaagaggaaagtggcacataattctaccaagaaaggaaaagtaactgaaaatgaagattccactgtaggtcccaacactcagaaggctaatactgatgtgggcattgtattggaagaggttttggaggaggcaccgaaatggaaagtgttatggtttgcaggaattgttgcaagagataacagaacaacggatgaagagcagtgccgggaatgtgcatgatgaggacaaaaatgatgaaagtggcatagttttggtatcatgtaaagatgaacgcacatgcttgcagctgcaggaatgcatattaaaaggcccctgtcaggttatgcgagaagagtgggagaagtatctgattggaaaagctgagctgcatggattgaataaggacaagagaaaatctgagcaaccaaaaggtgttggtgtcctggatggtgaagttcaaatgggatctagtgagagtgtgtgtccagttagcattagcaaactcgaaactaatgccttacttgccgctgcctctgaattaagaaatatatcaaatgaagcagatgtcaagagtggctcaaatagcagctgcagcaaggctgggggagcaaaggggaaaccaaagaaaaccatttcaaagagacaaggcagcaatcgaaaaaataaaagtaaggagggaaatgacaatagccaaggtactggtctggattctgaaggtcaatcaggaaaagcagatgtacaggctgagattgttgcttctaagatgtccgcatatgatgcttccatgtcagcctctacttctaatgttaaatttaaccattcatctgctttcggaaacttggcaaacgccaaaccactacctcctgtgcagtttcatgctctagacagtgaccatcaggttcttgatgtatggaagccatctgtcattattgtttatcatccagatattacctttgtaagagaaattgaagtatacaaggcagaaaactcatcaaggaagttaaaagtttacttccttttttatgaagattccactgaggtgcaaaaatatgagtccagcattcgacgggaaaatgaagcatttgaatctttgatcagacagaagtccctgatgatgatacctgttgatcaggtggtgtttcactctgtcactaaagttttaatttcagtctgaccttcgcaaagtggttactgcatgaatgatgccacacaatgcttagtcaaatggtctttgcacctttctacgaatctatgatggcagttgcattggaccaactgttgcaaatgaaccagagcctcctatatgtcagaactcaattacaagaaaggcaggtggtaaaaaggcgcccgagaaggagatgcaggttattgtagacatgagagagttcatgagcagccttccgaatgtattacatcaaaaaggttgagacaatggcacgttactacaagatcccggttctcctcatcgagttctcacaagataagagcttttcctttcagtctgcaaatgagattggtgatgatgtctctccgaccaacattatctcgaagctttctctgctagtgctgcattttcctcggcttcgcataatctggtcacgcagcttgcatgctacagcagaaatatttatgtcactgaaaacaaaccaggatgaacctgatgagaaaaaagcaacaagagttggcgtgccctccgaggatggtatcgtggaggatgatgtgaggtctgaaaattacaacacatcagccattgagttcttaagaaggcttcctggggtgacggattccaactaccgagcaatcatggatggatgcaatagcttggccgagctggccctgcttccagtggaaaggttggcggagctaatgggtggtcagaaagctgcgcggacgctcaaggagtttctcgatgccaagtgcccaaccatgttgtagccagagtgacgctgtactgtttgtattgtgtcctgtgggatacaaatacttcagttgatgtgccttatatatatattaaaaaaacaaatgttgtacactaccaatgccaatgccaatgcctgtgcatgttgttgtctgg

SEQ ID NO: 34052 - DNA, 1015 bp, Zea mays
  Clone ID: UC-ZMFLMO17211C11_FLI
ggggcgcgaagttaagccaccatgtggacgagggctttagcgacggtgctgctgttcgtggcaggcgccgcgctgctcggcgtcggcggcgccagcgcgcagcagggcgtgtggagcatcatcactcgtcccatgttccagagcatgctgagccaccgcggcgacagcgggtgccagggcgccttctacacctacgacgcgttcatcgaggccgccagcaagttccccggcttcggcaccaccggcgacgagcagacgcgcaggcgggagctcgccgccttcttcggccagacgtcccacgaaaccaccggtggatgggcgactgctcctggtggaccgtttgcctggggatactgccgggtgaaggaacagaacccgacggacccaccctactatggacgaggacccatacagctaactcatgagtacaactacaggctcgccgggcaagcgctgaacctgaacctggtgggcaacccggacctggtggcgagcgaccccgtggtagccttcaagacggccatctggttctggatgacgccgcagtcgcccaagccgtcgtgccacgccgtgatgaccggcgcctggacgccgtccgccaccgaccgcgccgccgggaggctccccggatatggcctcacctcgaacatcatcaacggcgggctagagtgcggcaagggccagtccaccgacggcgccaaggaccgggtcggctactacaagaggtactgcgatatgctccgggtggggtacggggacaacgtgccctgcaaggaccagaagccttacggaggatgaggacgtggacaacaataattatatggttgctgcaagccttcacgtgtttttgttgcctctctaccaactaagaataaatcaagctagcagcaaacaggggcaacctgctaccttcggcatgtgtctacttatcatatagtgtgtctatgtatggcacagtatctcatctctggatgcatgataacgaactaatcaacggttagcagcattcaccttt

SEQ ID NO: 34053 - DNA, 695 bp, Zea mays
  Clone ID: UC-ZMFLMO17211E01_FLI
agcctctcttagccagcaaccatggcgtctttctgtacaggcgatggctaaatcagctcacaagcttgccttcatcactggaaacgacaagtacgtgacgacgggcgtcgagggttctattccggtcctgattaaaagtgtcattttcaggggaactggatagacaccgctgaagagatcgacgatttgtttctaggagacgcagaggtttggaggaggccgtcgtttggaactgctggtccacttgggggtgaccacccactggttaccaaggagggccatcacgtgctcgatgttatcttcacaacaccaatccaagatcttggtcaggttgcagagaagttggacaaagttgatggcgttgtggatcacgggattatttgcagcaaccaaccatacgctgtcattgcatccaagggggaagtgcaggtcctggacgagaaatcttcggtgatacagtagcggtgaaacctttttggctgctctgcagattgttgcgcttttcggaacaggagtctactaccagctagctggaaaaaaaatgccatgagttaatcatgtacaaccagagctcttgttcaccactggacaattcagccggcatcagttgaagtctgtgtttcgcataaacttttttgaactggtactcagttaaccagattcgatgaatgtgaggcagagctacagcttcaact

SEQ ID NO: 34054 - DNA, 1743 bp, Zea mays
  Clone ID: UC-ZMFLMO17211E07_FLI
gcgggccatcgccgagatcgtctcggcgatgggggagctctcgcggcgcggggaggatgtggaccttaactcgctcaagtctgccgcgtgccggagatacggtctggcgcgggcgcccaagctagtggagatgatcgccgccgtgcccgaggccgaccgtgccacgctgcttccgcggttgcgcgctaagcccgtgcgcacggcgtcgggtatcgccgtcgtcgccgtcatgtcgaagccgcaccgttgcccacacatcgccaccaccgggaacatctgtgtctactgccccggcggtcccgattccgacttcgagtacagcacgcaatcctacacgggatacgagcccaccagcatgcgtgccattcgggcaaggtataatccatatgtgcaagccaggagcaggatagatcagctcaagaggctagggcatagcgtggataaggtcgaattcatcttgatgggtgggactttcatgtccttaccagctgaatatcgtgattatttcatcagaaatcttcatgatgctttatcgggtcacacttctgcaaatgttgaggaggctatttgttattcggaacatagtgctgtcaaatgtattggtatgacgattgagacgagacctgattattgcttggggcctcatctgcgccagatgctatcttatggttgtacccgcttggaaattggtgtccagagtacatatgaggatgttgcccgtgacacaaacagaggacacacagtggctgctgttgctgattgcttctgtttggcaaaagatgctgggtttaaggtggttgcccacatgatgccagatttacctaatgttggagttgaaagagatttggaaagtttcagagaattttttggaagtccagcgttccgggctgatggtctgaagatttatccaacacttgtgattcgtggaactggtctttatgagctctggaaaactggcagatatagaaattatccacctgagctgttggtggatattgtggcaagaattctgtctttggtaccaccttggacacgagtgtatcgggtccagagagatattcctatgcctcttgttacttctggtgtcgagaaaggtaaccttcgcgagcttgctttggctcgaatggaagatctgggcttaaaatgccgggacgtcagaacccgtgaggcagggattcaggatatccatcacaagatccggccagatgaagtagagcttgtcagacgtgactatgctgcaaatgagggttgggaaacattcctctcttatgaggatacacgacaggatatcctgatcgggctgttgcgcttgcgtaaatgtggccgtaatgttacatgccctgaacttgtagggaggtgttcaattgtgcgtgagcttcatgtctatggaactgcagtccctgtgcatggccgtgatgtggacaaactgcagcaccagggatacggaactctattaatggaagaagcagaaaggattgctcgaaaggagcaccgatcgaagaaattagctgtcatttcgggggttggtactcgccactactaccgcaagttgggttatgagctagaagggccttacatggttaaatgtttggcgtaatgctatttcattttccgtatcatatagagcagactagtgtttgtaatgtaatatgggtagtctttttttaaaaaaatgatcgttataccattgttttctaatattgagtagtccagaactccagatgaaaatggagacaactttct

SEQ ID NO: 34055 - DNA, 1346 bp, Zea mays
  Clone ID: UC-ZMFLMO17211G03_FLI
gcgcccacggtttcggaggaggagagttcttcgactgggtacccttccaagatgctcgctgatgcacgatacatatcgcagacgctgaagctgggcgccctggggatcccgtcatatagagcattttctctggtcgaacttgaagctgcaactaataacttcgagaactctcacctgctggggcaggactctcacggcgagatgtaccgaggaaggttaggcaatggcaccccagtgacgatcaggacgctgaagatgaagaggagccagaccgcccagagcttcaaccgtcacatcgagacgatctccaggctcaggcaccagaacctggtcagcgctctgggacactgctttgagtacaatctcgacgagtccaccgtgacccagctgtacatcgtgttcgagtacgtgcagaatgggaacctgaggagcaggatctcgcaagggaccgaagggtgcaggctgacgtggtcgcagaggatctcggccgccatcggcgtcgccaagggcatccagttcctgcacggggggatcatacctggcctggtcggaaacgatctgcggatcacgaacgtccttgtggaccagaaccatgtcgccaagatcggcagctacaacatcccgatcctggcggaggccatgaggtccgagcagggaggaggtgggaacaagttgcaggctgacagtcgggtgaagagcgataagacggacatcttcgacttcggggtgatcctgcttgaggttgtgtccgggaagaccatcacgtccatgtatgaagtggagatactgaaagaactgcttgcatgggcgattgccgacgaggaccgggtgaggaggaggagcttcgcagaccccgcggtgagcaaagggtgctcggacgagtcgctgaggacggtcatggagatctgtcagaggtgcctggccaaggaggcgtcgcagcggccctcggtggaggacgtgctgtggaacctgcagttcgccgcccaggtccaggacgactgggagacggatgcctggagcagcggcggaggaagcccagtgtcgtcgtcgtccagacccaccaggccgtctcggctacacttgagcagatagatgatcaggtgcttcaccaatctccagtaaagcggtcacatgatctacccatagtctaccggggacaaggatctaaagatgggaaatgctggtcagcctacagtacagcatctgcctctgatgggatgctgaaacccacagcaggatcagctcactgaaaactgtcccccctgtggtgcagactaatgtgctttgcgccactgtagagttcttttttggtttctctttatcatcacgtccctatctaagagtac

SEQ ID NO: 34056 - DNA, 1793 bp, Zea mays
  Clone ID: UC-ZMFLMO17211G05_FLI
ccgaatcgaggggagatgagtcgtccgcatgacggtcacaggtccttctttcccatggggaatcccttcaggatgattctcccaagaggagcccgcctgccaccgaagctcactgagctgctcacttcgtatgaggatggcctggcctcgagcttgaggaaggtcaagccagaggccacctcagaggtgttcacactatcatggatgaagctcgcagtggagtgcttatcagagctgcacaccaatatagccaccctgattactgagcttgagctgcccttatcagactgggatgagaagtgggtggacatttacctgaacagcagtgtgaagctgctggacatctgcattgccctgagctcggagctctctcggttggatcaagggcagctgcttgtgcgatatctcctgaatgtgttgaactctgggagcgacatgccatcccaggagcagctcaggagagctgaggtgtctcttaaggaatggatagagcgagcaagtgaaaggtctcccaggcttgatagttgcttggcagcgctacaggagctttctggaaaccttagcctgatgaaggttaggcattctgctaaggggaaagtgctcatgcgagcattgtatggaatcgaggctgttaccgtcttaatctgcagcgtacttgtagctgtactgtcgggtaccttcaagccactggtggactttgatgtccctgagaaatttggttggtctacggccttcattgatcttcagaaggccataagcggtgaacttagcaggcaactgtccagaggtagtgttgcagctgtaaaagagctggaggatgttgatgtatgtgctaaacagctgcatacattgacttgcactgttcagcttgaagaggagaatgccagcctggctcattcatttagccgttcaaaggaagtggtcctggcagatactacagcccagggaagaggccatgcggataatctcaagttggctgatgatagtagctgtcagcatgaagtgatcatgctgcaaagtattactacagaaggaggaatggatacagctgatatcaaggaggataccgagaccattggccatacaaaggaagtgatggcgcctgagaaaataattgacagaggacaccaagatgataacacaaagcaggacactggtgttgtcactgatatcagttgcttggaaaggagagaggaactgctgaactgcatctcccggatgtcgaaaagtgctgaaaggctccagttggggttggactcgctgtcgaagcgggtggatgacttcttccatattgtgcttacagggcgtgatgcactactttgtaatctcaggttttcaaacggcggcaaggttgctgcagaggtcaggtcttaatatgccatctcatgtttgtgccatgttatgcatgtatagtcagctcagcggcccatcgtgatgtgtggtgcttctgacttctggcccctgctcagctccaccaacactaagccggggccagatctcagaagcattgtgcatgatatgtgcctctagctgtgctgtgcaaaagcttatatagcttctctttttggttaagtatgaactagagttctgctgagtaaatagtgctgttaagttggtgtcgggtggaatgtacaccatctagagtagagcagctgtatgtatgctcatgtgtccttgtaagttgtaatggagatgaaaaatgagttgcaaaatgttgatccctgtttgtctgttggataacttaaactggtaatgtacaactttcaatgtacctgtacatcatgttggcatct

SEQ ID NO: 34057 - DNA, 1503 bp, Zea mays
  Clone ID: UC-ZMFLMO17211G10_FLI
ccgcatacccgcttccttctctccaatctccggtgctcgcatcccgctctgcctccatgcgccgcggcagttccatgacgccagtcctctcacctctgtccggacccaacacccgggcggctggaacccgcaggtgcgcttagtgccgctcgaggaggctcgccgtttgctggattcgttctgtcctttgccggccggcattgtgccctccgcggcggcgacaggggcgtgcgcggtgctgctgtaggggagggtgacggccatctcccaggtcggccgcggcccgggctggtggcgtgcagttgcgtgctcgactctgctttttaccgttgcttgctactctatctaccgtctgtacaggtctactgaaattccactattctgccgttgtatgctttgtgctgttggtgtgcagaggaagacggattcacaaagcatggtgctccccaagtctagcagggtgtgttgtatggcttccacgctccagctgttgttttccattgccatcacagctttggcctttttcctccacccatgcgcatcgactgatgagttccaccgtgaactctacggttggtccaatggcatcgctacatggtatggcgcagctgatggcgctggaactgacggtggtgcgtgtggataccagaatgctgtggaccagccacctttctcatccatgattgccgctggctgctcttccatctacgactctggcaagggctgtggctcttgctatcaggctgtgtgcacaggcaatgacgcttgctccggtaacccggtgactgtcgtcatcaccgacgagtgccccgattgcccgtgtcccgatgagcaggtccacttcgacatgagcgggacagccttcggtgccttggcgaagccggggcaggagagccagctgcgtggcgccggcgccatccaaatccagtatacccgggtgcagtgcgagtggcctggcgtcgacgtgaccttctcggtggagccgggctccaacccgaactacctggccgtgctgatcgagtacgaggacagcgacagcgacctcgactccgtggacatgatgcagacgcagggcgggacgtcggggcagtgggtgccgatgcagcagtcgtggggcgccgtgtggaagatcaactcgggctccgtcctccagggccccttcaacatccgcctcaccttcagctctggcagggcgctcgtcgccagcaacgccatacctgcggggtggaacgccggcgtcgcgtaccggtctggcggcgtggctgtgacgagggccaggcccaggagcggtgcctgtcggggctacgaggctgccgggacactggatggtttggtgcatcgtcacgtcgtcgtgttgttgtttctggtgttattgacgctgtgagccgagatgcgatgcaattttttgctggttctgggagcgtgcgagtttgggctacatggactgagtagctctgtgtatttttcttgcatcgcagcgtagtggatggattactgcgtcgt

SEQ ID NO: 34058 - DNA, 2601 bp, Zea mays
  Clone ID: UC-ZMFLMO17211H10_FLI
gaggtgcccctgactgtttatctggtctgacatttgtcataagtggtaccctcgacagtcttgaacgtgaggaagcaactgatctaattaagcgttatggtggccgtgtgactggctctattagtaaaaagacgagctacttattggccgacgaagacattggtggagtcaaatctaacaaagcaaaagatctgggtgttccattcttgactgaagatggtttatttgatttgatccgaaaatcaaagcctgcaaaggctcctgtagacaaacatcaaaacaacaacagttctgaaaagcttcagaaatcacagacaaagagctctccagctaaagttgaaaaacgagccgaagcaagtgctgtaggcaaaagtattgcttcaaacagtaatgctgcaagtgcctccgctgacaaacaaaagcccaagattgttgaccgtggttctatgcaatggacagaaaaatatcggccaaaagttccaaatgacatagttggcaatcaatcaatggtcaaacaacttcatgattggttaaaaagttgggatgcactattccttcattctggccaaaagggtaagggaaagaaacaagctgacagtgcagccaaaaaggctgtgttgctgagtggacctcctggtatcggtaagactacaactgctaaagttgttagtcagatgcttggtttgcaggccattgaggtaaatgcgagtgatagccgtggtaaggcagactccaagatcgagaagggtgttggggggagtacatcaaattctatcaaagagcttatcaacaacgcgactctgaattatagtgacaatcggttaaaacatcccaaagctgtactagttatggatgaagttgatggtatgtctgctggagatagaggtggtgttgctgatcttattgctagcatcaagatatccaagatccctattatctgcatttgtaatgaccgttatagtcagaaattgaagagtcttgtgaattactgccttatgctcaacttcagaaagccaacaaaacaacagatgggtaaaagattgatggaaattgccaaaaaggaaggtattcaagctcaagagaatgcaatggaagagcttgctgaaagagtgcacggagatattcgcatggcactcaaccatttgcagtatatgagcctctcccagtctgtggtcaaatatgatgatataaaggagcgacttaatagcagttcaaaggatgaagatatttctccttttactgctgttgacaaactttttggtttcaatggcgggaggttaaggatggatgagagaatggattttggcatgagcgatcctgatttagttcccttgatcatccaggaaaattatatcaattatcggcctaacaccatcggcaaggatgaaagtggagttaaaagaatgaatgctttagcccgggctgctgaatctatagcggacggtgatcttgttaatgtacagataagaagatatcgacagtggcagctgtcacaagctgcttgttttgcttcatctatagtacctgccgctttgatgcatgggaacagagaaatccttgaagcaggtgagcgaaactttaataggtttggtggatggttgggtaagtactcgactactaacaaaaacagaaggctactggaagatgtccacagtcatattcttgcctcccagcaagcaaacttggacagggatgcattgaggttggattatcttactcttatcttgagagagctgactgacccactgaaaaaaatgtcaaaggatgaagctgttcaaaaggtggtagagtttatggatacatactctttaagccaggaagacttcgatacgattgttgaagtatccaaatttaagggtcatccaagtcctatggatgggattcaacctgctgttaaaagtgccttgacaaaggcatacaaacaaggaagtagttcccgtgttgttcgagcagcagatctaataaacattccaggcatgaaaaagcctttaaagaaacgagtggcggcgatcttggagccggtagaagagagcctacctgaagaaaatggactagcatcagctgaagatgatgaagatggttcttctgatgctgacaataatgatgagcttgtgcctgctgactctacgccgaagctggacctgcaaagcgacaagaagaaaggaatccaagtgcagcttgacctgaagagcaatggggacggcccgcgcgggaagaaggcgcctgctgccaggtcaagagcaaccgggtcaggtgggaaggccgcggcgggaggaggttcggctgggaagaggaagaggtaaatgagacattcggcgcctgcccacagttggccggtggttagtttggacgcacagatcccttggtaaataaggagcaggggtggtaagcttcagagttttgctcatctaatggcacatgtaggcactaggctactgtacctgctcccatattttctcccagggcacccatgtcttgctaccagaatttgtttgcacttaggctacttccaggttgtggcaatcgagagttcggtgtggtctgtttcatttagcgaatttgtcagtactctataccacgggtcgttggctttgtcttcgt

SEQ ID NO: 34059 - DNA, 645 bp, Zea mays
  Clone ID: UC-ZMFLMO17211H11_FLI
aattaaatttgcaatttcaggccttgagattgcatattgacgactcagattccagcaatgaagtaacacagccattgccagagctggcgtcatcaccccacggaagtcagtcgatgcatgttcattatggattgatggcttgtgcgattgctctgactggggtagctgtgatggtttacatgagacactctaaagcttgaacttctggagaacaaagaaatttgcaaagcttatatgcacaactcatgcgcatagaaggatcacacacttcggctcatgagaagggtaatagtgaagtaatcatgggctgatgacgatatacactcgattacattgttggtccaagagaaatacgctgactgactgtcatattctccagttaactgaagtcagttcttctggtgggaggcaagcctatgctatggtatttcccgtccatttttgacaagtacccgtagtttcatgatgcagtgaaatatgcaaactagcccttagggtatgtacaacctttgtggtgcggtttttcatgtaaaaggcagttaagatatatgtaggtacaatgtggttaagtcacatgtgggttcattgtggtgtatctaaactttgtatcttatttaataaaatttctcaagacatgatttattt

SEQ ID NO: 34060 - DNA, 2206 bp, Zea mays
  Clone ID: UC-ZMFLMO17212A11_FLI
caagaagcaggacgggaaacagctcgaggattagggttagagttaaagtgcagacactcaagacacaaattaccttttgcccagccagcagccatcgccatctctcttttgccgaagagagaaaaatcccttggttcacctagggcgaggctggaatctggaaggcgacgcgatccgttgtcgctctcgaaataattttcaggaaccatgaatacggaacccattggtgacggcgacggagaaggcgaaggctctccggcgatgatcgcgacagatacagaggacgtcggtgtttactcataaataacatgaagactagatggactcagctaattaattctgtctatccgtcgcatctactacttttcaaagtccagcgccgcggtcaacgcagccccgacgccagctgcctgcggagctttcaagtttcatatattgttttgtttccgaatgccgagtctttgtgcagactgcagagtgccagaggtacaggccgcaggttgaggagggaggaggcaaggcgaagctgctcgccgtcggcgccacgtcccgggcggcggcgaagtttcgtggtggaatcagcggggcgcccatcggccggcgaggcctcggctgcccggccggccagtcagtcggagtcgggccgggtggtctccgtcgcagggctatcgactttagatcttgaacatgggacccaaatcactgccctggagcacaatatgaagaaaactagcttatgactgcagatctcacccatgggttcaatgagtcaaaaaatcaaaattttcacagaagatgagatcgcaagtatcactagcaattacagcactcttatcggaaaaggtggtttcggagaagtctacagaggggtccttgacgccgacgatgatctggtggcagtgaaaagatacatccgacaggacttgcgcgacgagttcatggatgaagtgaacatccacagcgtgatgaaccacaacaacgtggtgaaactcataggctactgcattggcgaaagcactctgatgctggtgacggagtacatctccaacggaaacctcgacgacatactccacagaagcgacgcctctatccctttggacgtgaggctgggcattgcgatagggtgtgcagaggcgctgagctacatgcattcgatggactcgcagagcgacaaccatatttaccatggcgacattaaacccgccaacatacttctagacaacaatctgacgacaaaggtatcagattttggactgtcaaggttccttttcagtggcactacccagttcactacgaccttgaaaggaagcatgggctacatggatcctgtatactttcacgaggggtgtctgtcgccgagaagcgatgtgtatagcttcggtatagtcctcttggagctactgactcggaagagggcaaagtatggggacgtcaacctgatccctacgttcaacaaagcctgtgccaaggggaaagggctgagggagctgtttgatgcagcaatagctgagaaggacaacgtgaagatcctcaaagagtcgtggaagctagcatcccagtgcctgtcactgaacatccacacacgtcctcagatgaatgaagtggccaaacgccttcggatgctcaagaaggaactgaagaccagtccgcagtccatactggcgacacactccatgtgggccaaacagtacaggcaggcaggctcaagctcgcccagcttcaagaagaagctgagcttcttcaagggaaacgctagcagctactctaaggtcatatctgaacttgggggcaatgtaagggtttttacaaaggaggagataaatgaagtcacacataattactccaatcttctcagtggaggtacatcagcaaccgaggtttataaaggaacacttgaggacaacacgatggtggcggtgcatagattgctctacgagggctctgaggaggcgttcatcaacggagggatggtcgtgtccaagatcgcccacaagaacatcgtcagagttctgggctgctgtctggaaccccatgttaaactatgcatagactcatattctgttagctagctcctattcttaggtgtttaccgagtctagctcctattcttaggtgtgtaccgagtcatccggctctatctcttgtaatcaggtctatatatacattgtacaccgaatggcaatatacatagaacaattcttcttct

SEQ ID NO: 34061 - DNA, 1037 bp, Zea mays
  Clone ID: UC-ZMFLMO17212B06_FLI
gtctggtagtagcatttttgtaaaactaacatacaaatctagcattaacttttgccccaaatttctaaaatctattatgaactacaaacaagttccaagtattccttttcacatgaatatgagcacactttttaagccatccaataacatttaatcaacatgtatcgtctacattatctagctgtctggtagaagcatttttgtaaaattaacataccaatctagcattaacttttttccccaaatttctgaaacatattatgaactacaaataagttccaagtattcctttgcacatgaatatgagcacccttttttaagccatccaataacatttaagcaacatgtatgcttaaattccacaatactgaccaattacacaaatgtttgctactatttcaatttttgttgtcacatcatttaaaggttacaaaatattgaactttagttgctacgacctacaatacttgaagaagagatccaggtttcccagacacctactttcgaggacaaaaccatcaatgaattggttgaaattgatccagatatattccatgaaggtagatggtggttcccatcttgcactaaatgcaacaagtcttcaattcagacctctactaaatatcgctgcatacgtgtgattggacagaaactaaatttaggcatgtcacagccttgcatattctaatgcactacatgatatagaggcataaaattacacacaaaagaaaaagaatactatctatgcaagatggactcgaaaatcctttcaacatgtggatcaatctaattattttagattttttctaaatttgcctttcaatggctgaagtcccattttgatgcaaatgaaaaagcgaacatcctgtagactgctgttgctgtgcatctcaactgttttggtcttccaatctttttggaagtattattatttttactttcacttactcttataattgcatcatgttacacgatgttgacgtcaatatggatatacacccaaacaatctaaattcaaggtcttgtcaaagcaaact

SEQ ID NO: 34062 - DNA, 897 bp, Zea mays
  Clone ID: UC-ZMFLMO17212E08_FLI
aagaatctccagcaacaccaaaggcagacgctttttttgtccctagagagaacccaaggaatctggtaattcgtccaattgagcagtggccttcgcggagagaaactgaccgacaattgactgtgaagaatgctactgatttgaacaaatatgaagatgcttccattgaaagtgagcgtggtaagtctgcctctgccatgtcaccaagcagcaggcctcctgcagtggaaaatgacaatcagcatgaggctagggccatggctcaacatgggaatgggaatgctacttcagtcgagaggttattgcctaagcttccacgtgcagattacttcacagagcctagtatagaggagcttgcggccaaagaacgtgcggaggcaggctactgcggtcgagtgagggactttgttgtggggcgacatggctacggcagcatcatttttcttggggaaacggacgtgaggtgcctggatctggagtcaatagtggagtttaacaaccgggaggtggttgtttacaaggacgacagcaagaagccccctgtgggtgaggggctgaacaaggctgcggaggtgactctactgaacatcaagtgcgtaaataagaagactggggaggagtactgtgaggggacaagggtggagaggtacagggagatgctgatgaagaaggcggaggagcagggcgcggagtttgtgtcctttgatgctgccaagggagagtggaagttcagggtgaagcatttcagcgcctatgggctcccttgttgttaagtattctgtttgttttgatggagcagtgataactaagttgcacgctttacgctcttgtcaaatagtatcatgcttgattctgttgtgctgctttgtacaatgttgctgctgttaaaatgcttgc

SEQ ID NO: 34063 - DNA, 1013 bp, Zea mays
  Clone ID: UC-ZMFLMO17212F05_FLI
ggtgggggctggggaggagagggagagccttctttaagatcagtagatcaccacaccctcacccctcctcattgccccctcacacacacacactctctctctccccattgtgtcactgtaactagcaattgagctcttaaaattttggttgaggtgcagtagcaaggcacactactacgatctacaaacaagatgatcagttgatgcccggtgtcttcaggatcttttcaggttcgcgaggtcccattttgcttctccccccgggcttgcagttgcgtttgagtgcacctctgaggctttggttggccctcgcgctgcgtacttaagctctccgccccgtccacggcgttgcatctctcatggcactcggtgtctcctgatagctgctgcctcgatctactccacctaaccgaaagagcgtcgtgtagggtcttggattcttggtccggtgctgttggcgtgtttcttgagatcgaagatccaggagatgatcctgcggcggagatcgaggtcgatgaacagcagcgccggcgcgcagaggagccacgtccccgatcagtccgcgagatcgtcgaccagtccatgcgacggtgacagtggcggggccggcgccgccggcagcaagattgcgaccgcgcgtgccctgttcgcctccccgaggctgctgcactcttcttccctgcccgccggcaccgtcgtcttcgccaagagccccgcgccggacgccgagccccagacggccttctccatgagcccgacgtccgtgctcgacgcggcggcggccttcgtgccgggcacggacggcgccggcaagcgccgcccgccgtggcgggcgcgggacaacaacggcctcgcggacgcgctggactgcagcgaccaccaccaccagcagcagcagcaggagcggatcgtcctcgcggcgacgccgtcgtcgtgctcgctggccagatcgtgctccctggaccgccgcgtcgagttcggcgtcaagaacaggagctcgtggctgcccctgc

SEQ ID NO: 34064 - DNA, 2961 bp, Zea mays
  Clone ID: UC-ZMFLMO17212G02_FLI
gttgatttacatgctttagctcgtggcttaattaggctcagtttctttatgtacttagatgcttcagctctgggttgttccaaaaacttgctaaggtatcatgattttctgccgtttaaatttcatatgccggctatatcttttttttttttctggtttcatataaacttctttgttgataagaagtgtagagtagtgacatatttgcctgagctcttattacctgagtagtgcattgcaatggtgtgagctataccaagtttctcaaataaccaatgcaagtgtgttatcctgtccatgaggttgagaggtaaggccagctttgcttagctcccttttcatttgagcaagatattgcttctgtcaatgttcactctggtatttgtttatggcttttggtatcttctgcttacacatggccacattctctgattctatatgtgttatgaggtttcatttgttcactatatgatttacttgtaggtatacttactgatgtggttgcataggtgtcatttgtctctctctgcaggaatgtctcgttatcctgcaccgtatcctatgattcgtcctggttttgttccacgtccaatgccgccgcctggtgttgtgccaattcaacgaccaacaataatttctgggatccgggctattcctcctttggtagccccaactgcccggccacctgctccagctgttaagctggcagataaaccgccaaccgcagtttatgttgggaagatcgccccaacagtggacagtgatttccttctttcacttcttcggctttgtggatctgtcaagagttggaagcgtgcccaagatcctagtaatggaaaacctaaaggttttgggttttgtgaatttgaatctgctgaaggcatccttcgtgcgacacggcttctcaacaaattgagcattgatggtcaggaactggtgattaatataaatgatgccaccaaggaatacctgaagaaacatgttgagggaaagaagagagcacaagagaaggaaaaagaaacagaagatgcaagcggggatggaactacagctgttgctgaaaatgaatcatcaaaacctgtccctgatgaattggatgagacaggagatgctggagataagtacagggaagacaacactgataaatttgggattgttactgacgaagactctcaaactgacaaagatgtcgcagaaaaaataagcaatatgattgaggagtggttaaagactagaccgccacccccaccttcaccagttcaaccatctgctgatagctctggcgtagataaggcaaaaaatgattctgatgataagaatgctgctgatgctgataaaagggcagctaatgaaactgagagatctgaaactgcctctcctgataagaggaaggatagagagcatgataaggacaaacgggacaaagatcttgaaaggcatgaccgtgaacgtgaaagagtacggagggatagagagaaggatcataagcatagagaagctgataggctctacagggatcgccttaaggagtgggaatctagggaaagagagagagaatatcagaggtatagtgaaaaggagaaagaaagagatagagatcataaccgcagaagggagatcctgaagcaggaagatgagagcgatgacgaggataataggaaaaggaaacgaaggagtattagctcacttgaagataggaagaggaggaggcaacgtgaaaaggaggaagatttggcagataaaataagggaggaggaggaaattgcagaagcaaggaggctggctgtagagttgcaacggcaagcagatgaagcagctgcggcggcggctgcagccgccgaagagtctgcatcacttatggagattgatggtgatgacgaaaaggaaacagatgcacaaaacaagtcggctgttgtggaagctgataacatctcgagctttgctaatggtgttggtgctggtcgacttagtaagggaaataatggtgaggaaacatgtatgacacctggtcaaaccgcagatactaagcaaaacaacaatgttccagcaaagaaactgggttttggtttgattggcttgggcaaaaggacatctgttccatcagtttttgctgtagaggatgacgaaaataatgttgataaaagcataagacctctagtacctatcgattactccactgaagaattacaagctgtacatgctaattcttctactggggcaaatgtcacagcagctgccgagtttgccaagcgcatctcagtttctaattcaaaggaagagaaggctgaagctgagaaggataggaataggagatccagtgaagctcgtcctaatgatgagcgaagagagaagctacatgatcgcgagaaggataagcccaagtcagagaacaagaagattctggatgcaaagcaactaattgatatgatcccaaggacaaaggaagagctttttgcctatgatataaactgggcgatatatgacaagcatgagttgcaagagagaatgaggccttggatttcaaaaaagataattgaatttcttggcgaggaggaatcaactttggtggactatattgtttcctgcaccaaagaccatgttcaggctgaaaagatgctagatcttctacagtcgattttcgatgttgaggccgagatgtttgtcctcaagatgtggaggatgcttatatttgagatcaagaaagtcgaatctggactatcaggaagagcaaagtcatgaagcgaagcctgttaccctgtatgacctctgatctgcattactcatcaactgtgaccacacttgtaaggtcatactgcactacaagtatcaaaaaccatttttagtgacagagttgatggatctttttacttgtttcttgtacaaatgcatacgagagttaatgagatactgtgcgtaatatttttattttgatagattgcataactgtgtttggcacagttc

SEQ ID NO: 34065 - DNA, 1189 bp, Zea mays
  Clone ID: UC-ZMFLMO17212G04_FLI
agctaatccaacaaaccttgaagttcttcttgctcttggtgttagtcacacaaatgaattggagcagggggaagcattaaggtatctttataggtggcttcagaatcaaccaaaatatggtggccttgtccctctgcagtcaactgattcaccttatggtcctgatgtaagtatacgactgcatgctataagtgtgtatgtttcagtttagtcaattaacttatggagcaattgtgatcatacccttcgccagcgttgcaattgcgattttacccactctggcatcttcagatttcggatgggtatcctatgtacaagattatatgttttttttgctgtagagatgtacttttgctgatttctaatatctttcaatatattaatttctcttaataatttacttctgccatactaaatgttggcatcatcaggttgttagattgtttaatgaagctgctcagatgtcacctgaagatgcagatgttcatatagttctgggagtcttatataacctatcaagagagtatgataaagctatagcttcatttaagacagcactacaactcaaaccacaggactattcactctggaacaagcttggtgcaacccaagcaaacagcatccagagtgctgatgcaatattggcgtatcagcaggctctggacttgaaacccaactacgtgcgtgcatgggcgaatatgggaatcagctatgccaaccagggtttgtatgaggattccattcgatactatgtaagggcagttgcaatgaacccaaaagctgacaatgcctggcagtacctgaggatctctcttagcaatgcttcgcgagcggacatgattgctgcatgcgacgcccgcaaccttgacgctcttcagaaagagtttcctctgtgagccctccggtccaaggcattagagcttccatggaaggaagcagcacactagcaagccgagtgactgcacctgtggtcatggaaatggaattggaaaccagtagcgttttgtatttgcctgttgattcttatatttatttttaggaagtgggggaatgtgtagcaactaggaagcgagggaacaacatccagttgatgtgaagcattcatggcacagtaggcaatagtggcaaaggggtactatacatacacacttacgggacgcacaacataaataaagaatggttgattaat

SEQ ID NO: 34066 - DNA, 1423 bp, Zea mays
  Clone ID: UC-ZMFLMO17212G06_FLI
gttggaaagaaagagacttgcaatgggatctgtttagatgtctcagctaatggtgatgacagcaacttgcctagtgaaaggacttataaactgaacttatctgaacatgctgcagcagataatgcagctgagaccgattacagcaagatgaaagaagtcatcagctatgtttacacagcacagcagcgagtggaagacatccaactttgcattggtaggcctattgctgattttgaaaattttgtttactctgcttctccagttgtgcactgcagctcgtgctctgttggctgtaaatcttgcctgcaagaatgtgtgaaggatggcttatgtttgcatcagactccagatatcactctaagaactgtctggcagtggtacgaagagcctagttgctatggtttggatgtaaaggcacaagatctctggaggtcaaaagccttgtggaatagtcattgtcagtttacaacatattttgtaccatatctatctgctgttcaactcttcagtcaacctaaaagaaccagtggtggaagcattgataaggaatcaatccatagggatgtgacatgtgaaacatctccacagctgaacctgcccccaatatttgcaaagctttttccaaaacaatctgttccagtaaataaaccatctactctgcgtactgaagatgatcaacagtcagcagatggggagctggtatttgaattttttgaatatgaacagccatactcacggcgacaattatttgacaaggtaaatgagctgattgccggtgcgaaaccgtcaaattgccaaatatctggggacccaaagaatctggaggccagcctgcatgatctccatccagcgtcttggtattgtgttgcatggtatcccatataccggatacctgatggaaaattccaggctacattcttgacatatcactctcttggccactggattcgtcggagcagctcagcaggtggggccgctgttttgccagtcatgggcctgcagtcttacaatgccaaggcagagtggtggtttgagatgagcaagtccgaatctgaaggcgggcagtcgcaggccagtgaagcatccgagattctgaaggagagatcgcgcacgctgagtgaggctgcggccgtgttgtccagggccagcgtgctgaagaatgggcagatgagtagaaacagacatccagactacgagttcttcctctcccggagctgatttggaagtgcctcttcgtactcggatttagttaggtttcagtgtatgtatgtgttgttgacactaaagcttattctgcaaccgatgactggaagctgtttgcttagcttagcttagcaatataataataatgctagtcagttctcatccaagtgtcatgtcactgttattgaagtagatcagagatgaaacaggaaggaccacg

SEQ ID NO: 34067 - DNA, 1721 bp, Zea mays
  Clone ID: UC-ZMFLMO17212G08_FLI
tctctgatgacgctgatgttgttgctctgattgggacaagtaaggacttggcaaaacagataaatcagaaggaagtacattgggggttgcttgaagattctgttgaagagcgaatggagaaggcactagcagaatctgataaaatagaagctgaaagcaaggatgctgatgcagaagataacaagaaaagaaatgcagaaggtggaaagcaaggtgcttctcttaagaaagccaaaaaggacaagcttgttggtgcgactggaaaaagcgtcagaactgaaacaagcatggtttctgtggcacctcgagtgaaaccggagctaactcttccagcaacgcctgttgaagttgaacaatcaattcttgaggacctacgaaaccgtgcacaactgaatagtgtggcattgccatctgttagcttctacacattccttaatacacataatggattaaactgttcctcaatatcacatgatggatcactggttgttggtgggttttctgattcgtcagtgaaggtctgggatatgtcaaagatgggccaaccagcaaaaatatcaagatcacagggtgagaatgggccttcccagggtgagcgcatatcaacattagatgaggggaaacgaacctatacactatttcaaggccattctggaccagtttattctgcggcctttagcccgtttggggatttcctcttgtcatcatcttcagactcgacaattagactatggagcaccaagctgaatgctaatcttgtctgttacaaaggacacaactacccggtttgggatgtccaattcagtccagttggccattactttgctagtgcttcgcacgacaggactgctagaatttggtcaatggataaaatccagcctttgcgaataatggctgggcatctttctgatgttgattgtgtccagtggcatgtaaactgtaactacattgccactggctctagcgacaaaactgtaaggctatgggatgttcagacgggtgaatgcatacggatgtttattggtcataggagtatggttttatcactggcaatgtcacctgatggacgatacatggcctccggagatgaagatggaacaatcatgatatgggatctctcgactggccgttgtgtttcaccactactaggacacagctcttgtgtgtggacacttgctttcagctgtgaaggagcattgcttgcatcgggatcggctgactgtactgtaaagctctgggatgtcgcttctagcacaaaaaccctgaagacagaggataccaaaggcagctcagctaaccgactgagactgcttaaagctctccctacaaaatcaactcctgtttatagcctgcggttttctcggaggaaccttctatttgcctctggtgctctctcgctaagctcgtcgtaagctgtgtttttttttgcagaaaactagaactggtcctgttttgacattgagtagtgaagctggcatttcagagactgcctattgtacagctaatattttcattagcaattccaacgaactcagcatgtactgccgaattgagcaccgcagattcgttgtagcgggttgtgatattgtaacaatattattaggtaattacgttctgtaaaattgttttttaggttgtgaccttatgaacgcaactaaatgtacaagtgctgacaggcgatagcgtgaatgcaatggtctatcaggtctggagtttggttt

SEQ ID NO: 34068 - DNA, 2235 bp, Zea mays
  Clone ID: UC-ZMFLMO17212G11_FLI
caaatccacattcccatcggcgcagacggccgggaggaggatgtccatgccggagacgttcaccctgaaggtgggggaggcgacgccggccgccgccggcaggccgtcggccgggcccgtgtaccggagcatctacgccaaggacggcctcatggacctcccacaggacatccagtccccttgggacttgttcagtggggcagtcaagaagtaccccacgaacaggatggtcgggcagcgtcaggttacagatggcaaggccggtgagtatgtgtggcaaacgtacgaggaagtgtgccagaaggtcatgaggattggatcagcgatcagaagcctgggcgtagagccgggagctcactgtggcatatatggatccaactgcccggaatgggttatggccatgcaggcatgtaacagtcaagggatatgttatgtgccactgtatgacaccctcggagctaaagctgttgaattcatcatgtaccatgctgagatatccattgcctttgtccaggagagcaagatcaaatcaatactagcagttctccctaagtgcacagcgcaccttagagccattgttagtttcggagattttgcaagcgagatgaaagcggaagctgagagattgggcgtctcctgcttttcttgggaagagttttcttcaatgggaaaacaagactaccaacttcccaataaacgtaaggaagatatctgtacaatcatgtataccagcggaacaactggagatcccaaaggtgtgataatcacaaacaaagctatcgttgctggtgttatgaccacagaacacctcctcaaagagaccgataaagtgatcacagaagaggattcctacttttcctaccttccattagcacatatatttgatcaagtaattgagaactactgtatttctaaaggagcctccatcggattctggcaaggggacattaggtacctgatggaggatgtgcaagtgatgaaaccgacaatattctgtggtgttcctcgtgtttatgatcgtatatatacaggtataaacatgaaaattcagtctggagggatgatagccagacacctttttcagtatgcctacaactacaaacttgccaatatgaggaaagggctgaaacagcatgaagcatcaccgtttttcgacaagatagttttcagcaaaataaaggaagggcttggagggcgtatacgtctcatgatagctggagcagcacctttgccagggcaaatcgaagaattcatgcgggtaaccacctgcagcgttgtagtacaaggatatgggctcactgagagttgtgcaggatgcttcacgtcaatcgccaacattttctcaatgattggaacagtcggccctcctgtcacaacaatagaagcacggctggagtcggtccctgaaatgggctacgacgcactgtcagacacgccccggggcgagatctgcttgaggggccacaccatgttctccgggtactacaagcgccctagcctcactgaagaagtgttctcagatggctggttccatacaggtgatatcggggagtggcaatccaatggcacgatgaagatcatcgacagaaagaagaacatcttcaagctgtcccagggggagtatgtggcagttaggtcctggaaagagcatacctgcagtcaccccttgtggcatcggtctgggtctacgggaacagcttcgagtcgttcctcgttgctgtggctgtccctgaaaggcaggctctcgaggaatgggcagcagccaacagcaaggccggcgactttgcagagctgtgcgctgatcccaaggcgaggagctacgttcgggatcagctgaaccaaactgggaagaaacttgggttgagaggcttcgagatgctgaaagcagtctacctggagccggtgcctttcagcatcgagaaggacctcgtcactccaacctttaagctcaagagaccccagctgctcaagtattacaaggatccggtcgaccaaatgtacaaggatgccaaggaggggagagctgcgccatgagcccatgacggcattgccaatttgccacgagtggctatgatcctgagcattgtgattcctcgaaagcgtgtacatattgattatcacaatttgtaagtttaaggcatgtgtgttctatgccaaaatgtcagcagaaaatgaattggctaagaagctcgtgaatcgtgatagcttacattaataaatttattaagctagtcc

SEQ ID NO: 34069 - DNA, 1554 bp, Zea mays
  Clone ID: UC-ZMFLMO17213A08_FLI
gcgtcgatgtcgaaaactccttccagaccaagcttcgtctgctgtcagcttgcaccagtcctcacggcccacgtcgagggagacgaagggataggaggtggaggcggaggttgcaaaaaatggctgggagcatgcaggcggtggacccagcgggccggataagcgcgttgctcgcattgcgccagctcctcgccatgctctagccgctgggcctgctccgccctttcattggcgcgcgtggccagggcgtccgatgttgcggcctccgcgttggggctagcgggaaaaggggaaggcggcagcgtcagtggttctacgggtgccggtcgtctcgcccatggtcgccacacgaaggaagatagccacgcgtcggacgcaggaggccaggcgggtgtacgagctgatccacaggtagtgaacatgttccatctcttgctattctgttcctctctgctagttgttaggtctattgtttatgacattgtcgtcactcatcaggtttctatgtgatgtgttctacttctaccctgtacattttctacctttttatgttctactaggctgttcaggtgaccagtactattaactaaataaactctatggttagtagcttcctgacagccttgcttgaattccaagtgatgttgttttgtttactttagttgcttacttacaaaataagatatacaggccccctactccttttgctacgtaggatgcagacctggacatgccatgcgcccatgccttcttggtggttggtttgttcttcagatgtagaaagctacccgaaatccgttgaactttggcagtctttttcatggtttcctgctcctatttctatggcggcctcgtcttgtttgtcagtcaagcaacaaccatgtggcacagattaataattcaattcaaggaaatataagtaccgttgtatgccattctccagtcaattctatagcacggagggtgcttggtttgtttatccgaaatttgtcaggctcagctcaggctccgctcgaagcactgacctacatgatgattggtgccacacgccatgccacaacctttgtgtttgtccttcctgcttccttatttgttacatttggatctttgttattgttgtttacagatgatccaacattttaaaacgttgcacggattgttggatttttgtttcaggtctccacagattgttggattggtcttggcctcttcggtattcttgcaacatgcatgtgggtagtatcatggaactgaacctgctgaggcatctccgggcccccacccgaagggggacgatgaaattagaaaaatggccgaagccattatggacaaggttgtcgaccaactattgaatgaagctgcagaaatagtgcttaaggtggattgaatgttactgtagaacatttggaatgtaacatatgtaatatattgtaactttgagtgtaatatataatctatagtttaattctttacgatgcatgaaattttgcatacataccattttttgagccttcggcgaaaaaacaccttcccttcttttcatgctttgtgaag

SEQ ID NO: 34070 - DNA, 1180 bp, Zea mays
  Clone ID: UC-ZMFLMO17213F01_FLI
gagcacgcggccgagatggaggcgacggtggtcgtcgcggctgccgtggaggccgaggaggaggaggctgctgctgctgcggcttcgacgccgcagcggtctgggaggaaacggccccgcgcgattgggagtgggcggtaccgctcggtgtccaggtgtttctcccaatctcccctgctttcctcatcctgctgccgcttttgcttttaatcgctgtgacagcatagcacccgcctcgtctcgctgccggctgccgctggtgatcctgctccctgtggcattggccctagccagcaggcaggcagtcggccagggacggatggacggagacgacggatggaagccgcagccactagccagccacaccgcagaccgcgcacgcaagagaaagaagcggtgtttgcatggactgggattgccgacttgactgcggattgacggggacaggtgggagccagaaccgcccgaggaccctcttctcctcggccaagagacccacaccgcaactggaaccctcttctcctcatccgacgacagtggtggccactgctccggccaggcatagcataggcagcctggttacacaaaccaaaaaaggtatcccatacccacgctactgcctacacctacgaaacctgcttatcctgctgcaatttctgctaaattcgtggctaaattcaaagaatggtagtgtgaagtggaatcaaaatgggaactgggtgcagactgcctcaaaggatcagattattaaggtccgtggcttgtgctttttatttttctatcttcttcaaagaattttcggattacagtgtgcactctataaccagaattctatactatctatggagatggcctaatccatcctataaccaggatcgataagtttgttttttgatgccagtaaattattgattttggtccatttgctaattcattttgcaactgtatgacattagatccatgaaagagcagcaatccttctgaggggacgtcgctggttagatagttattacagtatcaagatttttatatgttcctttacatattttaaggttcacaaattgatactggttttatatgtagcagttcattgttcactgtaaccatacatgtaaaccataagcaaatgtgatgtaggagattgttatataaagagacttttgcagccactttgatgttt

SEQ ID NO: 34071 - DNA, 1219 bp, Zea mays
  Clone ID: UC-ZMFLMO17214B11_FLI
ggcagtactgcacttgcaggtggcggcggtggcggtgctgctgatggcgacggggctgcgcgcgcagctgcgggtgggcttctacgacagctcgtgcccagcggcggagatcatcgtgcagcaggaggtgagcagggcggtggcggccaacccgggcctcgccgccggcctgctccgcctccacttccacgactgtttcgttggggtcagtccctcggtcgcaagctcgcagctgctgctcacacttcaaagggctggcaagaacgactgactgaccgcttgtttctgcactacctgcagggctgcgacgcgtccgtgctcatcgactccaccaagggcaacaccgcggagaaggacgccgggcccaacctcagcctgcggggcttcgaggtcgtcgatcgcatcaaggcgcgcgtcgagcaggcctgcttcggcgtcgtctccttcgcggacatactcgcgttcgcggccagggacagcgtcgcactcgccggcgggaacgcgtaccaggtgccggcggggcggcgggacgggtccgtgtcgcgcgcgtcggacaccaacggcaacctgccgccgccgacggccaacgtcgcgcagctcacgcagatcttcggcaccaagggcctgacgcagaaggagatggtcatcctgtcgggcgcgcacaccatcggctcctcgcactgcagctccttcagcggccggctgtcggggtcggccacgacagcgggcgggcaggacccgaccatggacccggcgtacgtggcgcagctggcgcggcagtgcccgcagggcggcgacccgctcgtgcccatggactacgtctcccccaacgccttcgacgagggcttctacaagggcgtcatgtccaaccgcggcctgctgtcctcggaccaggcgctgctcagcgacaagaacaccgccgtgcaggtcgtcacctacgccaacgacccggccaccttccaggccgacttcgccgccgccatggtcaagatgggctccgtcggcgtgctcaccggcaccagcggcaaggtcagggccaactgcagagtcgcctgatccatcatcatcatcactcgtgtggagttgtagattcgttatattgatttggaccggacgacgtcgacgggatggcgtagcatagcatggcctgcttgcgcaattgtatgtatgccctgtacttgcgcgtgtatgggtttcgctgtgcaaattttcgttggct

SEQ ID NO: 34072 - DNA, 864 bp, Zea mays
  Clone ID: UC-ZMFLMO17214D09_FLI
gtgcctgaacttgtgtggatgcgtgaaggctgttactgacagagctttgcaggctattgctcagaactgtgggcagctgcagtctttgaacctaggctggtgtgatgatgttacagataagggagtgaccagcttagcgtcaggatgccctgatctcagagccgtagacttgtgcggttgtgttcttataacagatgagagtgtggttgctcttgccaacggatgtccgcacctgcgctcgctgggcctctacttctgccagaacatcacggaccgcgccatgtactccctcgcaaacagccgcgtgaagagcaagcgtgggaggtgggatgcagtgaaagacgggctcgcgaacctcaacatcagccagtgcaccgccctgacgcccccggcggtgcaggccgtctgcgactccttcccggcgctgcacacctgccccgagaggcactccctcatcatcagtggctgcctcagcctcacgtcagtccactgcgcctgcgccctccacccacaccgtgccgggagagccctgatggccaaccatgcgtactaataaacatgttggtggctttgcgctgatagttctcgcgaatggggacgcatgcctggggggtgatggcgtcgtccaggtgtagaggaagctccctgtgtacataaactcgaaacttggcggtgtgataaggcactgctgtggtaggactttgtgtgataatcatggagtggcgaatttctagagaatggcatgtactccagtgctacctggacattgaccagaaaaaatgtggtatctagttgccttctgtgtaagggcggacgtgttgggatgttcatgcattttcattaatctgataccttaatctgact

SEQ ID NO: 34073 - DNA, 497 bp, Zea mays
  Clone ID: UC-ZMFLMO17214E04_FLI
gccactccagctagcttcggcgcttatgccacggccaagatcagtgtcgatgcgtcccttgcaggtggcatcattgggaagggtggagctaacataaagcaaatatcttccgtcacaggggccaaggtggtcattcaggaggaccgccatgaatcagacaccagcttgaaaaacattgagtttgagggcacctttgatcagatcaggaacgctagtgctatggtcatcgagctgattgttagcatcagtggcataggaagcaacttcaagaccaagatgtgtgagaacttcgcaaaagggtcatgctcttatggcggcaaatgccactttgcccatggtgagagtgagctgcgcaagcctgccgctgcttgagatccatgccctgtttcttacctcatagtcattagtcaatgtaactcaaaacttggcctctgatgatggatttgttggcttctttaggtctacgctaatgaattgctggcttcaggcctactact

SEQ ID NO: 34074 - DNA, 1382 bp, Zea mays
  Clone ID: UC-ZMFLMO17214E11_FLI
ctggctcatgcaactacaccttcttctccagatgttccatatgctagatttctttcttcttctatgggtatcaaaactgccagcaaggatcacaacatgcctttcttatcaacaacctattctggtggttcaggactccagacatcttatccactttaccctgaaagcccctgtagcagcctcatctcaccggcttcagtaaccccgaggactggtctatcttcacctatacctgagcaagaggttcctcctgcccattggaagacctctaggtctgcctgcgacacgccatatttcagggcttcgcccattcccgagcaagaaaccactgcacaatggaagacctctagatctgcttgtgacacaccgtatgccaggacctcaccaaccaatatatttgggctggattcatctacaccgagaaactatatgctagacaacaatttctttcggccagcggcatctgctcaattctacctggaccaggctcagcagacattttcacataatggcggaagggtcagtgtatccagggagaagcaaggtgccgatgaaattgaagcttacagggcttcatttggatttagtgcggatgaaattgtccaatctcagtcttatgtgggaataccggatgcagttgatgagtcattcagtatatcaccatttggaaacaatgctccagctactgagatctgcccattcagtgatctgcctaatgaggttcagaaggtggataaatcatgtgcctacgcgaaagatgacacaagcccaaagaaatcagcaaaccagctctccactgattctccaaacaaagttctgcgtttggacgtcttcaaaggaacaaaaggaggtcatcagtctgaggacgagtgtatcaggaaagatggtcatcttttcagaaagacagcagatgaaatatccctaaaacccatagaagtaagaaagaaatcgcttcctggccattcttgctcggatgcagagatcgagtacaggaggacacggagtttaagggatgccaacggcgttctatcacggcgcagtgcattggcaagacagctgcactaatatggtactagtatgcagggtgatttcatagttcatgtagcctagtgtgcattggatccgagctgtcattagagtaatctgtagggcaaagagtagcctctaccgtatatgaggatcatattgccagattgtgctctagatatgtgattatgagcctgtactctgtttgaactccaagatcctctttgtaggcacactccaatcgtatgcaggagctgtgagatggaatagcgttggtacattacaggagttgtgtttcggtcttcctcttcctgatgatgtaacttgtgtttgaatcttgcagaatgctggtttgg

SEQ ID NO: 34075 - DNA, 1125 bp, Zea mays
  Clone ID: UC-ZMFLMO17214G08_FLI
gtctctatcttatggtctctccctcaattctctggtgtacttcgcaatatccattagctgcatgttagaaaatgatatggtggctgtggagagggtaaatcagttcagtattcttccttccgaggcagcatggaaaatagaagagcatcttccttcttcaaattggcccaatcatggggacattgacattaaggatataaaggttaggtatcgatcaaatacacctttaattctgaaaggcattaatataagtatcagtggtggagaaaagataggagttgtaggaaggacaggcagtggcaagtcaactttaatccaagctttgttcaggctcgtagaacctgcagagggaaaaatgatcattgatggaatagacatatgcacactcggtctgcatgatctcagatctcgctttggcataattccacaggaaccagttctctttgaaggaacaattcgaagcaacattgatccaattgggcagttttcagatgcagaaatatggcaggctcttgagcgctgtcagctgaaagatgtagtagtttccaaacctgaaaaacttgatgctccagtggctgatagaggagagaactggagtgtaggccaaaggcagttgctctgtcttggccgtgtcatactgaagcagacccagatcttatttatggatgaggcaactgcttcagttgattcccaaactgatgccacgattcagaagatcacgagacaggagttttcatcatgtacaataattagcatcgcccacagaataccaacagtcatggactgtgatagagtcttggtgttggatgctggtctggtaaaagaatttgattcaccttcgaggttaatcgaacaaccgtccctcttcggtgcgatggttcaggagtatgccaatcgctcgtcgaatctgtaaccgtaccatgatactgagtatgtaaaaaataagtagaagttggttgcttgactttagtgtacatatggaggtagcttaactcctgatggtattgtagctttgcagtattttgataagaaactcacacaagagaggggaaatacatctaaagtttagagatcaccttttgaccttagcaaacaatgaatatttcttggaatgaacttgtaacc

SEQ ID NO: 34076 - DNA, 738 bp, Zea mays
  Clone ID: UC-ZMFLMO17214H03_FLI
attgaggccctgggaggcaaggtcatccaatggaacggctatagggtctccggtatacttgctatgtcaagatcgattggggaccgatatttgaaaccattcgtcattccaaaaccagaagtcaccgttgttcctagggcgaaagatgacgactgcctcattcttgcaagtgatgggctgtgggatgtagtgtcgaatgaagaggcatgcaaagctgcgcgtcggcagatccagctgtggcacaagaacaacggtgtcacatcatcattgtgtgacgagggtgatgaatccaatgatcctgctgcacaagctgctgctgattatcttatgaggctcgcactgaagaagggtaccgaggacaatatcactgtcattgtggttgacttgaaacctcgaaagaaggccaagagcaactcataacactgggatggatccatcacggtagagctgaccatgatatgtccaaaggcttctgctgctagttgttggtcgtccgcaagagacttgaccccacaggtttttttcgttgggcctcaagaactgtaggtgcattttccatggagggttatgatgcttaaccccactctggtttctggtggctaaaacattctctccagtcggcttctaccatgagccctggcacttagtatattcctaatgttgtatgatggttgaacttgtaaagagacaagcggctgagacggtcactaaaattaacatattgttacttcatgattc

SEQ ID NO: 34077 - DNA, 600 bp, Zea mays
  Clone ID: UC-ZMFLMO17214H09_FLI
tgcaatatttgccagtggcagtccatttgaccctgtggagtacgatgggaaggtttttgtacctggacagtcgaacaacgcctacattttccctggattcggcctcggtcttgttatctctggagccatccgtgtccacgaggacatgcttcttgccgcctcggaagcactagctgctcaggccacacaggagaacttcgacaagggatcaatcttcccgcccttcaccaacattagaaagatctctgcgcgcattgccgcagccgtggctgcaaaagcttatgaactcggtttggcgacccgtctgcctcccccaagggacctggtgaaatatgcacagagctgcatgtacactcctgtctaccgtaactaccgatagtgctgctgggatcaattctgcagtaataaaatatgtcgacgcagatgatcctgcaatgttgtagtttattgtttcatttgttggccctgctgctgaccacctttgtggctggtagacactgtacttgtctgcatatatgatactggaacatttggcgcgctgtgggcgtccctgtcatgagatcaattgcagaaataaaatgcaatttagatttgagcacc

SEQ ID NO: 34078 - DNA, 1566 bp, Zea mays
  Clone ID: UC-ZMFLMO17215B03_FLI
gtgtcgtgctgttcgaccagaccgacgcgaatccaaaagcggacgcggcgtcacggccggcgaggtgcccggactggctcagaccggagatgttgcagtgcccgatcgcgctggacctcatgacggaccccgtgactgtgtctactgggcagacgtacgaccgcgagtccatcacccggtggatcaaggccggatgccacacgtgcccggtcaccggcgagcggctccgcaccgccgacgtcgtgccgaacgccgcgctgcgcgggatcatcgagcggatgctgctcagcaacggcgtctcgcttccggacccaagcagctcagggcaccgtcacggcgcgctcggcaacacagccgtgccattcgggccggccgccgcgggcgcggcccgcctcgccgtcgcctacgtcgtggcccagctctcgatgggctcgacggcggagcgcaggaaggcgacttgcgaggcccgcaagctgtgcaagcacaacatgttctaccgcgcgtgcctcgtggaggccaacgccgtgccgtggctgctgtgcctcctgtcctcgacggacgcgtccgtgcaggacaatgcggtggcgtcactcctgaacctgtcgaagcacccgcggggccgggcggcgctcttcgaggccggcggcgtggggctcgtggtggacgtgattaacgtgggcgccagggcggaggcgcggcagaacgcggcggccgtcctgttctacctgtcgtctaacgcggagcacgccgaggagattgggcgcatcccggaggccatcccgactctggtgcagctgatccgcgatggagcgcaccgcgggcgcaagaacgccatggtcagcctctacggtctgctccagtgcgcgagcaaccacggcaaggccgtcggggctggcgccgtgtcggctctcgcgggcctcctgtccggcgaccgggacgacctcgccagcgacgccgtgacgctgctggcgaggctcgcggagcagccggcgggcgcgcaggccgtgctggcgcggccgggcctggtcgcccgcgtcgtcgaggcgctcgccacttcggcgtcccggtcggggaaggaccactgcgtggccctgctggtctcgctgtgccggcacggtggggacaaggtggtggccctgctggggaggatgccggggctgatgtcgtcgctgtacacgctggtggccgacggcagcccgcagacgtgcaagcgggccagggcgctgctcaacctgatccaccgccattacgagatggacggccagcagccggcgtcggaggtgcccggcgagcgtgtcgttcgcgtgctatagccgcagattccggacctgccgtaagtacagtaaataggtgtagatctttacggtgtgccatttgagaccatttcttgttttctgttctcagctcgtgttttagaagagctgagaacgatttttgctgcttccgttttgaagactgctgtagtcacagacacacacacagacgcgagagtatagataaatatgtttgcgagcttgagacttatagcagataatgaaagtgtgacagcatgggattactgtttgc

SEQ ID NO: 34079 - DNA, 747 bp, Zea mays
  Clone ID: UC-ZMFLMO17215B07_FLI
ggggaagcttcatcggccggagcaccccgcaggagcacggcagcaagaagcacaacctgccccagcagcagcagcaggcgccccccgcgcctgcgacgctggtgacggtcgacggcgacggcgagctcgagatggagacgctgctcaaggcgtcggcctacatcctcggcgccacgggttccagcatcgtgtacaaggccgtgctcggcgacggcaccgcgctggccgtccggcgcatcggcgagagcggcggcgccgaaaagctcaaggacttcgaggcgcaggtgcgcgccgtcgcccggttccgccatcccaacatcctccggctgcgcggcttctactggggcgccgacgagaagctcctcatccacgactacgcccccaacggcagccttgccaacatcgcattcagcaggcgcttcgggtcgtcgtcgccgctgcacctgagcctggaggcgcggctgcgcatcgcgcgcggcgtggcgcgcgggctggcgtacatccacgagaagaagggcgtgcacgggaacctgaagccgagcaacatccttctgggcggcgacatggagccatggatcggggacctgggcctggaccggctggcgtcgggcgaggcggcgccgcactaccgcgcgggcgcgtcggcgcggctgttcgggagcaagcggtcgatgcactcgacgagcagcctgccggacctgtcacagatgcccgggccgggcgcgagcccgtgcgggtcggcgtccg

SEQ ID NO: 34080 - DNA, 1384 bp, Zea mays
  Clone ID: UC-ZMFLMO17215B09_FLI
aaaaaaacaattaataatttattactggcagaagggggaagaagagatggtggacgaggcatgggagcgggcggtggaggcggcgctgcacgccggcggcgaggggagctcgtcgccggcgcggagcctgacgcttgacggcgccgtcaagtgcacgcacgggcggctgccggcggcagagatactggagcggcaccagagcctggagcacctttcgatcgctggcgtcggggtcacgtcgctcgagggtttcccgcggctgcggaacctcacgcggctcaccctctccgacaaccgcatcgccggcggtctcgaccacctcgtcgccgctggcctgtcctgctgctgctcgcccatggcagccgattcctctatgcgcgcgctccctgtttccccgtccaaagctctatggtgtccggctccttgcgcgccctgccgagcgccctcccggcttcctgctcgccgagctcggcttcgagttcctatctcccatgccgcggcactctactgcgcgctgctcgccgagctcgccctgcgctcggattccaccttcctgcgtgcgtgcctgtatgtgcgcgccgtgctcctactgcttcctatgcgcgtagctgtgtctactccttcctcgccttagtccctgcgcgcgtcgagctttcgtgtcgagctctcgcgccgtcgaatcgcctgcttgctgtccgcgccgtcgaagttctctcgccgtgtgctctgacatcggctgctgccgattccgccataaagttcgcgagcgctccttgctcggctcgtttcgccgtgggcaatttctccacgttttaaatccgtgctgcttgccccgtgtgcgctcgcttctcatccatcgggtttgtgcgtgctcgcatttgtcgtcgagctgttgaacccgtcatctccggctcgatccccacctcaccagcttaccccagacttcaatcgaaggtcgtcgtcgttcgtgcatcccaagaaaacccaagaatcgggtgaagacgaagttagcagcgcgattttcccaagcgctcaaccaattgcctggatcggaaaatcgctaccgatctcgcggattcgtgtcagatgtagaaacggtaagctgataaattattcagaatagttcgatcgatgaataaattagtgtgatgcttattaaggtgctcgataaattgcgtaagtcacgaaactctcgtcgactttgcagttcttgcgattatcgagccaggttcagttatagcgagttatttcgctattccggtcaattagctgaattaatgtaccgagtagaatattagtaggcctgtgtgataaaggaatattttaatcacttgtaaagatgtagtataatttataaagcaagagataaggttagcatttaatt

SEQ ID NO: 34081 - DNA, 1774 bp, Zea mays
  Clone ID: UC-ZMFLMO17215C03_FLI
attccactattactatctctatagtgcagctttgagcaaaaacatgagccatggcgattggtaaacttgccaaagtaccactaggctgctctttcgaaacatagttaaatgtccattttaattcccgtaacccatgtgtactgtaacctttttatttttcaataaagtgcgggcccactgtacataattttgactcctcgatttctgtgttttgctgtcacctaacgctcattggtctttgcagcacaactggggagagagatcctgtcacctctgctctgcttattattcttggcagaaaggtgtcacttgatatagctcaagtcgttagatggaaaactagcccagcagctgaggttttgcctactgtacgctatgctgcttcatttgcaggttatggcttttatggagaagttatcagggagagcgaaaagtaccggtggatgggtcctgcacgttatgacttttctggaacaatggtctttctgaagcacaggtcatatggggcaaaggttgcttttctcgatactccatacactcattcgcttacagcatcagcacaggatgatataactggagcacaaccactacaatctcgttggaagaaacctcgcaaaataatctgcagaacaaattgctttgtatgcaaagaggcttcaacatctggacaaaatccagatgatgttgcagacaactccagaacaatatgcgagaaccagaagtgggtctggtccgaaggacatttcctcagcgtcggtgcagctgtcatttcatgtcgtaacgaaagagcccctgatggcctggtagctgacgcacacctttcggatggttttcttcatctcttgctcataagagactgccctcttcccctttacttgtggtgagcgaaatgttgctctcttgctgagctcatgatccaatctcttctgactccaggttacttttgattggaaatctcaaatctgtttctcagcgaaagatgaaaacaatcacaaactaatatcgtttcccgagaaactgtttaaatgaattcaacgtggaaacctttttaaaaacatagtaaaatatagtttcgtttctgaacttgctttaaatattcagaaactagtgcaaattggatttattcctgcggttctctgtttgcaaattcgttacctaataatgatctaattggccccgtgctcagaacgaaaccctaaaccctaaactgtaagtccagtagctttcctaggaaaaacaagcagttcactattcttattatatttgatggaattgttctgtaggttttgttacatagaatatatttttaatctgcaggcatctaacacaatttaccaagaagggttcagatcccctgtccttcaagttcgttgagcatcacaagacacaagcgtttacctttatctcatcacatgacgaaagtgtttggaacttggatggagagatgtttcaggcatgtgaggtatctgtccaagcgtgccgggggcttgtcaacttctttgcttcggggccagagctgtagtaatgatactcgtaagttcctctttgcatgaacgaaggatgccaggagttcatattttttatttagagagtcccttatttcgacatgttgtacactcttatttgtattttagtggagacctagaacactttgttgatagatatactgttaatatttgttgatagctatgtggcatggaaactacaacccatttgtgctatagaatagaggaacaaaaggttttgattgaattaatgaagtaaaagtttattt

SEQ ID NO: 34082 - DNA, 1892 bp, Zea mays
  Clone ID: UC-ZMFLMO17215D06_FLI
gctgctttggttgccaagaaggcttgtgagttaggcctggaggttcggttctggatttcatcttccaacttgttttctttatatattttttgtcctgaccaacatgactaaaatattgatccactggttcacagctaaattactttggtttggtatattcctctttggtggtctgtggctagaattctctggcaattaccatgacaatttaaaaagcattgctgcttttgctcactgttttatatgaaaaccatcctttagtaacactggtatctgtcgatcaggtaaagccatggattaagacgagccttgcacctggttctggtgttgtgaagcagtacttggataagagcgggttacagaaatatcttgaccagcttggcttcaatattgttggctatggttgcacaacctgcattggaaattccggcgagcttgatgaatccgtatctgctgcaattactgagaatgatattgttgctgctgctgtattgtccggaaacaggaattttgaaggacgtgtgcatcccttaactagagcaaattaccttgcttcccctccattagttgttgcttatgccttggctggcacggttaatattgattttgagaaagaacctattggcatctcgaaagatgggaaagaggtttacttccgggatgtttggccatcaacagaagagatagccgaggttgtcaagtcaagtgtgcttcctgacatgttcaagagcacatatgagtccatcacccaaggaaatcctatgtggaatgagctgccagtctcaacaagcactctctatccctgggatccatcatctacatacatccatgagcctccttacttcaaggatatgacaatgactcctcctggcccgcgaccggtgaaggatgcatattgccttctgaactttggtgacagtatcacaactgatcacatctcgcctgccggaaacattcacccagacagcgcagctgcaacatatctgaaggagcgtggtgttgaaaggaaggacttcaactcatatggtagccgaagaggaaatgatgagatcatggctaggggaacctttgccaacattcgtcttgtgaataagttcttgaagggtgaggttggacccaagacaatccatgttccatctggggataagctttcagtttttgatgctgctatgaaatacaagaatgaagggcatgatactattatcctggctggtgccgagtacgggagtggtagctctcgggattgggctgcaaagggcccaatgctgcagggagtgaaggctgtgatagcaaagagctttgagaggattcaccgcagcaatcttgctggcatgggaatcatccctctatgcttcaaagcaggggaggatgcagacaccctgggcctaaccggccatgagcgctacacggtccaccttccaaccaatgtgagtgagataaagcctggccaagatgttaccgtgacaactgataatgggaagtcgttcacttgcacactcagattcgacactgaggtggagcttgcttactacgaccatggtggcattctaccatatgtcatcagaaagattgcggaacaatagattgtacaatttgagatgattgcgatgcggtggatcgtaattggtgtaaacgacccatttttgagtacatataataacctctgagtttctcagagtgagctgtctggaacttttagtaaccttttgctttctttaagacactgtcaataatatgttaactcctgcaatatctgaatatacatttggcagatgattccctatgttgtaaatgacactagttcacaacactgacgcagttcaaagcggttcttgttatctggtggtactcaaattagtactgcaaacaatcgatgagctgatttttatttg

SEQ ID NO: 34083 - DNA, 1819 bp, Zea mays
  Clone ID: UC-ZMFLMO17215D09_FLI
gggttatagaaaattatattttatgtaaatctattacatagccttgtggatattggtaccaccttatttttcttgttggcctgttcaaccacatgaaacacgctttgctactttttttttactaaccagagatccatgtccatgcatgtgtaggttattggcctttatgttggggttgcgacagtgggaatcttcatcatctggtacacgcatggcagtttcctgggaattgacctggctagtgatggccatacccttgtgtcgtactcccagctctcaaactgggggcagtgctcctcatgggagggcttcaaggtgtcgccattcactgcaggagcgaggacattcagctttgatgcaaatccatgcgattacttccagggtggcaagattaaagcaacgaccctctctttgtctgtcttggtggcaattgagatgttcaactcactgaatgccctgtcagaggatggcagcctcctgagcatgccgccatgggttaatccatggcttcttctggccatgtccgtttcttttgggctgcatttcttgatcctctacgtgcctttcctggctcaagtgtttgggattgtgcccctcagtttgaacgaatggctcttggtgatagcagtggccttaccagtggtgctgatcgatgaggttctcaaatttgtggggcggtgcctgacagctcgtgcccgaaaacaatcagggaagaggaaggcagagtagatgctagtgatcatcggtattagaatctgtagcgccacgggaatcgatattggatgtgacaccccattgtttttgagttgctaaggtctctcgatcctttctgagtctttttagactgggaatgacagtccaggacaggcaaggatattctataggactcataatcagatcgcattgaacacactccattcttttcgttgtaacaaatgctggtgctgtgaacatgctggagatacagcaatggctacctgacgctttttcgctataatggtgcgctatatatgctactactgttctgttgcgaattttctgacatgttgctcactgctcagtaatatatttgttagagccgtatgttcagttatgtttgcttgtgagattcctcttgtgcagatgaaatccgcagcatggctattgatcatatactgctgtacacggaggatgcaagattattttagcttcacctgccctcctcgctgttgaccatctttgaaaaaactctcctcatggacataccatcgaggtcccccaagttcgctgccacggtggcctctgtcccgtcgctgacggtcgactggttgcgatggaatttggacgcactcctgggaactagctgcgtgttgtctgtgcctgagctgtccggcgacgcctcctgcaactgcagcgcgaactcgaggcaccagagcacgtcccctatggcgggccgctccacgccgtactccgcgaggcacttctccgcggtgtcgacgaacttcttgagcgactccggccgtatcgacccagcgatccgctggtcgacgatgctgtcgagctcgccgtttttgagccgctgcgtggcccactctgccaggttgaccatctcccggggcagcgtcgggtcgatgaccggacgggcgcagagcacctccagcaggacgacgccgaaggagtagacgtcggacttgtccgtcagcatctgccgccggaagtactccgggtcgaggtacccgaagctgcccttgacggcggtgctgacgtgcgtcttgtccagctccggcccggtcttggacagcccaaagtcggcgaccttggccatgaagctgtcgtcgag

SEQ ID NO: 34084 - DNA, 1587 bp, Zea mays
  Clone ID: UC-ZMFLMO17215F02_FLI
cttggatccatctccatgggtgcctccagtacttgcccttgccaccacttcagctcgtcttccatcctcaccaagcgggccatcgccttcgtgctctacgccctcgtccccctcgccctcctccactacctcctatctcttcctccccgtctcccctctcctcccaccaccggcgccgccacctccccgtcacggccgcagcaggcggaggaggctccggcagcgcggtgcgattactcggacggggagtgggtgcggaccgcggcaggtcctcggtacaacgggtcgagctgcggcaagacgatcaaggccggccagaactgcgaggcgcacgggcggccggacacggggtacatctactggcggtggcgcccgcgcgggtgcgcgctgccgccgttcgacccggaggagttcctgagcgcggtgcgcggtcgccacgtggccttcgttggcgactccctcgcgcggaaccagtgcgagtccctggtgtgcctgctcgcctccgcgttcccggcccagctggtgcgcggcgctggcggcggcgacggggacggggacggcgacgagctccgcaagttccggcgctgggcgttcccgtcgcacaacgcgacggtgtcggtgttctggtcgccgttcctagtgaacggcacggagaggcccaagtcgccggcggcggcgggagggctggaccacaaccggatctacttcgaccagcccgacgagcggtgggcggcggcggtcccggggttcgacgtggtggtgctgtcggcggggcagtggtacctgaactcggccatgttctacgaccgtggcgccgtcatcggctgccatcgatgcccggagcccaaccgcacggagacgggcttcttcggcgtgttccgcctcgccgtccgcaacgcgctccgcgaggtcatatcccgcgtcgccgccacgtcctcgcccgcgcgcccccggctggctgtggtgacgacgttctcgcccgcgcacttccagggggattgggacagcccgaccgcgtgcgtgcgcactcagccgtacgcgcgcggggagcgggagatggagtacatggatctggagatgctgcgcgccggggtcgaggaggtcgccgcggccggcgcggacgcgagtgagcgcggggcgggcctggcggtggaggcgctgcaggtgacgcggctggcggcgatgcgcccggacgggcacccgggcctgtacacccgggcgttcccgttcgccgagggtgcgaaggatcggatgcccaacgactgtgtgcactggtgcctgcccgggcccatcgacacgtggaacgagatcctgctgcagctcgtcaagggatgggccgtcggcgtcggcgccatcgccgacacctcgtcgccatcgccatgaactgggccgttcgaagctaccgagtggccgtttggatgggcgattttggtccaaatccttgcgatggatttcgaattatttactcactcaagcgctttagattttgtagagttggccttttgttcaagcgctcagtcaggtatctttcgcttgtattttaatgataccagaactggaatcaacttaattagtcagcttagtcag

SEQ ID NO: 34085 - DNA, 2043 bp, Zea mays
  Clone ID: UC-ZMFLMO17215F03_FLI
agacagggataaccttgacaaagctgttgaatgttatcaaatggcactgtcaattaagccacttttcgctcagtcgctaaataaccttggagttgtctatactgttcaaggtaagatggattctgctgctagcatgattgagaaggccatacatgcaaatcccacatatgctgaagcatataataatctaggtgttctttacagagatgctggtagtattactttagcaattcatgcttacgagagatgccttcagatcgatcctgattcacgaaatgctggccagaaccgtttgcttgcaatgaactatattgacgagggctcagatgacaagctttatgaagctcacagggagtggggaaaacgctttatgaaattgtatccacaatatacaagttgggataactcaaaagttgctgaccgcccattgatcatcggttacttgtctcctgattactttactcattccgtgtcctacttcattgaagctccccttacacaccatgattccacagtttgcaaggtggttgtctactccggtgttgtgaaggcagatgccaagacacttagattcaaggataaggtgttgaaaaagggtgggttgtggagagatatatatggtattgatgaaaagagggttgctagcttggtaagggaggataaagtggacatacttgtggaacttactggtcacacagcaaataataagttagggacaatggcatgccgacctgctcctattcaggttacctggattggctaccccaacacaacaggtttgccaacaatagactaccgaatctcagactcattgacagatccacctatgacaaaacaaaagcatgttgaggagttggtgcgccttcctgaaagctttctttgttatactccttccccagaagctggtcctgtttgtccaacgccagcaatttcaaatggtttcgtcacttttgggagctttaacaatctagcaaagattacaccgaaagtgttgcaagtttgggccagaatattatgttcagtccctaactccaggcttgtggttaagtgcaagccattctgctgtgagaacataaggcagaaatttttggccacactggaggagttgggcttggagtcattacgggttgatctgttgccactcatccatctgaatcatgatcacatgcaggcgtattctttgatggacatcagcctggatacatttccctatgctggtactacgactacatgtgaatctttatacatgggggttccatgtgttacaatggctggtgctgttcatgctcataacgttggtgtcagcttgctcagcaaagtcgggttggggaggctggttgccaaaactgaggatgagtatgtgagcatagcgttggatttggcatcagatgtgaatgccttgcaagaactgaggatgaccctgagggagctgatgatgaagtcgcccgtctgcgagggagagagattcacccggggcctggaagctgcatacatggacatgtggcgcaggtattgtgacggagacgtaccatctctcaggcgcttagcactgttagaggaacatcctgttgccaatgagccagactcggacaaaacctccgagaagcttgcagatctgaaagcgcagagagcaagcgcgactgtggaggaagataaccagcccccagcaatggcgaatggtgtgagatcgcccagttcacccgctgctgcaaaatgtgaatcaaatggtcacagcagccaatgaccaagaacggtgtcacgctccattgatgcagaccgatactgatatattgtaggtcgagtgatgttagcaacatctgtgtttagagggaggggttgttaagctccgggtgtctgatttattgacacttgcggtctgtaaggtgattaaatgtgtcttataaagttcgatttgtagggctttgcccctgtaggttcttgatatggtaacttaagttgcttcattagaaggcgcgggttcccggttgtatatgtagtagaaatatgacagtaaaacaacttgaagagtcgattaaccgacat

SEQ ID NO: 34086 - DNA, 1711 bp, Zea mays
  Clone ID: UC-ZMFLMO17215G03_FLI
gtttgcctggggcttcgtttgtatttagccagacctttggatgaagcttgctgtatatggacaatttcttctgactagagttggtatcctttgttttttgctcttccaattctttgcagtcagttcatgggtcttgtaactgaacagtgtttatttgtatagatctgccaccagataaagagcctcttgattggaacacacggatgaagatagctgcaggtgcagctaagggcttagaacaccttcatgacaaggcgagtcctcctgtgatttaccgggattttaagtcatcaaacattcttcttggagaaggatttcatccgaagctatcggactttggccttgcaaaacttggtccggttggtgacaagacccatgtttcaacacgtgtgatgggtacatatggctactgtgccccagaatatgcaatgactgggcagctgacggttaaatccgatgtgtatagctttggtgttgtgttccttgaacttatcacggggcgtaaagcaattgacaatactaagacccaaggggagcaaaatttagtggcatgggctcgtccactgttcaaggaccgaaggaaattccctaaaatggctgatccaatgcttcagggccgcttccctatgaggggtctataccaggccttagccgttgctgccatgtgcttgcaagagcaagctgctacacgtcctcacatcggggatgtcgtcactgctctctcatatcttgcttctcaggcatatgacccaaatgcccctgttcaacacgtccggagcaattcatccacccccagggccagaaaccctgctgggtggaacggcgaccagcgcagcgtgcgctcgcctaaccatcattctccagacccgcggcgcagagacgctgcgggggcatccaagtatggagcagaggttagcaggactagctctaccagcgactctggccggcgatcaggcctggatgacatggacctgaccgggtcgcaagtgggaagcccagcgcagaccggaagaagaagagaagctccaaggggcaccgacagacagcgtgctgtcgcagaggccaggacatggggggagaattcaagggagcgaacaaatggccatggcagcttcgacagcacccatgagtgaagccgtcaggttctgttccagtcatcattccagaacccccaccatgggttgagtccactcattcatcagcaccagtcagatccgatcttgggacatggcgtcggtccaagtgtctgtgaataaggcttttcttgccctcctgtggcgaatgcaattctcctggcgcccattccttgccaatgcgacctgtgtgtgtcatgcctctggcgactgggagcctcaggaggagcctgtaggattcagtcagaggtagacaggtcagtgaagaaagaggaggggcgcggagtcacattggcgagtgttttgttttttttggcggctaaatgctgagtatgttcagctgcatgtgtcctttttgtgtatgtgtacgtgtaagacgtgtaatagcaaccgtgtcaggtttggctacctgagaggcctttgaagcttctgctgctgcttccttccccttgggaattgggagttcagagttgaaatgtaggataggcgatgttgttgagtacatcaactgtttttatccttccatgttgtacggcgacgcttccctgaacaatatgaccatgatgtgcccccctgtc

SEQ ID NO: 34087 - DNA, 1475 bp, Zea mays
  Clone ID: UC-ZMFLMO17215H05_FLI
gctaccaccatctttacatagtcaagtttccacaggaactattgatgagaataacagcagtttcaattttggtgatagtgccattggatccatgaaaaggaaaaccgcagtagttgccggaaaccatcacattcttcatggatttgctggctcaagttcatctgttcatgtccctcagaatcctgtgtatgggccatggaatgcttcatctcaatcaaattgtttacccagttctgcagcttcaaacctaccagaataccacaatagtaatgggtggccgttcttagaagaatcttctgcaaatgcttcaaacagtttcacttcagtggatgcttgtccagagttggtacctcatggtaacaatttatatccagcttgtcacataatacagtgcaatacatgggttccacagactgcaagtcatggaataccacagtggggatatggtaatgtcatggtcaatcctccaggaaccgtagacatgccgaatggaaatattcaggattatcaagctgggcattcttctattcatgggccactacctcatttctgccagattcctttgcgtagtatgcaagtacctcaaatacaagtaccccatcaacagttcatcggtaacaatgtggtgcatggtttaaatccttcagccgcaggccttccgttagatccaagaatgctggctttcccattcaatgatgagcacacttttgggcatcaagtgcatccacctctgataaaccaagccaacaatggggctttaagaattctgccatatcagaatgctacagtgatggatcattcaaggatttatgaagcaggacatgttattgatgaacatagagatatgcgtttagatgtggataacatgacttatgaggagcttgtagcattgcaagagcagataggtgatgtcaatactggtttgacagaaagctatatccaagaaaacttgaggtccacttttcatgttccaggagcagctagcatttctgatcatttctgtgagctttcgttagagaacgatgcttgcataatatgccaggaggagtatgaagctagagaacttataggagcccttgaatgtggtcacaagtaccatgaggattgcataaagcaatggttgatggtgaaaaacgtgtgccccatctgcaagacaacagctttgtcatcagatagaaggaatggatgatcttcgccagtaacattattggttatttaccgcgtggcaagttagcgcgattttgtatatagacagggttgcctttatttgccgtcccccttcgctgtggacataaactgtacagatattattttgtaggatattttagacgttaaatggcaccatggtgtgtaaggctcccatggttgccttggtagatcctcccttcctttacattgtatttatctttactcttcaaaaaagaagcccgaaaacatgtatattttggaagtgaaagaaccgattttttttcttc

SEQ ID NO: 34088 - DNA, 1351 bp, Zea mays
  Clone ID: UC-ZMFLMO17215H07_FLI
taccttttctcttccctgaagattgttgagaagtattccaactccaacatcgaaattcatactttcaatcagagccagtatcctcgcattgttaccgaggacttcttgccacttcccagcaaagggaaatctgggaaggatggctggtatcctcctggtcatggtgatgtgtttccctctttgaataacagcggaaaacttgacatcttattggctcagggcaaggagtatgtctttgttgcaaactcagacaacttgggtgctatagtcgacatcagtatccaaataggatgatcaaatttgcatacctgttttaatacttactattgccgtgtgctttgaattgaaaattgtatccttaatcagcacagagatcctaaaccatctgatcaataaccagaacgagtactgcatggaggttactccaaagacgctggctgacgttaagggtggcactctcatctcttacgaaggaagagttcagcttttggagattgcccaagtatccgatgagcatgtgaatgaatttaaatcaatcgagaagtttaagatattcaacactaacaacttgtgggtgaaccttaaagctatcaagagactcgtagaggctgaggcacttaagatggaaattattccaaaccccaaggaagttgatggtgtgaaagtccttcaactcgaaaccgcagctggtgcagctattcggttcttcgacaaagcgattggaattaatgttccccgctcaaggtttctcccagtgaaggctacatctgatctgttgcttgtgcagtctgatctttacaccttggttgatggctttgtcatccgcaacccatccagagcgaatccagctaacccttcaattgagcttggacctgagttcaagaaggttgccaatttccttggtcggttcaagtccatccccagcatagttgagcttgacagcttgaaggtttctggtgatgtctggtttggctctggaattacactcaagggcaaggtgacaattatcgccaagcctggagtgaagttggagattccagatggagacgtacttgagaacaaggatgtcaatggccctgaggatctttaagcaatgtttatcatcaccagttttcccaaggacatgtcacaggaactgccaagcctaatcactcctactgagctctatattttgtaattttcatgtgcattccgattccgctgtgagggtcatgtgagcccgctagagaataattgtaatcttctttgctgcgtctgtacttctgtttttgtgcgccaggacgtatatttttactgaaatgatactccgaagagcacgtatggtgtcttaccgggaggactcattgccgcc

SEQ ID NO: 34089 - DNA, 672 bp, Zea mays
  Clone ID: UC-ZMFLMO17215H08_FLI
cagctgcgcgcgcccgtggacttgtcctgccatggaaggcctcatcccgttcatctacagggccgtcgtgcggtacaggaaggaggaagggcgggtctccctcggcgacctcttcttcgacgagccctcctcgccgacgtcctacttccgtctcccgggcggcgccgactccggccggtaccagcaggtgacgtcgagcgacctgttgtcatcccagacgactacttcgacggccagctccggtgcagccggcgtggcgcgacgacgctctccgatgaggtgcccgtcgcaccgccggcgcccggtctccccggacccgtgactcgatcgtgaagtgaagctagccgcccgtgaggcaaaaaaagaaaagcaagcgaaggtttgtttgctcatggcctcacgtagcagatggagcgtgtggtacgtagtatgaggatgatgctgagtaattgtgaatattagcctctaagtagctgcgtgtaagtgtacataaattcttcatctttttttactgtggtcatctgtaatgtaatgtaatggatgggtgcagcgggtcctccaaaaggagaggctttgtacctttgagtgaaaactgtgtgttgttcgttggaataaatatgtcaggcaaacgatggaacgcatggattttaattcagaaatccatgctttttc

SEQ ID NO: 34090 - DNA, 2262 bp, Zea mays
  Clone ID: UC-ZMFLMO17215H12_FLI
gccaaagttatcgttgtcttctctagcgacggcgaggcttgagcgctcacgtccaggcgttcccgtgccggtggccaagccagcagccgacgagatggactacctcaggacggtggttccgtcacaactcttggcagagcgcggctccaatcttgtcgtcatcaacccaggatcgggaaatgtgcgaatggggtttgctagtcaggatgtgccattcaatataccacattgcattgcccgacacatcaatccacaagagggcgaagaaccaagattctctgtgcgcgatcagatgctcaactgccatgctacttcatcgcagaatgcagagcgggagagtgcatatgatattattgcagcactgatgaaaatcccatttttggacgatgaagaaatgccttcaccgaaccaaccccttcctccaaagatgggacgtgttgatggcttctcttcgcagcaaaacagagacgataataaattcacttggacagatgtgtcagagagaattattaagccatccacaccattcgataggtcagtatacaaggatgctgaggaagatactctgccaagcacatctgatgatgataatggacaggactttaaagagaataagtataaagaaatgatatttggagaagatgctctgaaaatccctccttcagagtcatactgtctgagtcgcccaattaggagaggccattttaatgtgtcccataattattcagtgcatcaggttttagaagatttacgcactatttggaactggatactgacagaaaagttgcatatcaacccaagagacagaggtctatattctgcaattcttgttcttggggagacatttgacaaccgagaaataaaagagatgctgtctattgtccttcatgatttggggttcagcactgcagttgtacatcaggaagctctatctgcagcgtttggaaatggtttatctacaacttgtgttgtcaacattggggctcaagttacacaagtagtttgtgttgaggatggagtagctttgccccacacagctctggcgcttccatatggtggagatgacatctccagatgcttgctttgggttcaacgtcgccatggcacgtggccaaacttccaaactgatccaatgagcaatcctatagatatgctaatgctcaacaaaatcaaagagtcatatagccaaataaagactgggagcattgatgcagctgtccttgttcattcatatgataatgaaaggtctggtggacatcagaagacaagactatcagctattaatgttcctcctatgggtcttctttacccaagggttcttgttccagaagagtaccctccacctcctcgatcttggttccaagactacgatgacatgctggaggatacctggcaaacaagtgatggtctttaccctagtgggaatggtgggtttggcatgtgggacagttatccgatgtttcccactagattaaagaaatttgataacattggcctcgtagaggccattattagtagtgtactttcaacaggacgtgttgaccttcaaaagaagctgtttggtagcattcagttggttggtggtgcagcttctacagctggccttgcacaagtgctggagcaaagggttcgcactaaaatttcagcaaaccaatctattgagaaagttgaggtgttgcaatctaggacttatccattatttgttccatggaaaggtggagtgattttgggcgtccttgatattggtaaggatgcgtggattcatagagaagattggattaaaaatggtgtccacatcgggagtggcagaaaatataaggattcctattttcttcaggcgcaagtaatgtgctactacaacgtataacaggttatcttatttccgagctacacacgaagacttgcacttatacaggttgttcgaccgtccaaaccatcctagaatatgattggtggactgcgattaaattgcgtacatgatgcatcagttctatgcatgctcgctgctgtctgttcggaggtcatcaactcgggacctggactaagggccttgtcgttcgctcaacccctatgaaaaagtttggctttctaaagatgtagtagaagtactcatttattccctgccaattgaacatttcaaatcttcgtatggtgttaatgaaaaatctgatgtttggattcgtatttatttccaatgatgataatgtatatgtgcattctcgactgttttggaaagaatgaaaaatcctcgtccgtttgcgt

SEQ ID NO: 34091 - DNA, 842 bp, Zea mays
  Clone ID: UC-ZMFLMO17216B11_FLI
tgattacttggaaatctgccgttgttacaaggctatttatgatattccagcaataaaagaggatccaacaaagtggataccgattcttaggaagatctgttggtacttggtgctagcacctcatgatcctatgcaatcaagccttctcaatgctacactagaggataaaaacctttcagaaatcccaaatttcaggttattactgaagcagctggtcaccatggaggtgatacagtggacaagtctgtgggaattcttcaaggaggaatatgagaaggagaaggatcttcttgggggagctttgggtgccaaagcttcagaagatttgaggctgaggattatcgaacataatatcttggttgtatccaagtactatgcaagggttaccctcgagaggcttgctgatcttctttgcctgactttgcaggaggcagagaagcatctctcagacatggttaactcgaaatctctagtggcaaagatcgacaggccgatgggagttgtcagcttccggacgacccaagacagcaatggcacactgaactcatgggccacgagccttgagaagcttctggacctcgttgagaagagctgccacgagatacataaagagaccatgatccacaagacggcgttaaaagtttaactcttttggtttaggttttgaaacccgtgctgttcatgagttaccgtaacaggagggggggttttttgttgttgttgggcacggccagtgtccccgcaaatttgctttgactcgctgaatatttttcggattcctagatctgcaatcagatacctagtcctgaaaaaaaaaaagtagatgcacctttttttttatt

SEQ ID NO: 34092 - DNA, 929 bp, Zea mays
  Clone ID: UC-ZMFLMO17216E01_FLI
gtcctgctgctgcacgcgggcgcggcgtccgcgcagggcgcgcttgcgcggcaggacgtcgcggcgctccacggcctgcgcgcgtcgcttggcgtgcgcgccagcgactggcccgacagggccgacccctgcaccttctggtcgggcgtcgtctgccgcgccggccgcgtcgcggagctccgcctctccgggctccgccgcacccgcgcgggcgcccggcgcgcggccttcgccgtcgaccaactcccgcggctcgccgcgctccaggcgttcaacgcctccgggttcccgctccccggccggatcccgtcctggttcggccgcggcctgccgccgtcgctcgccgtcgttgacctccgctccgcacgcgtcaatggcgacctcccggccgatctcggcatgtccgggaacctcaccacccttgttctctccggtaacaacctgtccggccctatcccgccgtcgctcctctcaatcgctggtctccgcgttctcgacctctccgccaacaatctcaccggcccgctgccgaacgtgtcgttctctggcagtggtggagctggagtcttgttcaacgcctctggtaatgccttgtacggcgctgtcggcgatgccactggctccctcaggaagaggttctgggttgttgatgtctctgacaattgcttcgatcaggtgcttggaactgggtttcagaatggaaccgatggtgtagtggatctcaggatgaactgtttgtctggtgcagcatgaaggggttgcctagaatctctttttgaaacatagtgcttaccgcataaacctacattaataggtttctctttccatttttcatttggtcaatgaaggggttgccttctaatttagatgtgtatatgtctttccaaaatgaattttttcccaagatctctacgcaattaagggggctc

SEQ ID NO: 34093 - DNA, 938 bp, Zea mays
  Clone ID: UC-ZMFLMO17217A09_FLI
ggcgtggccccgtggcggcgcggtcgcagtcgcagtcgcagggacctgcctcccccgagcccgcgcaatcggcgccggctcccgccgcgaggcccctgacgctggacttcaccaagtcggtgtccggttacagcagggactccgggttcagcgtgtccggcgcgagctcgtcgttcctgtcgtcggtgacgaccggggacgggagcgtgtcgaacgggcgcgcgggaggctcgtcgttcctcatgctcccaccggcgcccggcgcggccagctgcgcgaagccgccgcccgccggtgcggcgcagaagcgcaagtgccacgaccacgcgcactcggagaacgtcgccggcggcaagtacggtgctaacggcgggcgctgccactgctcgaagcgcaggaagcaccgtgtgaagcgcacgatccgcgtgccggcgatcagccccaaagtggcggacatccccgccgacgagtactcgtggcgcaagtacggccagaaacccatcaaggggtcgccctacccacgcggctactacaagtgcagcacggtgcgcggctgccccgcccggaagcatgtggagcgcgaccccgccgacccgtcgatgctgatcgtcacctacgagggcgagcaccgccacagccccgcctccggccaggacccgccgccgccgtcgctcgcgccgctgccggagctgcccagccattgatttggcttcctgcctgctctgtcctgtcaattactagtagctgttgtcataagttataaaatcaaaatcgccagttcagttttagcagctccgttttccgatttttttctcttctgtcgttcgcgttagcagctttgtgaaaggattaggaaagtgttagcatcagacttggagaagggaaaagaaaacaaaaggtaatgctcttgttattagtattatttttttgtatacagc

SEQ ID NO: 34094 - DNA, 1053 bp, Zea mays
  Clone ID: UC-ZMFLMO17217B02_FLI
atctcttcttacccgcctcttcacctcaactcacattgtcatggcctcgtcttccttctcttcctctccatctcggcggttggtccacctcacacgccatctcgtctcctcttcttccggcgagctttcctcagtcggcgcccccgccgctgccgcctcagatgccgaccccgtgaaaagcccacgctccactgcctccagggttcacgccgcggtgctggtctgcctcttcgaggaccctagcagtgggccacgggtcctgcttacaaagcgcgcttcctccctctcctcccactccggggaggtgtcgttacccggagggaaggtggacgatggagacgcagatccgaaggccacagctctacgggaggcgaaggaggagattggactggatccggcgcttgtttctgttgttacagttcttgagcctttcctatcaaagaatggcctcactgttgttcctgtcattggtatggtcccagataaagccttatacaagcctgtcttgaataaagctgaagtggaggacatctttgacgcacctctggagatgtttctaaaggacgaccaccggaggacaagacagatgaactggatgggcatagatatccccgtccagtttttcgactacgaggcagatggcaagaagttcgtgatttggggcttgactgcgcacatcctgacacgcgcagcggcagtcattttcgggaggaaaccatcattcgtcgagcttcccagacccaaatatgcaggtgcacctgttgctggcactggcaagtcgaatctctgatggagcataagctggatgtaaggggcctctttgggtttggaacttggtgcatgaaccttgtgattgtagaattatatatgtttctcactatgtgatggctggggaaggtaccgaaaattgcttggtatatttatctacagaatataagatacatgctcaactgtattttgagtgtagcacagcagacaatattggcacacttggtggatggtgctttgtaaaaaagaatgtatacaatgaactccagaaagtatactgtcttg

SEQ ID NO: 34095 - DNA, 891 bp, Zea mays
  Clone ID: UC-ZMFLMO17217C02_FLI
cctcgcgcaggcaagctgaccggcggcggcccgacgaccccggcgggcctgatcgcggcggcggtggcgcacgcgttcgcgctgttcgtggcggtgtcggtgggcgcgaacatctcgggcgggcacgtgaacccggccgtgaccttcggcgccttcgtgggcggcaacatcaccctgttccgggggctcctgtactgggtggcgcagctgctggggtccaccgtggcgtgcttcctgctccgcttctcgacgggcgggcaggccacgggcaccttcgggctgacgggcgtgtcggtgtgggaggcgctggtgctggagatcgtgatgaccttcgggctggtgtacacggtgtacgccacggcggtggacccgaagaagggcagcctgggcaccatcgcccccatcgccatcggcttcatcgtgggggccaacatcctggtgggcggcgccttcgacggcgcgtccatgaaccccgccgtgtccttcggccccgccctcgtcagctgggagtggggctaccagtgggtgtactgggtcggccccctcatcggcggcggcctcgccggcgtcatctacgagctgctcttcatctcccacacccacgagcagctcccctccaccgactactaaaagccgaagccgaccgacccaggggtgcgcagcgcagcgcagctagcatccagctctctctccccggcccgctcgccgccgtttagtttctctcgtgcacgtgcatgcatcgtagactgtctcaggccgccgctgcgccggcgccgctcgcatcgtttgcttttccttggaccagcagtcgtcgccgtcaggttgagctgcttgtaaccgttaattccggacccgtttgcttctgtaagatttgtgcatttgcctgtgagt

SEQ ID NO: 34096 - DNA, 1944 bp, Zea mays
  Clone ID: UC-ZMFLMO17217D10_FLI
cgaactactccggacgggaagcacctccaatcccctcgcccccacggaccctcgccgccggggaagcgccgctcgctcaggaggacagccatggcgccggagccggaggatgatattatgaacgagaagaatccccgcccgctcgacgaggacgacatcgcgctcctcaaaacctatgggcttgggccgtactcgactagcattaagaaggtcgagaaggagatcaaggaaatggccaagaaaatcaatgacctttgtggtataaaggagtctgatacagggttggctccacctagccagtgggatttggtttcagataaacagatgatgcaagaagaacaaccgttacaagtggcaaggtgtacaaagatcataagccctaatacggatgatgccaaatatgttataaatgtaaaacaaatcgcaaaatttgttgttggactgggggataaagtgtctccaactgacatcgaggaagggatgagggtcggtgttgatcgcaacaagtaccagattcaaatccctcttccaccaaaaattgacccaagtgttaccatgatgaccgtggaggaaaagccagatgtgacgtacaatgatgttggtggctgcaaggagcagattgagaaaatgcgtgaagttgttgaacttcctatgcttcacccagaaaagtttgtcaagcttggtattgatcctccaaaaggcgtcctttgctatggcccacctggcactggcaagacacttcttgcaagagctgtagcaaatcggactgatgcttgtttcatccgtgtaattggaagtgagttagttcagaagtatgtcggcgaaggtgctcggatggtcagggaacttttccagatggcccgctcaaagaaagcgtgcattgtattcttcgatgaagttgatgctattggtggtgctcgttttgatgatggggtgggtggcgacaatgaggtgcagcgtacaatgttggaaatagtaaaccagcttgatgggtttgatgcaagagggaacatcaaagttctcatggccactaataggcctgatacattggatcctgcacttctgcgtcctggtcgtctggacagaaaggtagaattcgggctacctgacctggagggccgtacccaaatctttaagatccatacacgcaccatgaactgcgagcgagatattcgtttcgagcttctggcacggctctgccccaactctactggagcggatataaggagcgtctgcacagaagccgggatgtatgccattcgtgcccgcaggaaaacggtgacagagaaggattttctcgatgctgtcaataaggtcatcaagggctaccagaaattcagtgcaacacccaagtatatggtgtacaactagagagtgtcttcatggaatatgttgattttagaactccgggatcttttcggtgattgtgtcatcgtgaggttctatgcaaggattgttgtttgttttgaaatctggatccccagggattgcatcctgtaccacatgtttttaagacaaggttatccgcttggtggttcactgtacctgtggcaattgttgccgacaccgaactgaacataaagtcagaaacaggctacagtgagtgttgaaaaggaagaaatacagtgggtgcctgtttaaatatagcgttgtattactgactgaaaaagaaactgtccacctgaggaacagccgttgaagcgggtttgtagggtaggggcttgagggagttggcgcgaaacaggaagagtctggactgtagcagccgtggaaggaggcgccggtgcccacctgaggaactggagcagccgcagtagatagatcaagcaatcagcctagcggggatttcatcgcctgggtagtcgtgaggaccggtttggtttcatgaagctctcttcccctctcataaatatctcgacgcataagcagatttgctgatatgtc

SEQ ID NO: 34097 - DNA, 1438 bp, Zea mays
  Clone ID: UC-ZMFLMO17217E01_FLI
gggcccgccggactgcagggacggcgcggcgcagaaggcggcagcgggcgccgtcgcggctaccatcatggagcggtctggcggtggcggtctgaaggcggtcgtgataagcgggttgcaggatttggtgtttgacatcgccgcagatggcgagtgcgtgcttcggcctgatcctgtggccatggctgatgatgttcctcagcttgagctgaacggtcatggaggagacgagtgggactcggatgaggagggtctacatctggtggtagctatagctatgggtacaaccactacagacattgaagcatccaagatgcaccatgacgaacaccatggtggcgaggatccgagatcacaagttggcaagaaggcggcgaaaaggaaaggcgagaaaactgtcagtttggaggaactgcagcgctacttctctggaagcctgaaagatgcggccaagagtctcggtgtttgtccgacaacgatgaagcgcatctgcaggcagcacggcatctccaggtggccgttccgcaagctcgccaaggcgaaccgctccctggacaagatcaagcgcgtcttcgagtcggtgcaaggctcatcacaggccatggccgccgctcctgctcctccacctgccgccgctgctgcttcctattctcagcaagctccagccgtggccgctgctcgccgcgcacctgctttatcaccatgcctatcgagtgctccgagagtggcctcctcccaagcctcatgccaagcgccgccgccgcctctgaaggaggccgcatggcgcaagccttcgcgcggcggggacgccagcgtggtcacggtcaaggcgagctatagaggggacatcgtcaggttcagggtgccgagctccgcaggcgtcgcgatggtgaagagggaggtggccatgaggctggggctggcgcccggcgagttcgacgtcaagtacctggacgatgacaacgagtgggttctcttgtcttgcgacgccgacttccaggagtgcctcgacgtcgtcccggcgttgtcaggcgcgtcagcgtcgtctggctctgggacggctcagccggtggtcaggctaatggtgcacgaggtagctgaggtccatgggagctcctgtggcagctcagattagtcacaggaaatagagctgcagagctcaaccgatgtttggtacaaccatctgtagaagctttcactactggcatgtgtctgtttctagtctctctacatgtatccatgtccaaaaactgaagtcataaatacttacaaatagaaataggagcatctcacactttttgttgtctcagacagtacagatctggtctagtctagggcatagaaaagaacaaatcattgtgatctagcactggtattcgctccatttttaagtatatgacgctcaggataggttaatttattcttcatatatttaaat

SEQ ID NO: 34098 - DNA, 1349 bp, Zea mays
  Clone ID: UC-ZMFLMO17217E08_FLI
ctgatacccctgcagctgagtttccagcaatgtaagattttagatttgttttgcaattttttgtaataactaagaaaaacatctatgaaatataagatggtgttttagtgttttccaaatactactgcagcttttaatttttgtttggttgtttttacttggtgcactgaacataagcataggtaatgaaaacataataagttttatcttagaaaaaaaatatttggtgatgtcagtcatgtcactattttcacttaatttacctgtttttgattggtgaacatatagtttggatgctgaggcagccaaatcactctctctacatgaaggcccccctctatccagggagattttatgtacaatgccagatttcggaactgtcctaaggattttttcagatagatttgtcaataaagtatcatatatgcaaaagaacatatattgggccaggttctggaacattacttgcaaacaaaactttggcatttggaaaggtactttctcggactccggtggagttcgcctattatcaaacaaagatgatagcgttgttgatcgtctaaagtaatcttcttttctgatgagttttaatgttctttgaatattatataagtaaactttactaattacataaacacctccaggatgtatgacagccgcatcgccaaccgagttcgtcgtcggccgatggcaagcatcccctccagtgttactggtgacgcacaaattgagaaccttggtccgtgttgtggcagcacatccatgtgaagctagtttgcttttaactggtaactgtcatcttcggttgactcttgaggatcctacagcgagaattcatgcgtatgtccacaagaatgatttggtcggattctttggtggtggttttttgacaacagaagtgatagtaaaaaagatgaacatggtactgggcatcccggaaccacaagacagcgtggaagttgccccctcgaccaggaatccaccttggatatggtgttgcttgatgtcatactatatggacaaaaacgatccctgggtcagcagaaagtaccggatctatagcacagccatcagggattgagcagagggatgctgctggaatgtgcaggaacaaacttgtaaatgaatggaacagatgctgtgtagtattggcatcttgcttgtagaagaggccatatgcttttgcaggtggaatcagtgaatcattccatactgaacactgagaatagcacctcgggtgcattctgtacagtctgtatgtgcctacactctagattgtcttttgggtgctcatcacgaaacgtgagcatatcttttggaaacagagacctgcgtttgattcctgtgtt

SEQ ID NO: 34099 - DNA, 1506 bp, Zea mays
  Clone ID: UC-ZMFLMO17217F08_FLI
gcagcgggtcgccgcaatgcgcacggcagccctcttcctcgggaagatttcaaatccccgcggcctcttccatctactgctcggcacggcactccggctgcccgaaaaatttcgcacatcccagattcccgcccgctctggttcgcgccctcgtctggttcccttgccaacccggtcattcaacgtcgcagccaccccgcgcggctagggctgggactcgaggcctagggtttggctgtaagtttggtaacacgatggcgggggccgcgggggagagcagcggcgagcggcaggggacgttggagcggcggatgctgcggtcgcggtaccacgccgtgaagaacatcatcagcgatgagcgggatgagatgtcgagggcggattcggacaggttcacagccatcatccagcaggtggattgcctacacgagctcgtgcagaggcctagggagcaaatagcggatgcagaagctctgcttggcattacaaacactttggtaacttcggtgaggtcccactcaagtgaaggaatcagcccttctgatttcataacagctttactcaagaagtttgggcagcaagggaatcatgatgatgagtctgtctcattacgatggggtgatcttgggctttctgtttcacatatcttcaggcctgtgcctggatgctgtaccatgcttggtcctatgaatactgaagtaaagcaacggaaagttgtagctgttggtaggaaacggactgcacggccaacagaaaatacctgtcctgaagagcttgctgagtcttcagaggaagtaaagacagacactgacaggaatgtcttagttatgtttgatatcctcaggcgaaagaagagcgcaaaattggaaaaccttgtgttgaataggctttcatttgcccaaacagttgaaaatgtttttgcactatctttcttagtgaaagatggtagggtggaaataactgtagatgatagcgggcatatagtacggccaaggaatgcacctgctgctagcgctatagcctcaggagaagtctcatacagtcattttgtttttagatttgacttcaaggactggaagcttatgaaagaagttgttacagagggagaagagctgttgccacataggacttcacagagcaatctttgcaacgaagaaaacgaccaaccaaatctggaggcacgtgcgcaaataacgcctatcaggaaactcacccggaaccgaggattggtcttgcaggatcatgtagtcgaggaaactcctgaagagaaccaagcgtctaagcgcaggcgccttttcaggaatcaagattgacctagcaattacttggcatgagtagtgtaggcaggcaacctggcttgtgttgtatgcaaaaaattgcctgagtaacgtgtctttcactaggtctgttgtgccatgctgtcttgttcttggcacagctcgtgcttatctgaacttccagttgtgccagcggagtagggctgtaattataaattgtttgaagttc

SEQ ID NO: 34100 - DNA, 599 bp, Zea mays
  Clone ID: UC-ZMFLMO17217F10_FLI
ggtaattgctcagggagcagcagatgcatagtttgtataatataattagcatagctaaatcatgatcgtttgggatttaaagctgagttgaagatctgatttaagtactattcgttgaaaggtttaacgcatgaacctaggacgcgcaatgacaagcctgatagcctgaaagctaaaaggaatggtctctgcaccatttataaggtccatcccatcttgtttacaggccgcagatgctttattcctgcctatgctagactgtgaggcacctagaatgctcaggagtcgccaactgatggccttccgctttctccatcggtacaattgcgagctaatgctttggattaaactaatcacggtggtttgttcggggtatttgtgcgcctggctgtagttaatcatggactaaaagcctgtgctgtgcacctctgcccgcccccagatcgacactttgggggtatggctacatgtatagtcctaccagatcgtcggcatattgtgttctctttttgctgtatactagtactttgtaacatgcaagcggaggctacttattcagcgccgttcgctaattgtgtttatgaaatgttttgagctgt

SEQ ID NO: 34101 - DNA, 931 bp, Zea mays
  Clone ID: UC-ZMFLMO17217G09_FLI
gtttttttttggcctctggtatggcttctgctttctgaaaacagtttattttatttgataaagcttatcatgagtggagatattgactctacattcaaaagacttcgggagtggtatccgcaagtgataaaggatgagcaatcggttatttgcttcctactccgttctcaaagattcatagaatacatcagggctgaacaactggaggttgctgtgaaatatggtcgtgctaacctggcaagcttcttcacccacaaagcttttgaggggctgctgaaggatagtgtggccctacttgcgtatgagaagcctacagaatcatgcttgggatacctgatggactcttcccagcgtgaatttgtggcggacgcggtgaacgcggctgtcctgtcgacgaaccccactgtgaaggaccctgagagctgcctttactcgtgtctcgagaagctactaaagcagctcacagtatgtagctttgagcgacgtgcattcaacaactaccaaggagatgcattcttactccacaaagaagtgcagaattatgaaaggtctaggcgctcataggcatcgggtttgatgcgcatctcagaagtaaactcagatgctagactcccaagtctcaactgctctttgaagggacgaaggttcagaaccaagtggtcgaccatgctaagcacaaatccttccccttgatgcagcacccctactttcggaagtgtggatacaagatttcacagacagaggtcaggctttcggaaggtgtcttatcctccctgtaatcagaaaactcagtcagatacgccaacgtttcagtctccctagttttttttgttggttggctaatatgatgtttgacattgacattgtggatgctaaaaggtaaagatgcttcaatgtatgtccaccttttagaacatctgcatcatagttg

SEQ ID NO: 34102 - DNA, 2295 bp, Zea mays
  Clone ID: UC-ZMFLMO17217G12_FLI
gttccaagcagcattgtactcatcaatataagtacgtttctagcaagtctatttattagtagcctaagatatcgatctatcacctatagtcctatacatacatgcaaaagggtctgttgtagcaacatgtcctaggggcatgattaatatcataaaaatacattagctatgtactgcataaaggtgttcacgacatcagggttcacaaggttttccaagaatatgtttagcaatattgtcaaagcaaaatattgcggctgttgttgtgtcatctgagatgaaactgtttatatctgaatttgtgttcctgtgtagctacaacctcgggctgcaacatgagcaacggtacctaaaaaggagctgaacatttgtatcaacatctgtgtaatggacaaccacatgtccatgggaatcctagacaacagtaaagaggccttctcgattagtgttcaaaccacaacactgtggttgcattaatcctcaacacaaaggaaaatactatagtatgggagtatcaatgctatttaatggacttttattacattctctatgaccaaaacatcatggagaatgcggttttttttcaaacgtatgaatatgtgaaagaatctaaaacaatagtgttcttaataatttgaaatacgatctcaacctctactaaataaacaacagtgaaggctctcatttttccgcctattccgaaagaagaatcatgtaacctctgctaacaaacatatagcgccaaggctaaaaataataatgactttcgtgttcattgtatctccatcatccttcgccatttaaacacaatatttagtaaaggacgtgctacaagattaatcaacaaccgagagtaatccatcaccataccttgttaaaacattgtattctagccgtattcgaagtaataataaacatgaaatacataacaatggtcttgcagcacgtaaaagcaaaaggaggaggcagtgcccttcggccactagcagtccttgaatcaagtaaaaaaaggaaaaaaagaaaacaacagtgactacaacaaataattatcgataactgttagttaaccaatccaaaaaacaatctaatgcttgcacgggcaggaaattctacgattctaaactagacggagctataaaacataagtagtcatttgtgtgttgtataagaacacaggcatgaattgaaaagaaaagtattaatgaaggaactgaaagattgtagggtaaatcgtctagaatggttagaggaaatataagtaacagttctgttaccatgtgttatatgaagggttttatattaaagtgatttgagcatattcatgtagtaaagtcacagtgcctttcacgaatatcacatacctaattaatactaacagttatcccattcttcctagggataaaatggatattcatttgataaggaaaatggatgtcataatggtaaaactatatacataatgagaactgatgcttgatagaggagcagtgatatggtacatatatcctttgtctcacaatctgaacctttcttcctgcaaagtggaactgttaagtgccaaataccagaatgcagtgtcctaataaagttggtcaatataaacataacgttggcaacccaacaagaaatcgtgaatatataaagctgctctcatgaaaaggttaaacatatataagtgaaaaagaaataattttatttttctttataagcatgtatatcagcagggagaaaatcaattgaaaagaaattaacactagaattcaaataaaggttctcaagaattcatgcaatgaagaaaagatctcatcttctagggcatgtgcctggaaagttagattatgtccactttatagaaagaagttgaagtaagcaaagattgaaagaaattttgcactatatacatcaaactgtgagaccacaattaaaaaagttaggtcacggtgtattttcagctttgtgactaatgattattttgagccattcatacgtagtcttaagttgttttgtatttttattacttgaagtgtctagaaatatttatttctatatgaacatcaagtttctccatgtgaataggcaagggaatggtcattgcattgtcagcaaattgactttcttcaggaaagtagtaccttaagtggtgcaggcatcacagtgtatcaggctagtcttgtggcctagcttcgttgatatgatgatatcttttaacaatcaaattcaggatttaatctcgaatactgggctgctacgtgcggtaaagggtgatgactgtcttttgtgatcagccagattggc

SEQ ID NO: 34103 - DNA, 1165 bp, Zea mays
  Clone ID: UC-ZMFLMO17217H05_FLI
ttgcttgcttattgcaagtctctgcaagaacctgctagagaggaacaagctggtatcgtcgccagcatgggtagaggaaggattgagatcaagaggatcgagaacaacacgagccggcaggtcaccttctgcaagcgccgcaatgggctcctcaagaaggcgtacgagctctccgtcctctgcgacgctgaggtggccctcatcgtcttctctagccgtggtcgcctctacgagtatgccaacaacagtgtcaaggctactgttgagaggtacaagaaggcacacaccgttggctcttcctctgggcccccgctcctagagcacaatgcccagcaattctaccagcaagaatcagcaaaactgcgcaaccagatccagatgctgcaaaacactaacaggcacttggttggtgactccgtgggaaacctgtcactcaaggagctgaagcagctggagagccgccttgagaaaggcatctctaagatcagggccaggaagagtgagctgctggctgcggagatcagttacatggccaaaagggagactgagcttcagaatgaccacatgaccctcaggaccaagattgaggagggagagcaacagctgcagcaggtgaccgtggcacggtcagttgcagcagcagcagctgccaccaacttggagctgaacccattcttggagatggataccaaatgcttcttcactggcggccccttcgcgacgctggacatgaagtgctttctccccggcagcttgcagcagatgctggaggcacagcagcgccagatgctcgccaccgagctgaacctcggctaccaactggcgccgcctggttctgacgctgccaacaataaccctcatcatcagttctaaactggatgcatgtacgagaagcttttcaagcgaactgtgaacggtggaagctggctgttgcctctagatgttcttggcttccatgacctagcttattgcggtgtgtattgttgttgccttttgtgtgtgattctccttgtgctactctacctgatggagaactaaacctaatcgattggacataatgatcaaatgctacagatcctgtgaggctgtgatcaggttaaggcaaaacaagtatactgattgcttaaatgggtttacgagtgacgacaatgctatttgttgcttc

SEQ ID NO: 34104 - DNA, 512 bp, Zea mays
  Clone ID: UC-ZMFLMO17218A07_FLI
cgtcttggcttgactcaaagaataagcatagccgttaatatagctgatgcattggattatttgcaccatgattgtggacgaccaactgtccattgcgacttgaaacccagcaatatccttctagatgatgacatgaatgctcttttgggagattttggaattgcacgcttctatcatgatcctgagtcaaaatgggccggttcaattagttcaattggtgttaagggaacaattggatacattcctccagagtacggaggaggtggccttgtgtcaacgtctggggatgtttatagttttgggatattgttgctcgagattttaacgtgcaaaaggccaacagatcctttgttcaaggatgaccaggacatcatcagctttgtggagaataactttccggatcatgtatttcaagttattgactctcacctcctggaagaatgcaggagttcaattcaaggaaataattcaatacatgaaaatgagatcaaccagtgcttggttgatctact

SEQ ID NO: 34105 - DNA, 2102 bp, Zea mays
  Clone ID: UC-ZMFLMO17218B03_FLI
gttctttttatgtggctggtacattggtctgttgggtttcaactctaatactccaacttgcttgggactataaggctttgttgttgttgttggtggtggtacgttggtccgtgctgcacttaccttctgttgtgtatttacagtgtgctgcccactctcaagatgaagtcaggggaaaagcagttagattggttgcaaaaaggctctatgatctaacatatgcaacagaaaaaatagagcagtttgccatagagagccttgtgggagttgctaatgagcatactgtggacacagatattaattcgaaatctttgaaagaatctacagctgagattgaggtaggtagtcagggaacttcagtaagtggctcccagatcccagatactgagttctctgaaaatgggccattcaagacatcatcggtttctacaaaacagtcagcagtatctgtatctgaggcaaagcggcgtacttctttgttctttgcactttgcaccaagagatctagtcttcttcaacatctgttcaatgcttatggaaggtccccaaaagttgtcaagcagtgtatccattggcatatgcccaaccttataagaaatctggggccctcgtgtcctgaattgctgaacattattcataatccacctgaaggcagtgaacatcttattaccttgacactgcaaacattgactgaagattcaaatccctcagctgacctagttgctgctgttaaacaattatataataccaagctgaaggatgcatctattctgattcccttactgccttcatttccaaaggaggaggtattgcctatatttcctaggctagttgatctcccgcttgagagattccaagacgtacttgctcggatattgtagggaactgctcatactggtccagcattgactcctgctgaagttctcattgcaattcatgatattaaccctgaaaaagataaagttgccctaaaaaaggtcacggatgcttgcacggcttgctttgagcaacgcacggtatttactcagcaggttttggagaagtcacttaatcaattggttgacagaataccaattcctcttctttttatgagaacagttattcaagcgcttgatgcttttcctgctttggttgattttgtcatgggaatactctccaggctcatcgataaacagatatggaaaatgccgaagctctgggttgggtttttaaaattgtcattccagactcagccacgttcttttgatgtcttattacagctacctccaccacaacttgaatttatgttgaataaatatcccaatcttcggacacctctttcttcctttgttaatcagcggaatatgcataacaccttgcccagacagattttgaacattctgggtatttttagtgaaacacagcaggcaccgatggcatttgtgacagctacattacaaacagcggatgcaaccacctctcttcctggtgcaactctgatgtgaatatactgtggaagccatcagatgcaagaaaggtcgatgcacatacagatctttgtagacattagtacgcagaacagacagatctgtgtcaatgaagattgccgcccctctgatgtatactattttgcaatgacgggttgattataagctactccgcatggagaaagagatgttgacagaagccaccgaggtgattgtatggcgtgagatcctgtctgtcctggagattggagagtttgctccagcggaacggaagtcatccaacttctatagtagctttactgctgtggcaaaatgtagtcccgtcgtcgtggtcctgggagtctggcccttgcaggcagagacgaagaaggcgcaaggaggatgattacaggaaagtccatattaccccatcttaactgttttcctaagtcagattacagctgctgcattccttttatagggagcaggcatttgaccgatttagtctaaccattgttgtaacaacttctgtacattagttaattgagttttgctactagtgttagcaaacacataatcgctgtcgttagcaatttcctgcggtgacctggtaatcaaggaaaatattttacatcgggtcaatgcatcatatttgtt

SEQ ID NO: 34106 - DNA, 1344 bp, Zea mays
  Clone ID: UC-ZMFLMO17218B08_FLI
gagattttggctgagaagtacaaggataggcttgagagctcttataggggtctaatacatgaggtattctccaaggtccttcgtggcctgtctagtgctaaagtgacacggccaagtacattccgcagttgcctagatggatatgcagtcaaatcatcacttaaagctgaagatggtttgctttatccactcgaaaagggcttcttctttctgccaaagcccccaacactaattcctcatgaagagattgagtatgttgagttcgagcgtcatggtgctggaggtgcaagtatatcatctcattactttgaccttttggtcaagctgacaaatgatcaagaacttctcttcagaaacatccaaagaaatgaataccataacctcttcaacttcatcagcggtaagcatttgaaaattctgaatcttggagatggacaaggtagaactagtggtgttactgctgttcttcagagcactgatgatgattctgttgatccacatctggagcggataaaaaatcaggccggtaatgaggaaagtgatgaagaggatgaagattttgtggcagacaaggatgatagtggatctccaaccgatgattctgatgcagaaggctctgatgctagtatgagtggaggagaaaaggagaaaccttccaagaaggaagctagtagctcaaagccgcctgtgaagaagaagcagaagagtgggccagatgaaggttctcaaaaaaaagaagccaaagaagaagaaagatcccaatgcccctaagagagctatagctccattcatgtacttctcaaaggctgagcgagctaatatcaagagcagcaatcctgaactggcgaccacagagattgcaaagaagctcggagaaaggtggcaaaagatgacagcggaggagaggcagccatatgtggagcagtctcaggtcgacaagcaacgctatgcagaagagtctgcagcctaccgtggtgcagccgctcagcagggctctggtgctggatcggaatgaaggtttaatcgtctcgacagttaacttgcaaggctggatgattgagtcgtcagaataaagctggaatacccaaaaacctaagctgaatgtcatcgtttgacctgttgggttgttccggaattcaaccaggattcattctagttcatcaatgcttatattaattaggcaagcaatctggtctggaatcgatcgaggccgttccctggaaccgaacagacccctaagcaaatcctaccaggtaggacaaaatgtagcagcaggtttaaacaaatttcagagaagtacaagtattttttgcataagaagtacacaattacaactgttttgac

SEQ ID NO: 34107 - DNA, 1661 bp, Zea mays
  Clone ID: UC-ZMFLMO17218G11_FLI
gtttggaacgggcagcgtgtttggttggtgcctgtgccgccgttcgtctctgggtagcgtagcgacggcgccacggcggcttccggctcgtgcgcgcgcgcgtgtgtccgggcgggagtgagagggagaggagagctgccaagggatggaggcgctgaggaagcaggcgagcaagttcaaggagcaggtcgccaagcagcagcaggctgttataaagcagttcagtactactggctatgagcgatcagattccattgtaattgatgaggttgaactacagagacatcaacagcttgagaaattgtatacttctactcgttctgtaagggatttccagaaggacatagttagagcagctgaaggtttggtgtctattggaaacaaacatattgaagtgggaacaaaattttctgaggactgctatagatatggaagtgaaaataatgcaagcgatgaagcccttagaaaagcagcatcactatacggaggtgctttgagaaatattgagaaagagtatgaagatttcaatagaattttatcttctcagactatagacccattgagagcaatggctatgggtggacccctggaagatgctcgtggtcttgcacagcgctatagcaggatgagacatgaagctgagatcctctctactgaaattgctagaagaaaggcacgggtaagagaagctccaattgctgagcacactacaaagcttcagcaatcagaagctagaatgatagagcacaaagcaagcatggccgtgttaggaaaggaagcagcagctgcacttgcagctgtcgagtctcaacagcaacgagtgacccttcagcggctggttggcgcggcggaagcagaaaagttattccatctgagattagctgctatacttgatgacgttgaggcagagatgtcctctgagaagcaaaggagagaatctgcaccacctatcatatcttcacataagcgtgctgagaaagcccagtacttccttgctgaggtaatgcataatttcaatggaaccacggagaaggaactgagcttaattgttggcgattatgttgttgttcgtcagattgctcccaacggctgggcggaaggagaatgccgagggaaggctgggtggtttccggctgcctatgttgagaggcgcgagaatatccccccgaataaagttttccctcaagtataagatcataagaggggtcatctgtttccactgataagcagtttggttcggcattggggagctgcaaggctgtatctaacttctgattggtttgatgctccgtatggcgtatcttgtgcatcctatgttcttgtggtggtctagacttggaataagatatgtcggcacgtgctctgcgcctgtgcctgcgcgcacattgacgaagatgtcgctttgcatgtgtccgcagtgtgctactgcttgcggcagcgtaggtcatgttgactgagctttcctttactgacaaatttcgagtgtaaattggttcttgcactttttttttcgttagggtgtatcagtagttctgtacaatatgtttttaatgagaccattcggccatcagagctttgatctgtctcctaactgcaggattttttttcagaacgcttatttcacatgttagctgtcagaagttgattttttttttctttcc

SEQ ID NO: 34108 - DNA, 1955 bp, Zea mays
  Clone ID: UC-ZMFLMO17219A09_FLI
ctggcctttgcaaaagcgcccttcagctcccggaccgcttcccctgagctgctgcccaagaacttcgacaccacttgcccaccctccctggattcttgcggctcttcctcgagctcatcgaatccttcatggagagcgccgagggaccgtccccgtactccggtgatcgagcggcaccggttcaggatggcaatggccaaactacacctgggcataattcgcgaaggccaaacctttctttgcaaataccagctaggaccttggataccaatataccttcatcgacaagagttactatatcctgcagccccagttcaacgagagtgggtttgccaccgagacctaattcgacgagaacaaaatcatctatcaagaacatgaatcctcagcacagtttcagagcaaggagttcagcccaggaaggtgatcgagtggtccttctaaatcctgggacgtcatctgaagggcagcaggataatccaagcacagcaagatcattttcttttagaaaggtcattaactcattatcggcaaaaaggacccattctcttccagtaacgcctgtaggaactactgacaaggctgcatctcctccaaatcaattagataccctgccaactacaactaatgaaggagttgaagcaaaaattaggcgctcactttcagtacctggaaatcgcaaaaacagaagtttgaggagggcagattcattaggtgtcatccgtgtgattccaacaaccccaagacctgtcccagtcgaagcaaccacatcaagcgatataattgaagaaacaatcgatgtccctgaagatggaggcgaagatattcctgaagaagaggcagtctgcagaatttgttttgttgaactcaacgaaggaggtgaaacacttaaaatggagtgcagctgcaaaggagaacttgcacttgcacaccaagactgtgctgtcaaatggtttagcatcaagggaaacaagatatgtgatgtctgtaaacaagaagttcagaatctgccagtgatgttactgagaataccaactcaaactgcaaacaggcgggtagcaaatgctgctcagcagagagcagctcaacaatacagattttggcaggacattccaattctggtgatggttagcatgcttgcgtacttctgtttcttggaacaactcctggttactgatttgcagtcacgtgcactggcaatttcgttgcctttctcgtgtgtgttaggcctcctttcttcaatgatagcatcaactatggtgtcgaagagctatctatgggcgtatgcttcattccagtttgctatcgttatcctgtttgctcatatcttctacaatgtggtacgaaactcgacttgggtgacatctattgcagataaatgtttgtgtggcactgattgttgtcttgtgattacattcagttgaaagtgaatccagtccttgcagtcttactctcctcattcactgggtttggtattgctattagtacgaactctctactagtagagtatttgaggtggagagctaggaggaatcagcgtttggctcagcaggctgccaatgctgcacagcaccaagaatctggaaatgatggtggaaatgacaacgatgacgctcagcaagggcacgatccaaattctgggaacaatgctgtgtgatgattcaggttcttggtgcaaaaatccagcaccaaaaaaaagattatgaaatggtatgggtgtgaacagctgttttttttatctgtacagcaagtatagctcattcaacgcggcaccagtcacaagctgaaacctggaaaaacatatcttcatatgccacgtggagggcgctcacggatatcattatacatcacgcagagatgaagcaaaacacgatatgtttgtgtattagtccggtagtttgacttcaaatgtatctgttattcattttaagcttaatagatctaatgcattatag

SEQ ID NO: 34109 - DNA, 392 bp, Zea mays
  Clone ID: UC-ZMFLMO17219B01_FLI
gggttttaatataaatgataaacaaaatgacttatctaaatgtcttctaaagacttacagctccagctccacggttttctggagcacttaatgacctgctccaccaactccaccaaattttctggagctggagctgtcccaaatagggtcttagagagccggatagattggcgagttggatggctagtctgttagagagatattttgctattaagtagctaaaatttagcttgacaagtcatttggctagtctcttagagatgctctaactggattactttttgcacatcgccttttattttcatgttattgtgtgtggaatacctgacatttttttaaatttatcaccttttttttactttgactgtcttaggtgatgagctgtaaatgcc

SEQ ID NO: 34110 - DNA, 1159 bp, Zea mays
  Clone ID: UC-ZMFLMO17219C04_FLI
ggaaaatcatccgcgcagagggacagggcacacgcactccgagggagcgcagccgaggagaaataatggccacggcgacgaccctctctttcagcggcggcggcggcggcactaccctgctccgcgggcacgtggccttgacgtcggggcggtgctgcacgttcccgagctcgcggtggaggccgccgcgcttgtcggcctcccgcgcggatgactcctcgccggctccgttcgagatgacggtggaggacgcgctgaagctgctcggcgtcgcagagggcgcgtcgttcgacgaaatcctgcgcgccaagaacgccgtcctcgcctcctgcaaggacgaccaggacgccgtcgcccaggtcgaagcagcctatgacatgttgcttatgcagagcttatcacagcggagggctggaaaggttgctaataaccgcatccgctttgctgatgttaaacctgtaaagagtgcaggagctgggacagtcccacagtggatgcaggcaaccatgaagaatgcacccattacatttgagactccatcttcgagcagcttgggcatccagtcatgtgtttatggtgcactaatggttttcacctatgctagtggaagctcgacatctttgccgtctgcgtacagtagccctgatgtgccaggttttatcctagcaacaggatttggtgcatcactgtattttctggcaaagaaaaatatgaacttaggtaaggcggcattggtcactgtcgggggacttgcagctggtgcgactgtcggatctgcactggagaatttcctgcaggttgatctcgtgccctttctaggcatccactcccctgccgtcgttgtcagcgaatttattctcttctcccaattgctggtatcactgtttgttaggtaggatctgaaaccaagctgtcatcctggcatgtaattaactgaaacggatcgtgttcgatcttcaaagggtcagggaaatgcttgttttccgcacaaggtggaagcagcagctgtgtatagcaaaacaatacgtgggcatctctgtcccttataaagaccacctgtatctagtctagttctctcaagctcaatctcaagtctttcagatagaagcttgtatggattgcagaatgtggaatgtaaattcttggatcaatattctgg

SEQ ID NO: 34111 - DNA, 1992 bp, Zea mays
  Clone ID: UC-ZMFLMO17219C09_FLI
ccgccgccgccgggcaccgctcctcctggccgccgccggcgccggcgccgcgctggctgccacctctccctccggcgaaaatggtcgaagcgtcgcctccgcgctccaccaaggcatcgctcgctcctcccgttccgtctacacggttcgccctcccgtatctgttgctattactcctgagtttcggatgctgcttttgctcgattttctagccgttggctgtcgcagattggttttgtgatggcagattacaagtattcgctgaggggtctggatgctggatcggcggattaccctgttaagctctccaaggttcatctgcggtcagcaaaaaaactacttaaactatgtgaagtgaatggagggttttatgtcaaagctggtcaatatgtatcttcactaagacaagtgccaaaggagtactcatcaactctctcctgcctgcaagaccaggcaactccatccaagtttcaagatattaaagcagtaatagagcagaactttggcaaggaattgtatgacatgttcatcgaggtcgattgcataacaatcaagatgtagctgtcaaggttcaatatcctggattggagcagcgaatgaagatagacattatgacaatgtcattcttgtcaaaaatggtctcttgggtttttcctgattataaatttgacagaatactaattgaatttgagaaatccatgacaatggagcttgattttacgcgggaggctaagaattctgagagaacagccagctgcttcaggaaaaatagtgttgttaaagtgccttatgtgttctggcaacttacaaccagggaggttttgacgatggagttttgttatggacacaaggttaacgacttggacttcctgcggaaaacagatattagccctacaaaggtagctaaggctttgattgaactctttggtgaaatgatatttgtacatggttttgttcacggtgatccacatcctggaaatatattagtttctcctgaaggccatgggaaattttcactagttctgttggatcatggaatttatagagaattagaccaaaagttcagattggactattgtcggctatggaaagcactgatattgttggattcaaacaaaattctggaattaggcgaacagtttggcgttggcaaatatgcgaagtactttcctgtaatattcacagggagaactatagaaagcaagtcagctcttggcacacaaatgtctggtgaagagcagaggcgtctgaaggaggacttaaactctcttgggatggatgatatatcttcatttatggaatccttgccaccggacttctatgtcatactacgaacagacggactattgaggtccattttagggaatcttggggcaccacgccatgttcggcttctcacttatgcaagatgtgctatacacggtcttgagaagcagcacaaaatggagtctggtcttggagatgttcaattgtgttcaggtgcaatcagacgtatgttcttgaatgtcaaaacaaatgtcatctatctccgtctgagagtgattattgaaatagcggtattattagctaaagcaaatggtgccaagcagaaagtcctgaacacactcagacagatgttactggagatcagtcaaggttttcaccgccttatttgatgcccagaagtcagcgacgtggtgaaattaaggctacgagaaaggtgggggaagttggaagtacgtcaggactccggagtagaatcataactgtgattgttctgtttcaacttgtaaattggaggttgtattgtgtcaaggagtccaatcataactgtgattgctctgttgtaacttgtaaattgtacttctacgtcgagtctgcgctcgagagtccaggtgttttttttgttggaccaagtacgcatcccaaaataagtctacatctcaaaattcgaggagtcaaacaaatcttaatttgaagtttggctaaatttataaaattggtattaacatt

SEQ ID NO: 34112 - DNA, 639 bp, Zea mays
  Clone ID: UC-ZMFLMO17219E02_FLI
ctcaggcagaggttcaaattcccgtggccggggaagaaaaggcggaagggaaggcaaccgtccggaggagaatgagagctccaatggacgaggctctggctttggtggtaaaagaggaggctggaatcagggcaatccggctgaggaaaactggaaccctaatggtcaacaaggttttggccgtggtggcagaagagggggctggaatcagggtggcccagcgaaggaagacggtaactctagtggcaggcaagaaagttttggccgtggagcaagacggggcagcatgaaccatgaccaatcagccgaggataatgaaggccataataatcccgcacaagactttactcgaggaccagctcctcgtggtggccatggaaggggaggtggccggaaccatcacaggagagatcgggcaatgaagaagcatatgcaaggattgacagggctttagctgctggtagccttatgcttttgatgtgccgtactgtaaatggcatttttggaggcactcctacttgaccatccaaatttttgtgcttgttctgtttttaaatcaaataacgccatgaagtaacccacatatgttctcgtaacatttgtgattgccctaaaaagggtaatagtgtatgtagttct

SEQ ID NO: 34113 - DNA, 1983 bp, Zea mays
  Clone ID: UC-ZMFLMO17219F01_FLI
cgaggcagacccgcaggtcgcagccacaacccaagcgcagcgctctgcctgcctccgctccggctcagctcccgccctgcctccgccttccattccaccgcgcggcgctgccgagtgccgacgtcgtccccgccgaagtttctggtttctgggttggatctctcggagtcggagcgagcgaggatgggcggcggcaacggtgaaaccacccagctgggggagccactgctggcgaagaaggcgaaggcgtatcgccctaggtgccccggctgccgggtggaccgcctcaacgcggagcgggagggtgtcttccctctcaaggacctcttcctcatctggctcgtcaccatcacctgcaccctgccgatccagtctctgttccccttcttgtatttcatgataagggatctgcatattgctaaacaaacacaagacattggattttatgctggttttgttggcgcttcttatatgtgtgggagggcagtctcctcaacagtatggggaatcgtggctgataagtatggaaggaaaccagttatcgtactgacccttattgcaatagttatcttcaatactatgtttggactaagctcaaactattggatggcattaatcacacgatgcctgcttggaatcatgtgtggttatctcgggccaattaaggcttatgctacagaagtgtgccgaaaagaatacaatcatctggctttggcagttgtttcttcctcacgaggcattggtctcattattggtccagctattggtggttatcttgcgcagcctgcagataaatatccaagtatattctctcagacgtccatatttgggaggtttccatactttcttccgtgcctgtgtatatcaatccttgcagttattgctctaattgcctgcatctggtttccggaaactttgcataaacacaatggggatgccgttgataattcagttgaaaccgtagaagaatctcttgctggcaccgacactgaagaaaatggaggtggcggatgtctaaaattatttacaaactggccgttgatgtcagctattactttatattgtatcttctctcttcaggatgtggcttatgcagagacattctctctttgggctgtcagtgacagatcgtttggtggattaagctttactaccacagatgtgggcaatgtccttgcgatgtcaggtctcttcctttttctatatcaaatgttgatctatccgttccttgccaaaacggtggaccacatcacattagtccgtgcagtggcgttattgactctaccggttcttgctagctacccattctttccttcgttgtccgggttcgggctcatggtggtagtaaattgtgcgtcttttctgaagaatacattctcggtaactaccattaccgtgttcaacattttgatgaatgaagctgtgactcaggatgtaagagccgcagccaatgggatagctgtaacactaatgtccatctctaaagcggttgctccagctgttgcaggaatcatattttcgtgggcccagaggcgtcaaacagctgcatttcttccaggcgaccacttggtgttcttcatactgaacatcttcacgttcatcggtttcgtcttcaccttcagaccgtttttcgttcgaggcagtgccaagcactgaaacatggatgaaccggacgacgacccatgggtatcctatccaggggcaatcgaatataaattttcttccggcgtggccaagggaggtgccgagtctgtaccagtacgacgactcaggccagaacacacggcgtatggtatggtacacagcaaggccgtgttgttgctgtaagttttgtaatttctgtttcctgctcggcttcgcagcatgcagttgctgtatatgatggaagaacactctgttactgggcatgttgcgcggtttccacgcgtgtaagtaatgtagaagtcgctatggtaggtatttccataccgtcattagtggatc

SEQ ID NO: 34114 - DNA, 698 bp, Zea mays
  Clone ID: UC-ZMFLMO17219G10_FLI
gcgaacgattcctggaattgatctggaagatgattatgcacaggtgtctgccatcagaaatacaggagaatgtctagaatctgcaagtgatacctcgcacgaatacacggataatgttctacaagaacatatgtgttctcaagactagcaaacctcaagttttggtgacaatcctaagactaacacacaagcagcttcttcttcaactgtcaccagattttcaaaactggtgtactggaaatgatgctgtgaaggcacaggtgattcccatttctcagtgatgatgtgttgtatattggattcaacaatatgccattagaacttgtgaatgtctgggacctgccatcctctgagcttgggaaatccttgtgagctctggcaccctgttgtctgtgcattcagatcctaacacaccggaccatgggaggtctgcaccggaccgatcgctggagctagttagtcgactggtcgttgttatgtacggagtatgttgtgcaatagtagtttcttttggattcctagtgctcactctcttttttttttccagagcttttcattgacaagtcggtttagtgacacttctgccttcccgagatatagctgcgatgtcagtatgtctcagtagctgaatatgtcatatatttttttaactagaaatgatttgatgggcgttttgtgctgcgcctgcttcagagctc

SEQ ID NO: 34115 - DNA, 868 bp, Zea mays
  Clone ID: UC-ZMFLMO17219H09_FLI
ccagcgtccgctgtcaaacattccctccactgtaaggttcagccttgaaatccgtataggcttgcagatgaacttgatctctggtgtatttaagcataggacatagcaacattcaccagaaagaaacaaaatcacaagtatggatcatatgttaaagccgataaggtggagctacacgctccagataaccacggttgggtcctttacaaagcaactgtttcttccagtgctgggcacacattaactggtatcaacattgtctgcacattgaaatttactggcgaaatcagtccagaatcagaagatgtcgatggaacttcactgtatcaggcatcactaggccacctcagtattcgaaatactgacaaaaatacagagttccctccagcagaatcttggataactgaaggagattacatctcgtggtcaaaatgctctaacggatctgaactcgtgaatctgaaaatcagctggaagctgaagaaccctgatcaaccacaaccaccattcagcaagtacaatatctatgtggagaagttaacggcagattcagacttgaaagttcccagtcccaaaagctatcttggagttgctagtgtcgatgccttctatgtgtcgggcttagaggtctccaacgaagtcaccggtctgaaattctttatccaagcgtttgcacacgatggaagctggcaagaacttgaggaatgtccaaagttctttttattccctgttcactctgagtgagtgacattcatttactctggtgcgcttcattctgttacctttgacatatgttaaaggctcccacagaataatctaatgttatcattacagaaataagaaggggaaaaacaaataatattgcatt

SEQ ID NO: 34116 - DNA, 586 bp, Zea mays
  Clone ID: UC-ZMFLMO17219H12_FLI
aacactttgtgtggcattcacctcctgtatcctacgatgcattccacatgattatgtatgaactgtggctgcggcataatgtaataaagtactaagcttctcagcctctgagttttgatttctaacctaaatgactgatccatcggaaagatactacaaagtctgatagcctgctgttactgccttgaaaatgggcttctggttctttgttctttgaatcaccagatggatgattattgaatataatgttagctatgcatggtgcaatggagagcatttccatcgaagagttgaccgttgttcagcatatatggcaaaactgtagtcctggttaattgatggattacttgattcttttaacaatagttagctttcccatattgcaatctttccctctagatattacttatattccgtggatctgcttggttgattgcatgtattttctcgcgtaatttttttctgttcaatggtttcaggcatgtaagtaatgtacaatattattgatgtgaaacatagtccattttcttctgacagaacatgtaactgtgagttgtgacaaaaaacaatcatttgattttcggtc

SEQ ID NO: 34117 - DNA, 1033 bp, Zea mays
  Clone ID: UC-ZMFLMO17220B07_FLI
tgcggggtgattctctacgtgatgctcgtagggcacctcccgttcgacgaccggaacatcgtcgttctctaccagaagattttcaagggcgatactcagatcccggagtggctctctcccggcgcacggaaccttctccggaggatccttgagcccgacccggcggagcggatcgccatggcagagatcaaggcgcacccatggttccaggagcactacgtccctgtccttcctccgtacgacgacgacgacgacgacgacgattcagtgaagcaaatcggtgggggtaaaaccactcatcacatcaacgcgtttcagttgatcggaatggcgtcgtccctagacctctcagggttttttgaggaagaggacgtgtcccaaaggaagatcaggttcacgtccgcacaaccgcctgaggatttgttcgccgagatcgaacgctctgcgactgacatgggcttccatgttcacagagggcatagtaagcttaggctgacgcgaaactgcgaccggtcgaagaatcagaagaaccctatgtcgtcatcgtcgtcgtcgtttctagtctgcaccgaggtttttgagcttagcccctctttgtatgtcgtggagctcaacaagtcccatggcgaccctgcactgtacaggcagctctgtcagaggatctgcggtgacctaggtgtgctcgagatggaccagatctttgggacgaggccgccggtcgccgacgatctcgcgggcttggccttggcgttggagagacgatctgcgacgcctttggttgcgttgtgacgaaaggctgcccccgccggcccccctgaccgtgatgtttgtagcgtcagattatttagtgacgacgaagcagttcagctgcaacgcagctcggaacggttgtgtgatccctcccagaaatagaggacaaggtaaaagagtgtagccgtacacgtgtaggatcatgctccaatgtaaataaagtggtagtagccaccgatgtaaaactgaatgtaaaatctaagaaataaatcgtttatccagt

SEQ ID NO: 34118 - DNA, 1212 bp, Zea mays
  Clone ID: UC-ZMFLMO17220D04_FLI
gcgaaagaggggcacagagattgttggtctacgagttcatgcccaataagagcttggaagaccacttgttcaggcgagctaatcctcctctaccgtggaacagaaggcttcaggttatcttgggagctgcagaaggattggcgtacctgcatgaaggggaagttcaggtgatctaccgggacttcaaaacgtccaacgttttactggacaaggacttcagagcaaagctatcagacttcggcctagccagggaggggccaactggagcaaacactcacgtctcgactgcggtcgtcgggacgcaagggtacgccgcaccggagtacatggacacggggcacctgacgacgaagagcgacgtgtggagcttcggcgtggtgctttacgagatcctgacggggcggcggtcgctggaccggaacaggccggcggcggagcagaagctgctggagtgggtggcccagttcccgccggacagccgcaacttccggatgatcatggaccccaggctccgcggcgagtactcggtgaaggccgcccgggagatcgccaagctggccgacagctgcctgctcaagaacgccaaggagcgccccaccatgagcgaggtggtcgaggtcctcggccgggccgtgcaggcgcacgccgagcctgacagcggggctcccggtcccggccccggcgccaaggggaagaagaccgacgcagccacaccgtcccggcggcggcgtgactgactgctacatgtcgtcatcggtaaaggcgattataccttgtttccgagtccattggttctttagtctagtcgtgagttgtgcctgtgacagcacaaaaggagtgagtgttatgcttcgacatacagtattacttagacgtgcgtagagacgagcattttgaaaagaaaaaaaaaagtgtagaggtctcaagggtttcgaaagcgggcatttcaaaagattttgcgctggctctaaaaaaagatctgttttagcataaccgagtgaaatcagagtgtcagacgcgagcgcacagatttttcaggaagcagctggcaagagcttcgtcaagcatgtattaacagaaaacataatttgtataaaaaaatagcgcacaaatttgattgtattggatttcgctgggatcttgttgattgcataaattatttggtcttttacgagcactccgtcttgtgtgtgctattaggccattctcaat

SEQ ID NO: 34119 - DNA, 1343 bp, Zea mays
  Clone ID: UC-ZMFLMO17220D06_FLI
agagaaggttctactatcatactcaaaagactagagaactggacaaccttcttggagatatttatcataaaattcttgacatggagagagctatcataagggatttagtgtgtcgcgtccttcaatttatacctcaactgacaaaagcagtgaactttgccgcagaacttgattgtattttatcattagcaactgttgcccaccaaaacaattatgtgaggcccatcttaactgaagattcaatactcgagatacataatggcagacatgctttgcaggaaatgactgttgatacctttattccaaatgataccaaaattcgtgatgcaggaagaataaacataataactgggcccaactactcaggaaaaagcatttacattaagcaggtggccttgatagtctttcttgctcatatcggaagctttgttcctgctgattctgctattgttggattgacagataggatattctgtgcaatgggaagcaaatccatgacaaccgaacagtcaacttttatgattgatttacatcaagttggaacaatgctcagacatgcaacatcgaggtcactttgtttgttggatgaattcggtaagggcaccctaacggaagatggcattggtctgcttggaggtactatcagtcattttgcaaactatggttcccccccaaaggtccttttgtcaacacatctgacagagatcttcaccgagaattacctaccacagtgtgaacatatcaaatgttatgccatgagtgttctgaatcctgatggacagacgagcaatgaagatatcacattcctttatcgactggtacctgggcaagctctcttaagctttggtctgcattgtgcacagcttgctggtgttccaaatgaagtcgtccagagagctggcattgttttggaggacatgcattccaagaaacctacgaggcgcgtgaccagtgagaaattaacagcaacagacaagcagtaccaggatgcagtgactaaactgatggccttcgatacacagaaaggtgacctgaacagcttcttccaggaactatttcccgtcgacttgtagctctggaaatcaagacttgtcgccagcactggaacctagtagaggaaaaagagtgaattccatgtagcgccgttagcagctttacatgtctacttatcgtgcttgtttcagtgttgttcggatgcccatcctgtcaagctatcgcgtgaatggaacggtcagatcggtttgtagttttagcgcatactccgtattgatgtatctgaactctcgtggcttgccgcttggatttacgtatgacacaatggagcgagatgccgaggttacagt

SEQ ID NO: 34120 - DNA, 1781 bp, Zea mays
  Clone ID: UC-ZMFLMO17220D07_FLI
cacggcagtcctccgtttcctcctcgtcgctcgccccggttgtctcctcctcgacctcccccgtcgcgacaccgcccgatctctctagcgcacggcgggccggagaagaggaggaggggggacgatctcattcatcggaccggcgtgcctgtgtcgtctgctgttttcgtttttttctttactcttttttttcctcctttgcttgttcaattcaatcagtatattaagatttctgatttgggggcggctcgccatgggattcggaatggggaataataacaacggggcgagctcctcgtcgtcgcggctggaccccgcggcgccgctgctgccgcgccacggcagcagcgggggccgcgagggtggtggcctgtcgtcgcagcccaagacgttcgccaacgtcttcatcgcggtggtcggcgccggcgtgctggggctgccgtacaccttctcgcgcaccgggtgggcggcggggtcgctgctgctcttctccgtcgccgcgctcaccttctactgcatgatgctgctcgttgcgtgccgccgccgcctcgccgacgagcaccctaagatcgcctcgttcggggacctgggggacgccgtgttcggcgcgcacgggcggttcgccgtggacgtgatgctggtgctcagccaattcagcttctgcgtcggctacctcatcttcatctccaacaccatggcgcacctctatccgattaccgccgcggcgtcctcatcctccgcgctcctctcccccaaggcgctcgtcatctgggcgatgctgcctttccagctcgggctcaactccatcaagacgctgacgctgcttgcgccgctcagcatcttcgccgacgtcgttgacctcggcgccatgggcgtggtcctcggccaggacgtcgccgcctggctcgccaagcccgtgcccgtggtcgccttcggcggcgctggcgcgcttctctacgggctcggcgtctccgtgtacgcgttcgagggcatcggcatggtgctgccgctggaggcggaggcggcgaacaagagcaagttcggcgtcacgctcgggctgtccatggcgttcatcgccgtcatgtacgggctgttcggcgtcatgggctacgtcgcgttcggcgacgccacgcgggacatcatcaccaccaacctcggagccgggtggctgtcggccgccgtgcagctggggctctgcatcaacctcttcttcacgatgccggtgatgatgaaccccgtgtacgaggtcgccgagcgcctgctccacggcaagcggtactgctggtggcttaggtggctgctggtcgtcgtcgtcggactcgccgccatgtacgtgcccaacttcacggacttcctggcgctcgtcgggagcagtgtctgcgtcctcctcgggttcgtgctgccggcctcgttccacctcaaggtattcggcgccgagatggaatggcccggagtgctgtccgatgtcttgctggtcgtgatcggcctcgcgctcgccgtattcgggacgtacacgtcgctgctgcaaatcttccaatcgtcaagcgcttgatcgacgcaccttccgctgcgcgtcgatcatcgcattctccagggcaactacgatacatgtgttgagtgttgttcgtgagtggcttgtattggacgggggaaatctgtacgcttttcgtaccacagatttcagttactcccggtagcagtgtatgtgtatgcgtcctagatgttcctcctgctgtgcacgatgggggatacgatgaaaggacaagattttcacttcgtgg

SEQ ID NO: 34121 - DNA, 1600 bp, Zea mays
  Clone ID: UC-ZMFLMO17223F04_FLI
ggcatggcatccataggcatacatctcctcgcggagcctggggtggggcggtcaccaccatgcctaatcctatcgcaccaaggagtctgtctcgtgctcctcgtagtcttcctacccacccctccacccccccccccctttgcccccaatccctagccctgcccctctcctccagcgccgcgcgccggctctatgcgcccgccgcccccggagatgcatatcacacgccgccgttaccgctgggtgaaggagtgggtcccgcaagatctggtcgtcaccggaggcccctgcacgctctacaagtgggtgcgagaggatagactggcagctttgaaggctaaggataaggagcagggggcagcatctgcaatgcctgaaccaaactctgaggttctcttcctgtgcagctacgaaggatgtgggaagacattttttgatgtaggggctcttaagaagcacgctcatgtccatggggagaggcaatatatctgccactatgagaactgtggcaagaaattcttagatagctctaagttgaagagacattttcttatccatactggagagaagaattttgtgtgcccacatgaaggttgtgggagggcattttcgttggattttaatttaaaggcacacatgaaaacacattctgcagataactatcatgtgtgccagtacccagaatgtggccgaagatttacacaagaatcaaaactgagagctcatatcagggcacaacatgagaaaaatccaggtgcgtcatcaatgaaccacagtgcaattggaggtccgcaccagccccctaggccagcgaaggtctcagcagcacctccagctccctcagctgagcgcccttacgtctgcccctacgatggttgtgacaaggcatacatccatgagtacaagttgaacctccatctgaaaaaagagcatcccaaccactaccaggatggtggtccaaatggtgctgccgccccttcaaagcgcagcatctcgaagagttcccacaggagcaagctggacatcacctctaggatgccaccggccaacatccccaagcacagagggtatgcaacaccattgccagctgtggtgagcctccctgaggagcagcagttgctaaggaaagtggtgtacgaggatgacagcgaggagactgaagaagagggggataacaatggcgaggacagatggaactacaagagagctgctagcagcgacgacgaggaaaccgaagacgaagaatgagctgctagcagggattcatttttttttcttctgtagctgtgcatataccataatctatagactggtggttatagatttcaatacatgtacatttttaaaatacggctggcctatagtagacaagaggttgttgctgccatgccccttctcaactacacaggccatgagttcagaaaggataatggatcattgctcccgtctgcctgtgtttgtgccttttggtttgttgtcataaatgagttctcagttatcgtagccctgattgagtggatgtcaacagatctcgtcaaccgtacatttgtatgagcatgccatgtttactttgagaaatttatgcatccaccggtttcag

SEQ ID NO: 34122 - DNA, 2536 bp, Zea mays
  Clone ID: UC-ZMFLMO17223F11_FLI
atttttactacagaggagtgagtagaagagtgtcttataagttgcagagtagaaacatattccactgatacacaaaatcattttctgtccacccccatgaatttgagatagtcttatatctgaactgtggaaagtggcggaatatcaaattccaagccaaatagactactttattaagtaaatttcaattccttcaaaatgaatagatccaaatggcccatgaggtaaatataatgaacttgattggcacaaatttgtcatttggttgcactgatttgtgtaacggtttaataccatctttcaagcgggattttagctccttattacagatctgcaagctaccaactcgagttatttgcatctgtatgttgattaaaagaattactttacaatcttctacatgatgattagattataattcttttgcaaccttttatgtgttaattacaagaactatcttgtgtttatcctccatagtgtcatttggttgacacacctttaatacgctgttaaggcgagcttcaaaattggaacatgtggattatcagttcataaagaaacatctgtgtgaacagtttaatgagttcactcactttccactgtgaatattatagatttaatcactttgttactggcgcatgaatgaatgcctgttagctgtgctcctttctgatctctttctctagacaatccttacaaagcctagaaatgcattgattgatttgattctgatactttaataacagcttgatgtcataattttacccaggagtgatgataaattcatctgcattatctgtactagcaggttgaaaggttttgaacatgtacagttgtgtgctagactgctagtacccttgattcattgttattggttattgccgacaaaaactttcttgtagttgtaagcttttctgtatgtttgtataaatattaattttgtttggcgtagagatcagacaacctttggctgccactttcaatttaagatcatttcactttccagatatattggtgcatgcatttggttttactataatgtttcacatgtggtattaacagttgacgtatgtgtgcgcaggtattttctgctttcggatttgttcataagatcgctacctttgagaaagcatctggttatcaggctttgattcagttttctgatgctgaaactgcaacatctgcaaaagctgcactggatggtagatgcattcctagctatttgctaccagaactggatgtggcctgcactttgagaataacctattcagcacacagtgttctcaacgtcaagtatcagagccacaggagtagggacttcactaatccttaccttccttttctggactctgctaaagatggctctggaccggatggaaaaaaacaggaagcagagagcaatatactgcttgcttctattgagaacatgcaatatgttgttacaatagatgtgcttcatgaggtcttttcagcttttggatttgtacagaagattgctatttttgagaagaatggctttcaagcattgatccagtatccagacattcaaactgcgtatgcagcaaaagaagcactagaagggcacagcatctatgaaggtggctactgcaaactgcacctcacattttcacgccatactgagcttaatgttaaggttaacaatgagcgaggtagagattataccaaggggaatgccacaccaagcagtgatcaaccttccattcttggtcctcagccaataccaagcgttggtgctgctattccaccagcacagggtagtgttccttctgcagccaccaattcagtaatgccaccaggggatccatcagttgctctaccttctaatccttccagtgagccactcctgcaagcacctgttgtttcctctggagggcctccgcattaccctaatcaggccatcctacaaggcccacttggtgttgctgcacggttcccaggctatggtgccctgcagtttgctcagggctcagcccaagctcaaatggtgcagccttcaggccaaggaagtcaacagatgtcaggtcatgtaaattatcagctacctccaggttcagcccaattcttgcagtatctcagcaacggaagccatccacttccaaacgcacctgggccacagacaatgccttaccctgccctcagtgggcagcagctacctccgggtcttcagatgatgcaagctcaaggtttcggaggcctgccgttttcacagggtcctggacaaccaatgccacagttcccaatgtatggcacccagcagtttcctccgggtatggagccccagatgatgcgcttctctgagcagggaggccagcagtttacatttgcgccacggggtccaaatagtcgttagcaatttgaacttagcaacgttagatcgttgatggtgatggatggatgtgaagccttctatgtttgctgttttgtaaggtgaataccgatgctgttccattactaggatctatacttggccaaaacaaatgtctaatctgaggtttcgtagccttgtatttgtatc

SEQ ID NO: 34123 - DNA, 1643 bp, Zea mays
  Clone ID: UC-ZMFLMO17263H05_FLI
gccgccccctctaatccctcctccgcaaggcagacagaggccggcgttcactcgggcatccgcgggacggacggggagcaaagcctcagcggcgagtgcgggcgatgaggtcttcggaggcgtcgtcgcggctcgtgcaggagctcgtgctgtacgccgccagcgccgcgctcagctgcctcgtcctcttcgctggcctccgccacctcgaccccaaccgcgccgcttcccagaaggcgcagcagcagaagaaggagatcgccaagcgcctcggccggcccctcgtctccaccacgccctatgaggacgtgattgcgtgcgacgtcatcaaccccgacagcatcgacgtcgaattcgactccatcggcggcctggaccagatcaagcaggcgctctacgagctcgtcatcctgcccctgcgccgccccgagctcttcaccttcggcaagctcctcagcccccagaagggcgtcctcctctatggcccgcccggcacaggcaagaccatgctcgccaaggccatcgccagggagtccggcgccgtcttcatcaatgtcaggatctccaatctcatgagcaagtggttcggggacgcacagaagcttgtggctgctgtctttagtctcgctcacaagctccagcctgctattatcttcattgacgaggtcgacagtttcttggggcagcgacggacaactgaccatgaagccatgactaatatgaagacagagttcatgtccctctgggatggcttcaccaccgaccagaatgctcgtgtaatggtcctggctgctacaaacaggccttctgagctagacgaggccatccttaggcgctttactcagatatttgaaattggaattcctgttgagagtgaaaggagcaagatacttcaggttgtgttgaagggagaaaatgtcgagcataatattgattatgatcacattgcaagtttgtgcgagggctttactggatcagacatcctagaactgtgcaagcaggccgcattctatcctatcagggagctgttggacgatgagaaaaaagggaggaaattagataaacctaggcccttgagacaatcagacttggagagagccttgtcaatgtctagaaagggcaagaaggctgcaagttcagcactgcagtcacctttgtgggtacggccgacaaattcagaagacgatcaggtacagaacgccatctttgagatatctaagctgatgtctcgaatagttcagaacagtgagtcggaaccgcaagagccttcttcaccttaacctaatccttttgctagatctcgtgaaaatctgcagcggagtaaatgcaggcattacgtcgataccgttaggtttccttatgcagtttgcagaggttcaacatatttatatatgtattaattcgttttgcgtttggaacctccaccggtttttttgaagcaaactgcagctggcgaagtggcaagcgtgccctcgtgtttaagttgatcatttcaaaatacgtgccccctgtgggccgtaaaactgagaactctatagttgtctggtcaacagtcggtcttggttgcctctgtattttatcttcggtttgactactctagggtggcgaattacaacatacagtataatgcagaaaggttcccc

SEQ ID NO: 34124 - DNA, 2454 bp, Zea mays
  Clone ID: UC-ZMFLMO17275G09_FLI
cactcctccggctcttcttctccaccggcaccagtccaccacctcctgccaccgcgcggccccaaccaaccacaccgcagcgcagcaatggcgggcaacggcgccatcgtggagagcgacccgctgaactggggcgcggcggcggcggagctggccgggagtcacctggacgaggtgaagcgcatggtggcgcaggcccggcagcccgtggtcaagatcgagggctccaccctccgcgtcggccaggtggccgccgtcgcctccgccaaggacgcgtccggcgtcgccgtcgagctcgacgaggaggcccgcccccgcgtcaaggccagcagcgagtggatcctcgactgcatcgcccacggcggcgacatctacggcgtcaccaccggcttcggcggcacctcccaccgccgcaccaaggacgggcccgcgctccaggtcgagctgctcaggcatctcaacgccggaatcttcggcaccggcagcgacgggcacacgctgccgtcggaggtcacccgcgcggcgatgctggtgcgcatcaacaccctcctccagggctactccggcatccgcttcgagatcctcgaggccatcacgaagctgctcaacaccggtgtcagcccctgcctgccgctccggggcaccatcaccgcgtcgggcgacctggtcccgctctcctacatcgccggcctcatcacgggccgccccaacgcgcaggccgtcaccgtcgacgggaggaaggtggacgccgccgaggcgttcaagatcgccggcatcgagggcggcttcttcaagctcaaccccaaggagggcctcgccatcgtcaacggcacgtccgtgggctccgcgctcgcggccaccgtgatgtacgacgccaacgtcctggccgtcctgtcggaggtcctgtccgccgtcttctgcgaggtcatgaacggcaagcccgagtacacggaccacctgacccacaagctgaagcaccacccggggtccatcgaggccgcggccatcatggagcacatcctggatggcagctccttcatgaagcaggccaagaagttgaacgagctggacccgctgctgaagcccaagcaggacaggtacgcgctccgcacgtcgccgcagtggctgggcccccagatcgaggtcatccgcgccgccaccaagtccatcgagcgcgaggtcaactccgtgaacgacaacccggtcatcgacgtccaccgcggcaaggcgctgcacggcggcaacttccagggcacccccatcggcgtgtccatggacaacgcccgcctcgccatcgccaacatcggcaagctcatgttcgcgcagttctccgagctcgtcaacgagttctacaacaacgggctcacctccaacctggccggcagccgcaaccccagcctggactacggcttcaagggcaccgagatcgccatggcctcctactgctccgagctccagtacctgggcaaccccatcaccaaccacgtgcagagcgcggagcagcacaaccaggacgtgaactccctgggcctcgtctcggccaggaagaccgccgaggcgatcgacatcctgaagctcatgtcgtccacctacatcgtggcgctgtgccaggccgtggacctgcgccacctcgaggagaacatcaaggcgtcggtgaagaacaccgtgacccaggtggccaagaaggtgctgaccatgaacccctcgggcgagctctccagcgcccgcttcagcgagaaggagctgatcagcgccatcgaccgcgaggccgtgttcacgtacgcggaggacgcggccagcggcagcctgccgctgatgcagaagctgcgcgccgtgctggtggaccacgccctcagcagcggcgacgcggagcgggagccctccgtgttctccaagatcaccaggttcgaggaggagctccgcgcggtgctgccccaggaggtggaggccgcccgcgtggcggtcgccgagggcaccgcccccgtggcgaaccggatcgcggacagccggtcgttcccgctgtaccgcttcgtgcgcgaggagctcggctgcgtgttcctgaccggcgagaggctcaagtcccccggcgaggagtgcaacaaggtgttcgtcggcatcagccagggcaagctcgtggaccccatgctcgagtgcctcaaggagtgggacggcaagccgctgcccatcaacgtcaagtaaagaacgccaaggagaagaggagggaggggaggaaatacgtggaaaaaaaaataaaacctgtacacgtgtatgtccagatcgcgtgccgtcgatcgttcttcgttgttgatttttggttgtattgatcgacccgtatgtgtgcgtgcgtgtgtggcgttgctctttcttcttttgtgtagctgccctgccaccggccgacgtgcatgccatggtggcggacagcgttttctaaggtcatatactgttgttgtgttt

SEQ ID NO: 34125 - DNA, 2064 bp, Zea mays
  Clone ID: UC-ZMFLMO17277A06_FLI
cctgaagttactgaaatcatcatcaatcgttaaaaccgtacacgcctacactgctccttccatgctttttcattcacccaacgttgctctcccaaaggccataaaccactgacacatgagggaggtgttctctatagagtatcgacgacgataacgctgaactgcataaatttggttatatcatctgaaatatagaaatcgggtgcaaatgaaattagttactatttgttcattcaaactatgatgtctgaaaattcaggcaattacagattctcacacgagattatgaggttgtgatccaaatcgacaattatctgttgatttgttcaatgtcttatggctgatcctgttggagtttattgggtttggtccatttactcaacaacttttaaaggccccctctgtttctgaccttaccttgtgcgttgagttcataattgaatccatgaaatcgtggataccttaaccgaactaaatccatggataccgtgactgagttagtttcagttttctatcttttgtgtctggttattatgagtaatttttctgtgtaaagacgattctctcctcgaaagatatgagaaataaccaacctgctatgtggtatggttttaggcaaaaggagcattcggtgttgtgtgattttaggctcctgtcaacactagtgtgacgacgaaaacagtctttgaaatcttactctgctgaagaacctgaagggttattgcttgtcgagttgtgatttgatgatctgtagtgttacgtcaatggacttgaacaatatcgtgaactcatatttgattgtttggagcaatctctgttgtgagtaataatgattttatcgcttttggttttgttagatacatttaagatagattttactcttatttgctatgcgtggtttatccattgtttatatagtggttgtcttagaaattactttaatccttaaaaaggtgtgcaatcttccaacacatcatgtggactcaaaattactctctagttgatttgtctaaatatactgcagctgttcttgttggtttgtcagctatcatcattcttccattattaattattatcaattaaggtttcacaaggtattatgaaagattgttctttcttagtttgtactctatccattctaaattataagtcattctaatattgtttgagccacaagtttgattaaagctatagagaaaattatgaagattcatatcaaatgtaaaatctaaattaataagaatctagtgacatttagtatcataaatgttattattttaatgtacaacttaggttagacttaatatttctttgactcctcaagaaagttggactgacttaccatttaggatggagtatgatttattattgtcttataaaagcctggatcggtatactctgaatatctgagtacctacatgatgagtatttgtaagatgtgtgaaggtcgactgctaggtatacattgtcagtatgaaatggctatcgtcttcagctttctttcctggtcagtggacagtgaaatatttatacgatgtgttaatgtggactgctctgtataaatcgttggtacaaaatggctatggtcttcagcttcatttcctggtcactggacagtgaactgctcaagcacacttagtagatactaggcacaatcagagcttatcgaacttgtgcgatatagttcgtttcagtactccatggttatgatgttattgatcactattgagctgaagcactacaatctgtgacaaaaaaatttgatacagcagcaaccaccgctgaagcttggcagaagggatgaaattaggaatacgaaacccattaggcctgtttggttgttcggtcgattatgtgtttatgttgattttgaatggattttaccaggtcaattcttatagaagcaagctcagaagctgaaaaaagctgaggcccaatatgccatagatgggagatctgttttctttttgttcccgggcaaatatgctttgctctaggttcagcttcttgtcttctatattccaaatttttttgtataataattctctttgggtttaaccattt

SEQ ID NO: 34126 - DNA, 1506 bp, Zea mays
  Clone ID: UC-ZMFLMO17277B01_FLI
aaagaaccccacccgacgtaccgcgagccggcgatggcgacggtggcgatggacatctcgaagccgacgccggcagcgtccggtgacgaggcagcggcggcggcgaaggggaggagcggcggcgggggcgaggggctgcggcagtactacctgcagcacatccatgacctgcagctccagatccggcagaagacccataacctcaaccgcctcgaggcccagcgcaacgacctcaactcccgagttagaatgctcagggaagagttgcagttgcttcaagagcctggctcatatgttggtgaggtggtgaaggtcatggggaaatcaaaggttctggtgaaggtacatcctgaaggcaaatatgtggtggatatagataagagcattgatatcactaagatcacaccttcaacaagagttgctcttcggaatgacagctatatgctccatctgatcctaccaagcaaagttgatccattggtcaatctcatgaaagttgagaaggttcctgattctacctatgatatgattggaggccttgaccagcaaattaaagagatcaaagaggtcattgagcttccaatcaaacatccggaactgtttgagagccttggaattgcgcaaccaaagggtgtccttctttatggacctccgggcacaggaaagacattgttggcacgtgcggttgctcatcacactgactgcaccttcatcagggtgtctggttctgagttggttcagaagtatattggtgagggctcccggatggttagggaactctttgttatggccagggaacatgcaccgtccattatatttatggatgaaattgactctatcggatctgctagaatggagtctggaactggcaacggtgacagtgaagttcagcgtactatgcttgaacttctaaaccagcttgatggttttgaagcatcaaacaaaattaaggttttgatggcaacgaacagaatagacattttggatcaagcccttctgaggcctggccgcatagacaggaagattgaatttccaaatcctaacgaggattcacgtttcgatatcttgaagatccattcaagaaaaatgaacttgatgcgtggcattgatctgaaaaagatcgcggaaaagatgaatggggcctcaggagctgagctcaaggccgtctgcacagaggctggaatgtttgctcttcgtgagagaagggtgcacgttacccaggaggacttcgagatggcagtggccaaggtgatgaagaaagacacggagaagaacatgtccctgcgcaagctctggaagtgaggctcgtgcccacctttcacggcctccccgaagctagtggcagtgccttcatatccatatcttttagcaaagcagtggaatggtgtaacggcatgctctggacaatgttatctcaagttgcgccgcgcatgcttatgtttaaagttttccttataacgtctgtagtgtgttgttgcaaagttgattggctttatcagatcagct

SEQ ID NO: 34127 - DNA, 1256 bp, Zea mays
  Clone ID: UC-ZMFLMO17282E12_FLI
aatcaaaacggcacgaggttccattacttctcaaaatagctgtggcctgtagcttctttcattgtttcaaagcattacaacataagcagcaaaaccagaaacagtcctcataagcaccacttattagggcagtacaacacaaacgataagcgcggtgcagatcaagaaagaaccacaacatgtagaagccatataaaagcatgattaagcacagcagaccaccaaaagcttcttactgaaaaaaaggccgccttaggcagaaggtttctccgacttgagtggcttcaccacctcccaggtgaagtcagggtcgtcccttccaaagtggccataggccgccgtcttgaggtagcgcccgttgccgcctttcttgaggtcaaggttgatgatgatcatgccaggcctgaaatcgaagttctccttgacaatcttgaggatctccttgtcggggatcgcgccggtgccgtacgtgtcgacgaacacggagagaggctcgggcacgccgatggcgtaagacacctggacgatggcgcggcgagcaaggccgctggcgacgatgctcttggcagcctgcctcgcgacataggctccgctgcggtcaaccttggttgggtccttgccggagaaagcgccaccaccatgggctccccagccaccgtaggtgtcaatgatgatcttgcggccagtgagaccagcatcgccgtgaggtccaccaatgacaaagcggccggatgggttaaggtggaagatggtcttctcgtcaaggtactgctcagggatgacaggcttgatgacatgctccttcaggtcagcagcgatctcatcattggtcactgtctcgtcgtgctgggtggaaatgaggacggtgtggacacggatggggaccatggcaccaccctcattgcggtactcgactgtcacctgggtcttcccatcaggcctgagccaggggcaggttccgttcttgcggacctcagtgagacgagcacctagcttggtggcaaggacatggctgaggggcatcaactcaggggtctcatcggtcgcatacccgaacatgtgtccctggtcaccagctccaatctcctcgggacgcttggtgaagtggccatgcacaccaaggccaatgtcgactacgagaagattgtcagggagacctgccgcaacattggttttgtgtcaaacgatgtcgggcttgacgccgaccactgcaaggtgctcgtgaacattgagcagcagtcccctgatattgctca

SEQ ID NO: 34128 - DNA, 1103 bp, Zea mays
  Clone ID: UC-ZMFLMO17289B12_FLI
gctttcttgtctgtcacaatgcccactacgttccatccaggttttctgattcatgctatcaaagcaaaacgttatagatattgaatatgttgttctggactgcctttgcttttctgacattttacatcgtaattagtagctacaaacctattaatttcgactattgcatcacggggattgcagaatacttctaatactcagtgcatgacatgaaacctgcagttgcggtcttaaaaaaaactgacatactgtaggcatgttttcaatatccaggttattgctgaaagcctgtctgaggaagagattggaggcctcaaggagttgttcaagatgattgatactgacaatagtgggactataacatttgatgagctgaaagatggcttaaaaagggtaggctccgaattaacagagaacgaaatccaggctctaatggaagcagctgatattgataacagcggaaccatcgactatggtgaattcatcgcagctactctgcacatgaataagctggagagggaggagaacttggtttcggcattctcattttttgacaaagacggaagtggttttataaccattgatgaactgtcacaagcatgtcgtgaattcggtcttgatgatgtccacctcgaggatatgattaaagatgttgaccagaacaatgatggccaaatcgactacagcgagttcacagcgatgatgaggaagggcaatgctggtgcaacaggaaggagaaccatgaggaacagcttgcacttgaatctcggcgaactcttgaatcccagcaaaacctagcgtgcattggaaggtcttgtcgggtacattcccatggcatatgaagattttggatgcgttgtcgagcggctggcctattctgagatgttgagcggttgtcctgtggtattactaagatgctgaagaattttcctagaagtacaactgccctgcggcatatatgtataactgtcgatgtaatgtagattgaaaatggtctaaacattacttccctagaagtacaacttctctgctgtcaagtgtgtgtttagttgatattgaatagcaatttctttctctaatttcattgatgatgactctttttt

SEQ ID NO: 34129 - DNA, 1551 bp, Zea mays
  Clone ID: UC-ZMFLMO17289G09_FLI
tgccgtctctcttccaccttccaccacaagcgccgccgcagccggtgcctgctccttcccgatccccgaggcaaagctgcgactccgcaaccgccgccatggcgttcgagaagatcaaggtctccaacccaatcgtcgagatggacggtgatgagatgaccagggtattctggcagtctatcaaggacaagcttatcctcccatttctggacctggacatcaagtactatgatttggggatactgcaccgtgaagcaactgatgacaaggtcacagtggaggctgcagaggctactctcaagtacaacgtggctattaagtgtgcgaccattactccagatgaaactcgggttaaggagttcaatctgaaacacatgtggaagagcccaaatggcacaattaggaacattataaatggcactgtgttcagagagcctattatatgcaaaaacgttccaagacttgttccaggatggactaagcccatctgcattggaaggcatgccttcggtgatcaataccgagctaccgatgcagttctgaaggggcctgggaagctgaagctagtttttgagggaaaagaagaacagattgatctggaggtattcaacttcactggtgctggaggagttgccttgtctatgtacaacaccgacgagtcaatccgagcttttgctgaggcttctatgacaactgcttatgagaagaaatggccactctaccttagcaccaaaaacacaatcctgaaaaaatatgatggcaggtttaaggacattttccaggaggtctatgaagctgactggaagtccaaatttgaggctgctggaatatggtatgagcatcgtcttattgatgacatggttgcgtacgcgcttaagagcgaaggaggctatgtgtgggcttgcaagaactacgatggagatgtgcagagtgatttcttagctcaaggttttggatctttgggtttgatgacatcagtgttggtgtgccctgatggaaaaaccatcgaagctgaagctgcccatggcacggttacccgtcatttccgtgtccaccagaaaggaggcgaaaccagcacgaacagcattgcttcgatctttgcatggacaagaggacttgcccacagggcaaagctcgacgacaacgctagactactcgacttcgctctcaaactcgaggctgcttgcgttgagaccgtggagtccgggaagatgactaaagatctggcgattcttgtccatggatcttccagcgtcacgagaagccattacctgaacaccgaggagttcatcgacgcagtcgctactgagctccgatcaagactgggagccaactgagcctacaagaaactttgcatggcgactttgaatgcttcgtcaccgtcaccgatctgctagtcgtcttttctgttatgaagaagtgaatgtgcgtcaccgcagtttcgatgcaagctaattatagatgtggtgtcacgtgagcgctcaaaataaaggatacacatgattaaattgtttttatgtcagtactaagctcagtcatcccccccccccc

SEQ ID NO: 34130 - DNA, 1432 bp, Zea mays
  Clone ID: UC-ZMFLMO17289H03_FLI
atgcattaaggattgtgatgatcagcgtaaccaatcatttcccttcatttgaagcccttgctttggttcagatagaacggacactagaggatatatcacagaaactgcaactggttcaacgtctccatactcgctttctcttacttcccaatctccaagatgttacaagaaccatccagcatccttctattcatgaatggtcaagcaatggaatgcaccgaagcatttgtttcgtcaacaaagctacgggttatattctaatcgcagagcccccaagttttttgacgatatatgatgttatcgcaattattgttagtcacaggttaggggcaccaatgatcttgccgattgcctcagtgtttgcatgcccagatggttcagagaaagaagtccttcaaattcttcacctgggttcagactttggagtttcaaaacgtgaagggagatacgacgcttcccttggagcacaattgttatctcaggatgctcggcaggtgcaattccttccattaagaccgttctatagtggtgaaattgtggcatggaagacaggcaaagagggggaaaagctcaggtatggtagggtccctgaagatgtaagaccctcagctggccaagcactttacagatttccagtagagacagctcctggcgaaattcgcatgatgctttccagtcatgtttactcatttaaaagtgtttcaatggctgatcttctatctgcaccttcccaagtgaatggtgatgtggcattaggtggccaagagaaactcttggccaccaacactggcactgaagtcaccaaggatgcggatgctggacttgaatatggaaaagtatcttccactgaactggtacaagcagtccatgatatgctttcagctgcaggagtaaggatggatgctgagaaggaaacactctttgaggctactctttccttgcaagatcagcttaaagaatctcaagttgctctcttggtggagcaggagaaggcggaggcggctgtaaaagaggctgacgtcgccaaagcagcatgggcatgccgtatctgcctgaatgctgaggtcaacatgaccatcataccatgcggtcatgtcctatgtaaccgatgctcaagttcggtttcgcggtgcccattttgccggacgcaggtggccagaatgatgaaaatattcaggccataaaaaacatcgaaggacgtttggtctgactaaccgcttcagcttgtgaatgtgttacgatatcggggctcggctcccttctggttgtgcgctgcattcctttctggtctgatgcatctcattattctccatcggtgatgattggtaatccgataggggggtgcatgtatagttacgttgtacaggaacgatgcactgcagtgtacagattccaaaatgaaatcattttacacacttcgaagggcatcgat

SEQ ID NO: 34131 - DNA, 1171 bp, Zea mays
  Clone ID: UC-ZMFLMO17289H04_FLI
ttcagaaatcaggctatgaggtgtacttgctggaggcaccatacaaggatccaacgggctgtgctgcaaggaatgtgcatggatttacattggatgagataaaaaagatggcagcggactgggaggaggctccaccattatatctgcagctagatatacattcattattccatgatgataaccttcgtggccattctatacaagaggtagatatggacactgaggatgttgatgatgctaatgacgcaactagcatcattgctgagagctcgcagaaggctgtacaggatccaccaaacgaaggcttctcaaagccaggggaggagtggaactcagaagtagaagatggcctggatagtttaaaagaactaggacagagtaaatggtcaaaagattttgaggatgaaaccacaaagtccgagaatacagaggaaaacacacatgctctttctggcctggcccggacatatagcacaggacgcaaaaatgtcagttggggtgatcggcttgaaaagggtgggttttccatttatgcaactaaaagaaaacttacttcgtcactaatcatagggcctggatcagggtacaatttggtatccaaccccttggctgaagatagttccacaggtacaaaagggaagacgaataacgagaccaaaaaacggttcagtgaacaacttcgtgacgaaggtgaatccttcagggcagtttttgacaagacaaagcagcacattggagtttttgagaatggagatgaggaataatccttgactagaggttcttttagttgtttgcccttaagcgttttggatgctcaggatgatacttcacacttacggaggggactagtgcagacagcttggagtcactttttcccccttccgcttgtcatcctgcagcaagtcacaatattgagccattcagtgaatcgtgggatcaatattctttagtccaatcgccttcatcaagcgcaatgagcaatagttccaatgtgccgttcaatgaaagcaatgcggatttttttggttcatgggcttgttgtccttgtaaagacaactcacacatgccacaaagatgtactgtacctatgtatcaggcacgcacactgaatagtggccatcagtttttacatgtttctgttatatatgtgttgttgttaccacgagaaact

SEQ ID NO: 34132 - DNA, 279 bp, Zea mays
  Clone ID: UC-ZMFLMO17290A09_FLI
accctcgatagggagggtcgtcccaatggcctttggtcgcagaccaactttgctgcctccctatcgagggtcgtcccaatggcctttggtcgcagacaagcagcaaagttggtctatgctgagaataaatgtgaacggtgcccctggacgctggatccatgctggttttggacacggttgtctttttgtgttttaacttatatgctgccgtcctgtaacgaattcgcaagttttagttcttttgtgctttgttaagaataaacaatgaggtttcagttt

SEQ ID NO: 34133 - DNA, 1635 bp, Zea mays
  Clone ID: UC-ZMFLMO17290A11_FLI
attttattcaatctccatctggatgcgtgtgtgtgaccggtgagcgagacagattccacagcaatttgctcctcttccacgcacaggcaagactgctccccagaaaagattgtagttttcatcgatttagccggtttctgcccgggggatcgctgctggagatctcagagaaccgggaggctccgagcttttgctccgtttgcgtcgaatctgcctcgggagcggagaaaggagcggccttccgagctcgtaggggccgtccctgagaaggcgagaggggacgcggcggcggcggagtcagctctagggcgctcgtggaagtcggtgatgccggtggtttgaggacgaggcggcctcggtggttttgaggaagccagcctctgccgcggcaaggatggactccagcggggaggaactcctgaagaagatccgggaactggaggttgggcaggcgcagctcaagcaggagatgtctaagctaatacccggcgctggggagcgtcggcgctcgcaatccgtctcgccgcggcgcggcgtgccggtgccgccgccaccgccggccaaggcgaaggcgggggcgccaggtaggcggctgtccggggggtttgagggcgggcagcgcgcgtgggcccgtgggtcggcgtctttcccgcactcatcaccgctgcagcgggagggccgcgcaacgggcgctggagacgctagcaccagcgctaggctgccggagaggcagtactccagggtgcttcagtcaatggggcagtccgtccacattcttgacctcgacgggaggatcatatactggaatcagtctgcggagaatctgtttggctatcctgcatcagaagcccttggtcaggatgccctcatgcttctggttgattcccatgaccacaatgcggtaaataacatcttccaacgtatttctatgggtgaaagttggactgggaagtttccagttaagaacaagcaaggacatagattttcagctgttgccaccaatacacctttctatgatgaagatggcagtttgatgggtttcatttgtgtttcaagtgattcccgccaattggagcagatattttgtaagcctccgacctctgcaaggtcccagtcagaatcatctatgacatcttgtgatgggagttgcagcaacactagtcacagaatcaattatcctgagctgctgggaaagcgacccgcagcaacggccgtcgttccaggagcttcttgagaggctccgggagctgcagaggcactacgccatccagcaccggaacacaaagaacagcatcgaggagtaaagaacacaatgcgacctctcagagcgctgtggcttgcttcgaagcattttgcgagcgaacgaacgaagaaccccaggtctctagaagggcctggaccctcctgtactgtatggttttgcttctgcggaacagccaaggctggaagaagtttgttgtacagacgggggtacgttcttctttgtttgacagggcaattgtgactgtaatctctgggtcctgacacccaagggtagggtagagactatagagtgagtagtgactgagctccggattgctggcgcatttgggttcttctgattcgtggcaatgcaaatgcgtggttaacaataac

SEQ ID NO: 34134 - DNA, 867 bp, Zea mays
  Clone ID: UC-ZMFLMO17290B02_FLI
tgggcgtgcagtactcggttccagactacgtccacatatctccggaatgccaggacctcatctccaggatcttcgtcgccaacccgtccaccgtgagtagttccggcttcgtgatgtcgttcacgagcctgcctttgagcggatcgctgacatgcacagcatgacacgccgtgtgcagaggatcaccatgcccgagatacggagccacccttggttcctgaagaacctcccggccgacctggtggacgacagcgcgacgacgacgagcaagcagtacgaggagcccgagcagccgatgcagggcatggacgagatcatgcagatcctgggcgaggccaccattccggcggcggggtcccgcgggctcaaccagttcctgaacgacggcctggacctcgacgacgacatggaggacctggactcggacgccgacctcgacctggagagcagcggggagatcgtgtacgctatgtgacggcgccgagtgctcagcgacgaggcaatgtctcgttgcgctcgcaggttgccgagataactagagagacggagagggtgggtgtgtgctgctgctgcctgcagcctgcgtgtagttgtgtgctttcaggtctctgctgctcatgcctgatgccgtcgttcgtgatggcccctttttaccgtcctgttgtgtttggccgttgttatttggtgcgccttcagtgcagtgttttgcaacggtttagccatttggaatcgctactgctacaacctcgttcatccgagaggaccctttgtttctgcatccccagcgatgtacttgtattactacactgtatcatatgttatatttggtgtaggaaaataaaggaactccattgcccgttctctgtc

SEQ ID NO: 34135 - DNA, 1086 bp, Zea mays
  Clone ID: UC-ZMFLMO17290C02_FLI
gagagtacttttgtgatatatgcaaattttatgatgatgatacagacaaagggcagtaccatattgactccacagcttatgcacacttgtgacaccggctgttttgtttcacaggtgtgcataagctgtggagtcaatatgggagagtacttttgtgatatatgcaaattttatgatgatgatacagacaaagggcagtaccattgcatcgattgtggcatatgcagggttggtggcaaggaaaacttcttccactgtgtgaagtgtgggtcctgctattctgttatactccgtgataaccatcagtgtgtggagaactcaatgaggcagaattgcccaatctgttatgagtatctatttgactcattacaaggaacaagagttctgaactgtggacacacaatgcacttgacatgttttgaagaaatggtggcgcataacaaatacacttgtccaatatgctctaaaacagctcttgatttgacacatcattgggaaatgttggatcaagagatcgaagccacgatcatgcctcttgtgtatcgctacaagatttgggtgctttgcaacgattgcaacaaggtctcagaggtgaactttcacgtgattggccacaagtgcagccactgcagatcgtacaacacccgaacaacatcgcgccctgcagatttatccggaagcagctcaccttcaacagactcatccgacaacaacatatagagaagaaaccattgacagagccaatatgattgaagaaccggaggaggaaacattgtttcggggcgtgcgtgcttgccaaacttgaagactcccagccgtttattggccctcatcttgtctagattcagttcattccatgagtctttgctgttctggcaacttccagcttgcgcatcgctgggtcaacaacccacatggccggcgtagctgtccctttgaatcttgttcgcagccgtgattttatcactgtggatgaaacgtaatcacatacttactgtaatctactatggttgaagatgtgtgcccccctgactcatgccttgtgtgcttgtgctgaactgtttatgaattcccatgctgttccgt

SEQ ID NO: 34136 - DNA, 1421 bp, Zea mays
  Clone ID: UC-ZMFLMO17294E11_FLI
cttatctttggcccagatgtgaggtcactcgtgctcacagtatgtttgattgtagtcccagtgatcttctttgctgccaccgtttgtccacaacttggtcatgagttccacagccaaattggaggttgggtggcatctgtggctgtcatctttacagcatatattcttattgttctacttatcacatctggccgtgatcctggaattgttcctcgaaacactcatcccccagagcctgaagacatcgatgaatcctccaacttaccagattgcccgggtggtcaacaaggttcgacaggtttaccacctacccgggatgttcttgtcaatggtgtttcagtcaaggtcaaatattgccatacatgcatgctttatcgtccgccaaggtgctcccattgctcaatctgcaacaactgtgtagaacgttttgatcaccactgtccttgggtaggccagtgcattggcaagaggaattaccgattcttcttcatgtttgtgtcttcaactactgtactatgcatatacgtgtttgcattctgctgggtcaatctcaggagaattatggacacgcatcaatgcaaaattggtagagctcttttgaagtctcctatctccggtcttctcatcctatacacatttattgctgtgtggtttgtaggaggattgacctcattccacctctatttgatttctacaaatcagactacttatgagaacttcagataccgctatgaccggagaacaaatccttacaaccttggagtgggtcagaatttcatcgacgtcttgttttcaaggatacccagctcaaaacacgatttcagagcaaaagttaaggccgattcttcgaccttcgcgtcatccctcagtatgggacgggttctaagcccgcccaagacgagcgtggaccttgagatgggcatgaaaaggcaagcggtggccgcagaggacttggaagacttgcacagccagatcggcagtgctatggggctggagagatgtggcaccgagccgccgcattttgtcggccggaagggctgctctgagatgtcacctgacatagaggtgttcgcagaagagtttggcatggaaggtgggcacagtgagaggaaaaagattgagcggcggacaaatgatgattcgtaggaagtttcccacgtcacaaaccacctcttcggccttcctccaggccccaaacttggtaaaagcttgcaaagaagaaagtgaagtaggacaaaacggacggtagagtgaatcaggcattggttagtttgttttggttgtcatttctagccaagacttgagttagaagtgaaagatgttccttgacgatatagaaatgatgaatccacatctggtttggacttcttagtctatgtgatatattggatgtgtggtgtggcagtgttgcttctgatttt

SEQ ID NO: 34137 - DNA, 2251 bp, Zea mays
  Clone ID: UC-ZMFLMO17294F04_FLI
gccgcggtccccccttccccacccactagagaccgtgcccttcccccttactcggcaatctcgcagcggtgcccgccccatccccgcggatctccctgtcaccttcaaccaccttccatccctcgtgacctgttcatgccgtcgcctcgatcctgtggatctccctgccgcctcccacgtccgtgctcacgacctgttccgcgtccgccgtcacccccagatcgcgcgaggcccatgtccacgcagtcgtcgtcgccgccccctggccacgcgagatgccagcgccccctccacctttcgtgagcgaccccttcatctaccttcaccaccatcttcaatccgcctctgcatcaccgccaaaaccctagccacttccctgctgcccaacaatgaatccgcctccgcaccaccgccaaaactctagcaactatggcagtgaacaacattcggtttcaagtctttggcagctatgctcatggaaaatacgtctatgttgatggtgaccgatctgttctcgcagaatcagcaaaggcttgatatcattgctgttttgctttatcatttgggcatttgaagcaaagctctatggagaaaaggcagggaaatgttttctttctcatttttgcaggctgacgaatttaatgcagtggctagagttggggttgctgctgaccatcgtggaatcatctgcagttgtcgtgtgtccacactccctaacatgttgagcctcttgctgatcagatcaggcttgagaaggaaaatttggttttaataagtgttcttgtctggttcgattaaagaaagattcagtaattgtcttttttaggaacatagattcttcatctgtgtataatgtatttttattatctagattgtgatagttatttcaaggcctggtgatcgtatagcttgaccattgattgatgattatctgctgtcttaaggaatggtacattgtatgtgttctttggtgttggtggtagtttgctgacttctctatttatggtatcaaatatatctattgagtgttggtacttcaggtgcactatttagactattgggatcaatgctgtcagagctcataataaattggacgatatacgagaacaaggtcaattctaaaatatatgcagtattgcaatagtggatggaaacagaacaaaatagttgttccttgcaggtattgcaatatctcaaaccagataaaagtaaatttttactcaggtattttcacctatcttattacaattcatcaaggtattttcacctagcttattacaattcatcaatcttgcttcactacccatggtaacttgattattttcatgcactaactttttgacgtcctatttcttttcttttcccctttcacctcaaaacacacattttcatctcaaagcactaattaccagatacgccaatgtcatttaaattaattttcagcagtgctattattttttctgctatttgttttggaccgattaatatcttgtgtactctttttatttattcgtgggactgtaactgcaaagcttgtaactcaagtcatatgtgtcttgtgcctgttgttgtagctatggagcagaaaattcatgtgaacccactgaagatactaagcgaaacgaagtgtacacatattcagaattctagctcaagttgccctaatcaactgaggaggataaggatgtcgtggattttgagagggaggagcctgccaaatgccagaagtctgtgcaagctgatgcaaatgcgaaagaacatcagtgaagacattcttactgatttactaaggctgttggcttcttcgggaggacattatacaccacattaattctgcttgttgcgagccttccagatgtgtatgagccatgtgatgatttctttgcccttgttgatgcactactctcagacaaagcacaacttttgacactacaaccaaggttatgtatgtagacgatgacactatcatgcaaggcccactatcctctttgttgtcctctcatggatcctggtccagtggtggaggctgaggaatcagaaaggccccagatcatggccagtcatcgacgcaacggtggagcttatggctggaagtaatatgaagagtctatatttgacaaaaaatcatctaaaattaaatagtgagataaactttgaatagctgatgtaaaattatggagtaacattgtattagttgttgacaaaaaatgtgagaaatttaggtcaataataatatatgtattgtttgttt

SEQ ID NO: 34138 - DNA, 626 bp, Zea mays
  Clone ID: UC-ZMFLMO17294F09_FLI
ccaaggtggaccgcagcggcgcctacgtggccaggcaggccgccaagagcatcgtggccagcggcctcgcccgccgctgcctcgtgcaggtgtcgtacgccatcggcgtgccggagcccctgtccgtgttcgtcgactcgtacggcaccggcacgatccccgacaaggagatcctcaagatcgtgaaggagaacttcgacttcaggcccgggatgatcagcatcaacctcgacctgaagaagggcggcaacaggttcatcaagaccgccgcttacggccatttcggccgtgacgacgccgacttcacctgggaggtggtgaagcccctcaagttcgacaaggcatcggcttaaggttgggagtgttcactgtggacatgaggactaccttcctctggctctgctgttacctgcaagcattgctgctgctggatgtgtgtgtttgatcagtgactggctgctgctccatagaagatgaacggagagaaggatgatgaagggctttggcaatcgccgctgcaactgcaacccatgccatgccggcttagtgattgggtataatttggcttggcagcagccagcattattatgtgctgatctgttatcttttactagtttggtcgtccc

SEQ ID NO: 34139 - DNA, 1456 bp, Zea mays
  Clone ID: UC-ZMFLMO17220E08_FLI
cgcagtttatataaagcaaaagcggaggagagcaacgcgccacacaagcaaagaacttggccccgcctcccgtctcttaccgcacatgcgcgtcgggccgcgtcgacatagctgcttgccgccgacacccgcagccgcaatggccgtcgcccacgcgccgccgcgccggggcgtgctccccctcctgctcgtcgccgcgctcgtggcggcgttgccggccacctgcgccgcggccaggagcaagaagtcgtacacggccatcttcagcttcggggactcgctctccgacgccggcaacctcatcgtcaacggcacgcccaaggcgctcaccaccgcgcgccctccctacgggatgaccttcttccgcaagcccaccggccgctgctccaacggccgcctcgtcgtcgacttcctggccgagcatttcgggctgccactgccgccaccgtcgcaggccaagggcaaggacttcaagaagggcgccaacttcgccatcaccggcgcgacggccctggagtactccttcttcaaggcgcacggcatcgaccagcgcatctggaacaccggctccatcaacacccagatcggctggctccaggacatgaagccgtccctctgtaaatcggagcaagactgcaaggattacttcagcaaatccctgttcgtcgtcggggagttcgggggcaacgactacaacgcgccgctcttctccggcgtcccattttctgatgtcaagacttacgtgccccttgttgcaaaggctatcgccaatggcgttgagaaactgatcgagcttggggcaacagacctcctggtgcctggcgttctcccaattggctgcttcccgttgtacctgacgctgtacaacaccagcagcaaagcagactacaacgcccggaccgggtgccttcggaggtacaaccgcctggccttccaccacaacagggagctgaagcagcagcttgacgagcttcagaagaagtaccccaagacgaagatcatgtatggagattacttcaaggctgcactgcagtttgtcgtcaaccctggaaaatttggttttagcacggccttgcaggcgtgctgcggcgcaggagggcagggcaactacaacttcaacctgaagaagaagtgtggcgagcagggcgcgagcgtgtgctccaacccgtcgtcgtacgtgagctgggacggcatccacatgaccgaagctgcgtacagaaaggtcgccaatggctggttgaatggcccgtatgctcagcccccaattctcaagtcatgatcgagattactaggctgtgcgtaataccgccgcagctgcatgctgcggctagagatatatatgaggagtgtttcaggcaatagatatgctaagttatggtaaagctatttggtctgttcattggaagatctgtataaactgcgccggtatagatatgttcccagctgaaatggctct

SEQ ID NO: 34140 - DNA, 1247 bp, Zea mays
  Clone ID: UC-ZMFLMO17220E10_FLI
taggcacaagcgaaccaaacccatggcgtccgacggcagcggcgtggtgacggtgtacggcagcaacggcgcggagctgctggagccgtccaagcagcccaagtcggcgactttctccgtcaaggtggggctggcgcagatgctccggggcggggtcatcatggacgtggtgaccccggagcaggcgcgcctcgcggaggaggccggcgcgtgcgccgtgatggcgctggagcgggtccccgccgacatccgcgcgcagggcggcgtggcgcgcatgtcggacccgggcctcatccgcgacatcaagcgcgccgtcaccatcccggtcatggccaaggcccgcatcgggcacttcgtggaggcccagatcctggaggccgtgggcgtcgactacgtggacgagagcgaggtgctgacccccgccgacgacgcgcaccacatcaacaagcacaacttccgcgtccccttcgtctgcggctgccgcgacctcggcgaggcgctccgcagggtgcgcgagggcgccgccatgatccgcaccaagggggaggccggcacgggcaacgtcgtcgaggccgtgcgccacgtgcgctccgtcatgggcgacgtccgcgcgctccgcagcatggacgacgacgaggtcttcgcctacgccaagcgcatcgccgcgccctacgacctcgtcatgcagaccaagcagctgggccgcctccccgtcgtgcagttcgccgcggggggtgtcgccacgcccgccgacgccgcgctcatgatgcagctcggatgcgacggcgtcttcgtcggctcgggcatcttcaagagcggcgaccccgcgcgccgcgcccgcgccatcgtccaggcagtcacccactacagcgaccccaccatcctggccgacgtcagcacggggctcggggaggccatggtcggcatcaacctcaacgaccccaaggtggaacgatacgccgccagatccgagtgaaccctttctttccgtagtcatctccatccatctgccttggattgcatttccgtcgtctcatgtctctcaatcagtaataatggaatgaatgaaatggtaagaaacaaagctatggtactatgcagaacctctttcattttgtgctactgtactaagttagcctagtcccccccaccctggattatcatgttggatggattgtatgtctgtcactgagtcagaccttgttattgctatgaacgatgaatcaatcctctttctcgaggctaag

SEQ ID NO: 34141 - DNA, 998 bp, Zea mays
  Clone ID: UC-ZMFLMO17220G08_FLI
ccgacgacgtgaagccccgcgagatccacaacctcttctcccaccgccccgccttcgatcactgcctcctcgagtacaccggccgtggcaaccaggcggttgcttttgtgacgttcttcacccatgaggcggccctgtcggcaatgagttccctaaatggaacaatttttgatccggagagtggcgaccgtttgcacattgagctagctaaatcaacttcacgcagacctcgtggaggtgtcgaaggctaccgagttattgacaaacgggctaacaaaacagaaggaaatgctgaccatgagaacgttggtgatgaagatgatgacgaagtatggggggaagatgaggatggaggcaatgacaataatggtgatggaggatcagatgagccatcgggcacagaaaatgaaaatcccagtgataagaatgaattgcctacggataagagtgatcaaccagggcacaagcagcagaatgggcaatctctctcaaatgaaggacgagacaaatcttcaagtgatataccaccttgctctactatcttcattgcaaatttgggacatacatgcacagaggacgaactcaaggaagttttatccaaggaacctggatttcatgtccttaaaatgcgtcgccgtggtggaatgcctgtagcttttgctgattttacggatattgaatcgtctaccgctgctatgaatagactccaaggcactgtactggcatcttctgataacgatggattgcacattgagtacgcaaggtcgaagatgaggaaaagctaagttgttggactgcaaggattggcagtggcatctcctgtctgtcttcctggaggctaccagtaggcatccctgcacacgtagctgcgtgtagctgcttgcttagtcgttttatccatgtaagcgtgagaatccagaacggtgctaattgtcctgtatgccattatacaatactccctcttttaaatcatgagatactctcttcgtttcaaattc

SEQ ID NO: 34142 - DNA, 1181 bp, Zea mays
  Clone ID: UC-ZMFLMO17220H08_FLI
agcagagaacccgtccgcatcggcggacgtcgagatggtccgcgggcgggacggtgtttggacggcgcggtccccaactgtggtggtcctgtgggatctcgacaacaagcccccgcgcgggccgccgttcccggccgcaaccgccctcatcggcgccgcctctctcctcggccgcgtcgtctcgatttcggccttcgccaaccgccacgccttctcccacctccctggctgggtcaccgccgagcgccgcgcccgccgcgccctcgaccgctccgagcgcgcgggggtcgtcgtcccttccgtgccctactcctgctccgtctgtggccggcgcttccctacccgccccgatctcacccgccacttccgccagcttcacgagcgcgagcgaaacaagaagctctcccgcctccgctccctcaagggcaagaagcggcagaagttccgtgagcggttcatcaccggcaacaccaagtacgaggatgccgcgcgggagctcctcacccccaaggtagggtacgggcttgcctccgagctccggcgcgcgggcgtccacgtccgcaccgtccccgacaagccgcaggcagcagaccacgcgctcaagcgtcaggtgaagcactccgtcgcctgtggcgtcgattggctggtgctcgtctctgacgactcggatttcaccgatacggtgcgtaatgcacgcgctgccgacctgaggacggtcgtggtgggcgacggttgccgcgctcttggcaaggttgctgacatttggttgccatgggaccgagttgagaatggggaggttgatgaggagatgctgaggagttgcacgttttcagagtaccgagaagatcagggaactgagcgggatgggcagttcataggggattgggatgcaggtgactttgatgatgttgttgacgatattgttggaactagaaccagtttgcttggagctacgacaatgtctgcgtttgctgacgaggacattgcagatggcatatttggagttgaattgaccggggataacatgttttggagtagtgacgatgaggaagaggatgattacttgtgaggttcacatgtgtattgagcagtaaacatttagggcttgtttgctttttcttaatccatgtggatcggatgatattgggtgaatttaaatcctaaacaagtcaaaattcttc

SEQ ID NO: 34143 - DNA, 2151 bp, Zea mays
  Clone ID: UC-ZMFLMO17221A03_FLI
gcgccatggcagcgtcgccgcagcagcaaggccagggcggccctggcagcggcgggtggactcccgagcagttctggtcgctgctggacaaggcggaccgccggttcgcccgggtgcgagacctgccctccttcggccgccaggagcccgacgagttcgccaaggccttccgcgcctacacccagctctggcggatgcagcaggagcaccgtcaccgccttctcgacgcgggcctccgccgctggcaggtcggcgagatcgccgcccgcatcgcccacctctactacgcccagtaccagcgcaccgccgacaccgcgcttctctccgaggcgttcgtcttctaccacgccgtcctcgaccgcgcctacttccaggacgccgaccaccacctcacccccgccaagcacctccgcttcctcgccaggttcctcctcgtcgcactcctgctcggcaggcgttcgcacaccgtcccgcgtctcgcctcggacatacgcacgctcttagatgactccaaaaagtccttccaggatgccgaatacaaggagtggaggcatgtcgtgcaagagatcgcgaggttcctgcgagctgactcaccatttatgaacatgaggccgctcaggtacagctatgcattcgatccgcccccggacacgcttcgtactatgccaactactatcaagaagcgaggtctcgtcttaagtgacaccatactttgcagctactatcctaacgaggtcaaatttacagacctctccatagatgtattcagaatggttcagtgcctcgaatgggaaccatgtggttcatttgcgctaaacgatggttacagcgcccatgatgaaagtggacaaaatcaacccaatctattgaaagatttaagagatgctgcactgcccccgaatccacttaagacaattctctatcgcccttcagtaacacatttcctaacggtcctttccacaaaatgcgaggagcttccttcaaatggtatcatgttaatatatctttcagctacaggggagatgggaacttctggattttgtcctgatactggtgaaaatgttttgagcaactttaataagtttgacatatccagtcttagtcatactagttcaaaggaaaacaaagaaccttgtctatggttaggctgccgtgaaactgaaggttcaaattgcatataccctggtgatctaatcccatttacaagaagacctttatttttggtgattgacagtagcaccagctatgcattcaagtctattcatggtactgaaaggggggagacttctgccatgctactttcaccaagttcccgatcttccgctgcgggattcagtggcgattctactcggcacagtggtagccaatttactatgttcctcacatctccattgcaagctttctgccttctgcttggcaacaatgggacagatatcgacagggagttattattattgtccctaaatgaatgggccgcgactttagttgcatcatcttcacttcattctatttgggttgaagttttaggcgacccactcctaagaaggttacttctcaggttcatcttctgccgagcaactcattccctgttcaaaccaacaaaccataagacagagttcctgccgacctgcatgcctcctttgcctgagtctgttgatgcagagagcatgctctcccaaagctgtgtgctgcgagtcgcatcattctttggcgctgccagtcagttctcatttgctgaggttaccacatggcctgatgttgaccctgaggaggctgttgtcaccagttcttctggcagtgccaacaaaggtgtgcctgagacagccagagattcagacatttcaaactcatcatcatctttttgatgcgaccatggcgctaccttcgtccgcttgtgttatttactcatctgcatatgcggatccatttgtaattactggtgctcctttatgcttgatttacacatcaagcagaactgccttgcctttttgtttcccggttacttactgaattaatagtcactagaacatttttttatcccttagtttggaggtgtggaggagctgtgtgagaaagtgtggttgaagagtgttgtttcgttactgtccatggctcggtagaatgtattccctcggtcatttcggtttttct

SEQ ID NO: 34144 - DNA, 1631 bp, Zea mays
  Clone ID: UC-ZMFLMO17221B01_FLI
cattagggggccctggctattctcactttcttagcaaaatcgtaggtgcagatgtgcagccacatgtctgaattgaaggtgcacagatagcaaaattcctaaataagtttttgtctgaatttatgggagctctgtcaggcagtgctttgtatacaaaggattctgtcataattgatgaagtgattactgtgatttgtggtctatgagcttaaagaactactcatattcactttccatacataatagtaatatgatatatggtttatcttcgtccctgattgatccactttcatttagtagaatactattgtatttggtttggaattcgaatatttcacacctttatgaaagtatatgtacaaatttattttaaattcatgggcatgagagaagtaacatgatttttatacagggatgctccttcgttacggaagaccatgcagaacctatcaatcccattgccacatcagctgatattactacttctatggatatgcgtctaatgatgaataagatcaagattgttgagttcatctctgttctactatcaattggtagtgcagctgccaaaacacgactgattcaactaggagcaatcaagcatgctatagatctattttttgagtacccgtttaacaacttcttgcaccaccgtgcgagaatatcatcggctcatgtttggagagtaagcaggatcgactgattgaccatgtccttgatgattgtaaacttgttacaagaattctggaagcagagaagaactctgctctgtcgtcagatttaacgaagcatacattgtcttcagagggaagatttccaccatggataggaattgttggtcatatgacacagatagctaacaggctccttcagctggtcaacaccaacatcatggttcaatcacatttgcaggtttgggttcgatgatcattgtatagagaggaaaacctgctattatttacatgttacagggtctgcaagcaatatcactaattcacttgtaatttgtcatgtacaatgctcaaaataaaataatgtcacctaaactttttttcgcttaattttgctatcttgattctatgggttgtattgagcttcatgtgaagtcagagtttgagcaatatcacccctgaagttcatttgtgattcctgtatccgattaattagtgcacccatcccataatgaagctagctgatccggttagcctgaaatgcaatatgttgttcgttggattctgacccctactgggcgccgctttctactgcagaggaggttgctctcttcggatgcctcaagcatggatcaaaagtcgggctcttcccgggttcatctcccgttcatgcttcacagtcccactgaatgcgtgctgcggaagtgacgctccgtacaactgttccccttcaatactgtgcgggcgtcctggatctacagtttgccctgacccatcaaatacatctcatgggatggtctgcacttcaccgaggcgggttacaaagttgtcatccaaggagtgccaaacctcctctttcagaaacctgcaagggtgcggagttcaaagtttctcaacttcacccatgtacagataatccaataaacaccttatcatacaatgccttgagctcttttattt

SEQ ID NO: 34145 - DNA, 1070 bp, Zea mays
  Clone ID: UC-ZMFLMO17221C01_FLI
agctcatgttcgagcccgacgccttgcggtggctcgccagggccggcgtgtcacgggcaaccgctgtgctccaggtttgctcctctattgcgttcgacaaaggagtcgaatcatgtttgaagtacatcgaggcagttccatggagcgagagcgaggaagagaagctgaaacacgtttttgccagatgcactttcggcgaatcagttagtaaagatgtgctggcaagattgcagcaacaatgcgcgagcggctcggaggacctggcggtgcagctcgtggaatctatcacgagcggagccaacaacggcgcgaggaaagaaatgcagtctttggtgagcggtctcctaagcagaagctcagtctaccataaggacctgtccggggtgaacaaggggggcctttaccgaatctgccgttcctgcttgagctcacttgtggaacttttcatggaggactcggagggcggccaagctatggcaccctcaggcagcaggcctatgattgaaaggatcagtcagcaaactgagaatctcaactggctcttggacatccttctgaacaacgacatggcagaagaatacgttgagctgtggggtacgcaggaggagctcatcagaatgcacgagcgagcatcgccgatgttcaggtacgagctcagccgggtatcggcgagcgtgttcatggctctggggagagggagaatccagtgccccagcgacacgaggagccagctgttccgtggatggttcaggcccatgcttgtggacttcggctggctgcagaggtgctccaaggggctggatgtgagagtcctggaggagaacctggggcaggccctgctcacccttccgctccacctacagcagagcttgttcgtagaatggtttcagtgctttgcgtctagaggcacaggaggatgccctaatctcagcagagctttccaggtatggtggaggaggtcatttgttaattagaccagctggttcttcttcccattctgtgctacacaaacatgagccagtaaatgtaaagcaacatcataattcataagtatgtttattttttgccct

SEQ ID NO: 34146 - DNA, 812 bp, Zea mays
  Clone ID: UC-ZMFLMO17221E01_FLI
gaggacagcaagagtcctaagggccgtcagaagttgttctcaaatgaggagaagattcttctgaacaagcgagtgcctgatctggaaacagctacttctagtaaatggcttccacttcacacccttgctgcatctggtgatttctatctattgaatagccttttaaaacataacgtggacataaatgcgcttgataaggatggcttaccagcgatccacaaagcaattctttcaaagaaggctgctattatcaattatcttttaaggaactcagcaaatccattcatccaagataaagatggtgcgactctaatgcattatgcggtccaaacagcatgtagtcagaccataaagacacttttactgtacaatgttgacatcaaccgtccagatgattatggatggacacctttgcatcttgcggtacaaacacagaggactgacattgtgaagctgcttttaataaagggcgctgatagaactattagaacccaagatggattgaccccgttggagttgtgcctccggttgggtcatgatgtgcggacgtatgagcttatcaaactacttaaaagtttccgaggacaaaagcagcatgatttagtttagcaactggagggtgtgtgaccctctttgaaccagtgaggttaaccagtgtggtggccttctgggaggccagttttcaatgtaccattaatgattcatggaatcgctcctggtttgagataggtacatgccaacttcattgtatttgtatcatttatatatttcattggcctaaaccattggttgcaggaaatagtttaccccta

SEQ ID NO: 34147 - DNA, 671 bp, Zea mays
  Clone ID: UC-ZMFLMO17221E05_FLI
ggaatattgcccagaaagactccacttatatctaaggatcatgaacgtgcttactttgattctgctgattgggctctaggaaagcaaggtggtgttcccaacaagcctaaaggtcctcttgaggcactccgacccaagcttcagcctacgcaacagaatgcccgcgcccgccgaacttcatatgcgtctgcggacagtgacgacactttgaatctgtcccccgaggatctggtcccgcaaggagaacccagccagcagggagaaccagtcgaggacaagaacaaggaataaacacatgcccagcatagctactgtactgtaccccttttcatacacaagatgccattttccgccgtcgcacaaaaaaaaaacttcttttgccttggtaataagcgtgttgattcggttccggcccaacggtcccggtgaggctgaggttgagacacgtgcagcttgaactgcatgtgagatgtggtatccgctgcactgggctgttgggggtccttgggatgcatgaacaaataaacaatgatgcttgcgatgtttacattgctgtacctggacctgtgttacctctatgcaaacacatgcaaatccgatggtccgagactcgaaactctcccgttgagctgaaggagttgctgtactaataataatgaagattttttttt

SEQ ID NO: 34148 - DNA, 801 bp, Zea mays
  Clone ID: UC-ZMFLMO17221F08_FLI
tcaactgttctctcgccgccgttctagttccgttttgccttgaggtgcacgtggcggtggaagcttcccgggcggtggcggttgttggttcatgtcgatggcgcaggtgtgctgcgactcggccgtagcggcggcaccggtggccgggccggaggcggaggcgagggccagggcgcgcgccgagaggcgccgccgggccgcggaggccgggaggtggaagcacgcggcggctgctggcacggcagccgcagatgccacgaggaagcggagcctcgaggccggggagctgctcgtggcgcggaagcacggggccgcgtcggtggccggccgccggagggagatggaggacgccgtgtccgtgcgcgagtccttcgccgtggagggcgaggccggcggcggcgggaggcgcgacttctacggggtgttcgacggccacggctgctcgcacgtggccgaggcgtgccgggaccggatgcacgacctgctcgccgaggagctcgccgccgccgccggctccggctccgcggcgacctggaccgccgcgatggaacgcagcttcgcgcggatggacgccgaggcgatgtcggccggcgggagcgccgcctgccgctgcgacccgcacaagtgcgaccacgtgggctccaccgccgtggtggccgtcgtggaggagcgccgcgtcgtggtggccaactgcggcgacagccgcgcgctgctgtgccgcgggggcggcgcgccgccgctgccgctgtcgtcggaccacaagcccgaccgccccgacgagctggagcggatcgaggccgc

SEQ ID NO: 34149 - DNA, 638 bp, Zea mays
  Clone ID: UC-ZMFLMO17221G12_FLI
cgcgcagcgccgtctcctgcgattcccggctgcctccacctcttctcccacagcgccggcgtgctcctctcctttcacgctacgttccctccggccccggcgtcgacggctaagaaacccttaacctaggaacgagttcgcaccctcgggacctgtggcgatgcatctcactctcgaattcgggggcgggctggagctgctcctggagaactccaccaaggtgcacaaggtggaggtcaccacgcccaaggacggccaaggcaaggtgacgatgaagttcttgctctcttgggtcaaggagaatctgatcaaggagcgaccggagatgttcctcaaggctgattccgtgaggcctggggttcttgtccttataaatgactgtgactgggagctgtgtggtggtcttgatgcagagttggaagagaaggatgttgtggttttcatctccactttgcatggtggttagtttgattacatcaggatgatagcatcctatgattttcctgaaaatcgcaccttgtatcaagtctttggaagggatggattggtctgagttgtgtggctttctggagatactaattgcaaactgtggaactgcacttgttggtgccaatatcatcaaactatagttccatttt

SEQ ID NO: 34150 - DNA, 1750 bp, Zea mays
  Clone ID: UC-ZMFLMO17222B08_FLI
gtgggggtgaggcgaggttggagtttgcgtctacaaagactaatggtccaggatggttgctttgtggaatggagggacatggtagctgatgcggctagaaagggttttgctggtggagtttcccttgaatggaattcatataaaatattgagtgagcagatgcggcatgattggttggagaatcttcagaaaaggcgatcaatgccaaggccaagaggtaatagacgagcaccaaaaactcctgagcagaggagaaaaattgcagaagccattgctgcaaagtggttggatcaagaatatcgtgaacgagtttgtagtggaattgctagctatcatggatcatcttctgcaactaaaacaccgagaaagccaagacctgctggagaaccaggtgtaaagaaacagacgacaaggaaaaaacctatgcaagccaaacctgtaattttagaggatgctcatggaaaaagtgcagctcttaagagaaagaaaagtgcaactccctacaaagatccgatggcagttgaaaaattggagatgatatcaaagattcgagctcaaaggacagcacaggaaatagaaaagaaagaagctattaggagggccaggacactgattgcagaagcagaaaaggctgctgatgctctggaaactgctgcagcgatgaacccttttgcccaagcatcacttatagaggctagaaagcttgttacagaggcaagagtatcacttgaatgtgttgatgatgaagagcctcaagaaactgcttccaatgatgtgtcagggagctcagtgttactgaacttgcacgatcaccgtcatggactggagatgcagaatggaagtaatttgttgaagcaagagaataaacctgccaatgggatggaatttcctccaagcagtgtcaatggccttgctttccatcttgatgtttctgaactcagcggaacaaagcaactatatcagaggatagagaattccatggaaagggcttttcttctcccttcggcttcgtcaaagcttaaaagtgcgaacggagattatggaataatagatctacatgtgaggcagtcgatggtcgatgacacggcaaagcataaaggcatcacagctgaaacttgtcctccagggacactagagctagaagatcctcccagtcccaggtctgcagaaaaggcaggaaccagggaagattaccctgggggaaaaccggaagaagacgcaccctcgtcggaagaaaaggctaggatgaggtgggtacgtgggaggttggtcaaggtaaaaacaaacggacctggggatttagaaatctagtattaggcagcaaatctggcctagctaccgttgacaggcaatcgagtttgctcacttccatttagccaccattttgtatgccattcgcatgatttggtgtttacgacctgcacctgctcgatgggaggaaccaagtataaaatgtactagcgttgacaggagtggcgtggtcctggggaactttactgatttgcagtctacagtgaacgtgcaggagcgagcacatcacgatcaccctgttttcctcttctgcgttgagattgtagttgtggtaggtaataggagctggatctttttacttttttcttgtaaggccttgttagattagcttgtaattcatgtggattgagtgtgatttggtgggtttaaattccaagtaggtcaaactccttaattttttctaatcacattcaatccatgggtaacgggattaagttgt

SEQ ID NO: 34151 - DNA, 1928 bp, Zea mays
  Clone ID: UC-ZMFLMO17222B11_FLI
cttcctcgccccttcccttccacgactccactaccaccaccttcaccttgtctcccacaaccgccgcgcgcgagccctagcccgatctcgccggcgacagacaccagatctcgccgcccgttgcgcgccgatacgcgccccgccggattcaccgctcctcgcgctgcagcacgcccgggcctgggttactgcgtgacatgtagtattgtataattggaggttgtcaccatcaccacaaggcatatgttgtgatttgtcgatggcgaggagatgaaacaggtgtaggggcggagcagcaaggacatgacagccatgccgcatccgcgccaccgaggcgctgctaagaagcccatgtggatcatagtgctattgtctttggtttgtgttgcacttatgggggcctatgtctacccaccacggcgctactccgcatgctacttctttgcttcgagtgtctgtactccgttcaaggattggctacctgctgttgctcgtgagcgaactgatgaagagatagtttcatcggtggttattagggatcttctttcaatgcctatggctatgtcaaagaacccaaagattgcctttatgttcttgacaccgggttcattgccttttgagaagttgtgggagaaatttttacagggtcatgatggccgatattctatctatatccatgcatctcgtgaaaaacctgtacattctagctctctttttgttgggcgtgaaattcacagtgaaaaggtagtatgggggaggatttcaatggttgatgcagagaagaggctgttaggaaatgcattggaagatgttgataatcaatttttcgtcttgctttctgacagctgtgttccactacatacatttgattacatatataattatctgatgggaaccaatgtcagtttcattgattgcttcttcgatcctggcccacatggaactggaaggtatacgatggaaatgcttcctgaaatagaacagagggacttcaggaagggtgcccagtggtttgctataacacgaaggcatgctttattgattctggcagacaacctttactacaataagttcaagctgtactgcaagccagcagaaggacgcaactgtattgctgatgagcattatttgccaaccctcttcaatgttagtaattatttttaactctgttatttaccttttttccctcgaccccttgcttcccttttttttagtacagttgtgtttattctttagatggttgaccctggtggaatagctaactggtcagtgactcatgttgattggtccgagggaaaatggcatccaaggtcatatagagctgcagatgttacatatcaactcttaaagaacataacgtctgtcaatgagaatgttcacattacaagtgatgataaaaaagttgtgacacagaccccatgtatgtggaatggaacaaaaagaccctgctatctttttgctagaaagttttacccagaatctttgaacaacctgctgaagctattctccagttacacatcggcttgagttctacatgattcttttggcattttgcctaggagattcctctaggatttatctttttgtgcttcatgtaaattgtggaattgatacttagaggcttaacagagttacagatccagggccttgatgtaattctgagtcccttggtagggctgaggtgatgtttgtttattattgacgctgccctccctgtcattcgtggtgctctctgtatgactatgtttcttttagcccttcacttttttctcttctcttttattcttagattcctagctcccatattctgagtaacaggggttttgtcagttcttactgttattataagattatttttttgtagacacgaagatattatgaaatcagttacactaatagtttaacctggtcttgtgagttacagtgac

SEQ ID NO: 34152 - DNA, 1138 bp, Zea mays
  Clone ID: UC-ZMFLMO17222D03_FLI
gcggcggcgacgatgaccatggcgacgcaccacccccgcgcccgcgcacccctccgcgtctgcgccgcctgggacatgaacccgggagccgccaccgtggccacgcccaagccctccaaggccaaggccaagccgccgcccgcgaccacaaccccggcccgcccgcctcctctgacccacgccgatctcttcgcgcgctccagcgaggcgcaaggaggggtgaagaagagcacatatatgggctttgagaaatggtggttgccacctgcgccagtggtgaagaaaccccgatcgctctacagtgcggtgtcactggcttacttgggagactgcatatatgaactttatgctcggaggcacttcttctttccacctctgagcatcaatgagtacaacaaacgtgtgatggatgttgtgaagtgtgagtcacaggaccttttgttgaacaagcttcttggagaagattttctaactgaagaagaaagggacatacttcgttgggggcggaatattgttagcagcaaaactcgcaccaggaagcgtgcaggaattgctgtctacaaccgggcatcttcactcgaaacactaattggatatctttacctcacaaatttcaaacggttggaacaactgatgtttcaattgggcttcacaagtggtgcctcatcacagcatattgcagacgagctgcgctcaagtttccagaaaacaacccccgcttcggccacacctccacaacctgcaacacagtgaacaggtctgaggtgtaacggtattggatcgtgctcccacaaaggttatctttagttttcgaccctaacgacggagaaaggacgcaagagtcacagcgtattcagatgcaatagcgaggctgggagcagatggttagcgaacaccgtattcatcagcatgagcaacatagatacgcacaaactctggagatacgcgaaaattaagactctgaatgtctgggctgacctggggcttgcgagtaggatagcttgatgtttgcaaagaagctctgagtgtgggagataggcccgacttggggtgttgtaatcgacctaaattcgtgtaggtaattaaccacttcatgttacttgttgcaaaaaaaaaactgtgatgattctgcttgtac

SEQ ID NO: 34153 - DNA, 939 bp, Zea mays
  Clone ID: UC-ZMFLMO17222E02_FLI
cgtctctccatcgtgatctctagaatctgccagcatgtctctcgcttatcctctccacacactcatctctccctcacggtgccctccctccattttctgctggccgccgctgctgctctgctttccatggcggcgacctccctttctgctgcaaggaagtttttcctgccctggtgctcgtggctgctatttctctggccatgtcgagtccctctcctccctaacgctcacccctcctcaggtccgtgctcgtccagctcgcgcccactcccagctcggtctccacctccgtttcctctccctgtccgaccaagcacacctcgtcgtcgatttccttcactggaccgcgccctgctcggcttcttgcagcacatgtccagcccatgcgcccaaggtcatggagcagcaacaactatgaaacccccttcgtgtcgcgccctcgatgtgctcgatgaaataccgcaacaagctccacctcgatctatgccgacccgatcaccacttcgtcgaacctcggtacgctagctgaaaaatcgtgcgaagcgaagggtgtggatcaaaacaacccacaagacgatgtcggccgatgagcccgaagatggatggactaagcaaatgtcagaacaaaagttgatcgtcaactgaccttcatttaacaacactaacgtagtgttatcccaggttgtaattttgttctgttgtggatggtgctaagtgccggtgggctcggccttcttctataagtatatcccatctttagtttctctattgaggattgtcacttaagctagcatgtatttgaaaacctataaatattttatacattttaaattgtaatttttttgaatcactttcttttgtaatcactccgataattgtataatgtaaatttattgtaatatgaaatcattttgcaataaagaattttatttccgctgc

SEQ ID NO: 34154 - DNA, 1843 bp, Zea mays
  Clone ID: UC-ZMFLMO17222E07_FLI
cccagacaaagcacgagccacgcacggcccccgctgcctcccttccgccgccgccgccgccgccggcgcgccaccgtcgctgctctcccgccttcaccgcgcccaactccaatccttgcctcccccgcgcgcttcagcctcttcactccccatcgttttcgcctggccagatccaggtttccttgaccgagacctcgcctgctttacgcctccggtcggattcttcgccgtccttgtccccactgggcaccgctggggtggagcggagatcggatccgccgggagctgattccttctctcgcagtctagtttgacgctgattcatttgctggtcggcatagcatgatcctgcggtgattgcggatagcttgtgcaagctggtggcttgggtgttgtctttttaatctggcctaaagatatcctgagacggtagcgtcacatggatgctagtacagaggttactgatgctattggtgcggtgggctttgacaatggggccgcggggaagttgccgcccagtgatagtgtagaggggcacgcagaagaacacgatgtgctggctgatggtgcccattcaggcgagagcgaggtgatcaacccatctgaagaagtagaaatggaagccacctcgcagtcccaggacataaagcctcgagttcctgagggggttcaaggccattcaatgaaggttggtactaaatctcagcgacagagccctcgaggcggggataagagtcaaactaggaaaagctcttttaatccttcttatcctaaggcgcccattgcacgggtttctgatccagatctagttgattgctctttgagcaatggtgatgctggttccagtaagaaaaaggccgaaaagagcagtttccgcccagttgccaaggagaccccatcacttgaggactcaaatgagaagaaaaaaactcagaaggcatcaaaccaacattctgtcaaaaaggatattgaagaagaatcaaatgaaagtgtgaaacctcaaagggttggcagcactccttcatatggatttagttttaagtgtgatgagagagctgaaaaacgaagagagttctactcaaagctcgaggagaagattcatgcacaggaactagagaaaagcaacttgcaggcaaaatcaaaggaaactgaagaagctgaactcaaaatgctgagaaagagtttaaatttcaaggcaacaccaatgcccagcttttataaagaaccacctccccccaaggttgagttgaagaagatacctacaacaagagctaggtcaccaaagcttggtcgctccaagaacacatcctcaggagggacagaagggaatccaaatcctccagctcgttcagctcgactgagtctcgatgaaagggtctcccaaaatggtgtcaagaaagcacctgttgcaaatgcagtgaagaaaccccaacggaaatctctacctaaactgccttcagagcaaacaaccaaagttgacattgcaccatctgttccatctgcagaagagctagaaaacaagtcgccgacgaagggtcttgatcgagagccgatccgcgctcaaattacacctgacgaacctggacttactgcataggaacctatcaagccgactcctatgaaaggagggagttgtgccccagcttccttttatcacattttgctatttctgcagtaaactgctggctggtattatgtattagaattagtctcagcaccaggagcttgaagagtggcaagtgacaccgtgtattctttatcttagtttctgttgacataccaggtatttgtagttggcagacaggcagaattttatattattctccagggctaccagtcaatt

SEQ ID NO: 34155 - DNA, 3042 bp, Zea mays
  Clone ID: UC-ZMFLMO17222H12_FLI
atgttttctggcatgctggagcccttgagggtagtgtctgcgcattagtggtggataggatgggccaaagtgaccctattttggaggatgaagtcaaatatcgctattacaccattatccagctatacagaagagccactttacaagataatgctcaaagagtttcacctgtgagctttgagcttgaagctgccttgaagttggcaagatacttgtgcaggcgagaacttgccaaggaggtctcagatttgttaatgggagctgctgatggtgccaaggctcttattgatgccagtgatcggctcatactatatattgaaattgcaagactttttggtacacttggttataagcgcaaggcggcctttttttcaagacaagttgcacagttgtaccttcagcaagacaatgcatatgctgctatgagtgctatgcaggttctaactatgactacaaatgcataccatgtccaaagccgaaagactatgaaaatgaatcatgatccgtccaaggaacctcgtgctggcaatactgattctggaaaggtgcaccctcagtctatagtgtcattgtttgagtcacaatggagtaccctccaaatggtggttctaagagaaatattgatatcgtcgatccgggcggcagatccactctcatcatggagcgctgcagctcgtcttcttcgatcattttacccactcatcacaccagctggtcagagtggcctagcaagctcacttgcaaacgctgctgacaagcttccaacaggcacacgctgtgccgatccatgtcttccttttatcaggttgcattctttcccgcttcacccttctcaaagggatatagtaaagcggaatccacataaaaaggagtggtgggctggtgcaggtccttcaggacctttcatttatactcctttcagcaaagcaggagcttctgggacttccaagcaagaggttagttggattgtgggggagccggttcaagtcatggttgagttagcaaacccttgcagcttcgacatagttgtggagagcatctatctctctgtccattctgggaattttgatgcctttccagttagcgttagtcttccacctaacacttcaaaattagttttattatctggtattccaacaaaagtcggacaaatatcaattcctgggtgcattgttcattgctttggtgttattacagaacacctattcaaagaggttgattgtttgctccttggagctgcacaagggcttgtcctttctgatcctttcagatgctgtggctctagcaagttcaagagtgtcaactttcctagcatttctgttgttcctcctctgccattgttaattgccaatgttgtgggtggagatggttctattcttctttatgaaggagaaattcgtgatgttctgataacactgacaaatgccggaaccgtaccagttgaagaagcaaatgttgcattgtcagggaagaatcaggattctgttatttcgattgctcatagcacatggaaatctgcgctccctattaaaccgggtggagaagtgacatttgcagtgactctaagagcctggcatctcagctcagcagatttggaagcagatggcagtagatctcctgtaaattcaaggagaatagcaagagaaggaatcaatccattcttggatattcactatgctggtcctgctgcgaatcttgagaatggagatgtttctcttctacctggaagacgcctagttgttcccttgaatatctgtgttgtgcagggcatgcgtcttgtaagagcacgcctgttgtccatggaaatacctgctcgatttactgaaacacacttaaaacctgtcagtggcaaagacatgaacttattgaaggttgatccctataaaggaagctgggggctccgccttctggaacttgagcttttcaatcctactgatgtcgttttttatgttgatgttgctgtgcatttggatgacacggatgtggaccaagaagtaatttcagacggggatgctgcttgtcacaaaactagaattgatcgggactactctgccagagttctcatacctcttgagaacttcaaattgcctgttcttgatgcttccttctttgtaaaggcaagtagtagtgatgaacctcttggatccagggccgccgccatagcagaaaggaatgccaaggcagagctaaatgcgtctatcaacaacttgatttcaaaaataaaagtgaaatggcactctgggagaaatagctcaggtgagctgaatattaaagatgctatccagacggcactacaagcatctataatggacatactgttgccagatcccctgatgtttagctttaagcttgttacgaatggaattgtggtcaatgtcgattctccaaaggattctggcaatgttctgaggtgcaaagatcctatatctgctcatgaaatgacccatatggaagttcagattcgcaacaacacaaaggaaatcatccggatgaaccttagcatttcatgcaaagatgttgctggagagaattgcttcgatgaaaatagtgctactgtcctctgggctggtgttcttagcgatatacacctggaagttccacctttgcaagaggtggtacatcctttctccatgtatttccttgtaccgggtgactactcgctccaagctgcttctgttataatcgatgccacagacgttcttcgtgctcgtgcaaaggcggagtcaccagatgaacctatactgtgtcgcggatccccattccatatccgggtagtcggtacagcataggcagttcttctgagttactcctagtctagaggcctcattttactgcgacaattgtaggtgtggaaaatcttgtacaagagtgatccctggcgccctgcccctcatgcgatatgttttttgtcctttttgtaggcttctttgtaagtcatgtcatgtacagtgtacaagcatagtgagtattgtttcaagcacagaaattgtatgtcgatgattccacaatcttaatttctggtcagcttatatgattttactt

SEQ ID NO: 34156 - DNA, 1254 bp, Zea mays
  Clone ID: UC-ZMFLMO17223B03_FLI
cagcgtcacaactatgcttttaggaggtgcacagatacaccaatggaaacagtgggagaatggaattaaaaaagatgctcctggaaatgggcctaaggtaaccaatgtacatcatcatgaatttatcaagaaacgttttaagggtattggcaaagattctataatgttgagttggctgcattcttttggtaagcagttttatagatcagtatctaaatcagattacaccacaatgcgtcttggttttatcatgactcactgccctggaaatccaaaatttgatttccatagatacatggtaagggttttagaggcagattttaagaaagtggtaggcataagctggtacttgtgggtcttcgtggtgatatttctgttgctgaatgttaatggctggcacacatacttttggattgctttccttccccttattcttctgttagccattggcactaagctggagcatgtcatagctcagctagcccatgatgtagctgagaagcacacagcggtcgagggcgatgtgatcgtaaaaccatcagatgaacacttctggttcggcaagcctaggattatcctttaccttatccacttcatcctctttcagaatgcatttgagattgcgtttttcttctggatactgagcacttatggattcgactcgtgcatcatgggacaagttcgttttattgtgccaaggcttgtcatcggggtggttattcagcttctctgcagctacagcaccttgcctctgtatgcaattgtaacccagatggggagctgctacaagaaggagatcttcaacgagcatgtgcagcagggcgtcctgggctgggctcagaaggtcaagatgaaaaagggactgaagggagctgcatctgctagcaaggacgaatcgattaccaatgccgattcggcaggaccttccgttaagattgaaatggcgaaggctggggaggatgttgagatcgttggaaacacaggttgattgggacaatagggtgcccgtgttgtaatgatgtaacaggttaatatgccatcatctatttttgtagatactagatagcttgctgtggcaataccgcaatagcggtgaactagagaaggtgagtttgggcccgggagcctcatctgttatcggtccagtaggaagcaaattcttatatacgggatatcgataagaaatgaactaagaacatgttcctggattcattaccactaaaaattagctagctaaaagctgttgttttttct

SEQ ID NO: 34157 - DNA, 924 bp, Zea mays
  Clone ID: UC-ZMFLMO17223B05_FLI
ctcggcatgttcacagctgggggacttaaggttcggcttgtgggttgagagtttcatgggctatgtgggggttgatctggatgatcacttgcgtacagctctggttgatttgtacaccaagagtgggcgaatggatagggcttttgatttgttcagaggattgagatcaagggatgtggtgtcttacagcgcaatgatagtgggctgtggaatgcatggcaagttaaatgaagctgttggcttgttcaaggagatgtccaaagcaaggattgatcctaatgcggtgacctttgtggggttgctatctgcatacagtcatgcgggactgctggaagaagctcgtgcttgtttcacttccatgacaagcagatacagaattaatccttcaatggaacactacactattatggtagacattcttgggcgctgtggaaagttggaagaagcattccagctggtcatgcagatacctgtatgcccagatgccagtgtttggggtgccttgcttcttgcttgcaggttgcacaacaacattgagcttggggaagttgttgcttccaagtgctttgaactggagccagaagagagtggatattacattctcttgggtaacatatatgcgcaagcaaagaagtgggacaaggttaagggtttgaggaagatgatggcagaaaggggtttgagtaagacacccgggagtagctgggtgcatgttgcatgaatccattctattgatcttgctcattttaccatttgggtcagttactcagatgacatattaacatgcaactcagattttgggcactaaatttggaaagatatgttgttcttgtgtgttacatgcaaggggagtgggtgatggtgagttaaaattagtgagcacacggtgatgctaataagttatttccttgctatttttcctgc

SEQ ID NO: 34158 - DNA, 2580 bp, Zea mays
  Clone ID: UC-ZMFLMO17223B08_FLI
gccgcatcgcccttttcgtcgagccgtcgccctgcgcctatgctcccgcagctcctcggcatcacaatcgctgcctcccgtgatgcgcccttggatccacttcgcgtgcgacgcccctgatcggcaagcacgtcgtacgtccgcaccgcctccctcaccggcaagcacgtcatggctccaggcacttgcagcctccgcgcttcttcgaccagcaagcacgcgaccacgcctcccactgttcagtcgtggtggttccaggtgcttcttgccttcgtgtctccctgactagcgagtgtgtaaggagggacctcccctgccttggctccaaacagaatcagggaatacggtcaatctcccatggctgctgccgtgtaggcgatctgatagtccacaaaaacctaagattcggcaccaagtcactaaccgaaggaagatcgagatgaggaaggatgtgatttgatctcaaatatcaactacatctgtctagcgtcgagacacatgtgtggtagtgctaagttggttctgtcattcagtttctttctatatcctatttccgtgaaaatattttatgtgagtgatgtaaactgattgccagaattaatggatgttttgcagctacgccagaagctgatggttgtgggtaaaacatttttgttgctgtaatccccagcctagcaagtttcacttaaacaaaggttcaggcttttgttgcttgcaaggtactataggctgtagcacaacttatactattttgtactgactcatgcggagggcccgtgatcagaggtgctgctgaatttttagttacacaaagtctactatttagcatccacatgttagtaatttttttagcaagcatgcaatatcggtacttagtatgccatgaatctttttacctatctttctagcattccatttgatgaaaagagagagtaggagtgtgttgtgtgtgtgatagggggtgtacagaggataaaaatctcaaatgcacggctcaacagctcttgtcatgtgcctcttgtcttcttgccttatagaatgcagattctagaggcgatcactgcacactgcacacacaaccttcccctctgtatagctaatccaatcgacaaatccagtgtgtgcgctctctctttctctttttggattctaatattcacccaatcattgtttttgttttgtctcatgtaaattttagaacatcaaatcctatgtttttgtaattttactcttgcgagctcaaattatttgcataataatcagccgactgggacggagctttagccatacgttcctcttatatgttcagctatgtcgtgtgaattgaatgaaaacgatctgagctctactaaaaatatatgttcaccatgctatcatgcttagtaacagtgatatggcattgttagaagtacaaaaatctaggacctcacatgattactctctattgtctaaattttattttccagtacaaccagttagtgcactccatgtccataaaaatggcgcaaggacagatggggcaaggcaaacatgtatcactccaaagtacaaatagaccaatggaactatttgtattaataatattaattatataagtggtaattctattggtctattgacaatatatcttatccatggaaacagttcgctggaccttgagtttttttctctttcatagacaggactggacacgacttgtggctattttctctctgtttataatattttgcaaggctagaattattcctccaactcattgtttcgattaaaaaaagatacctaacaatcttttctgtggcacctcttcagcacaacctttatattcgttcttgcacttgtcagagtattctacccttacaaccatggtgcaaaattaacaacattctttaaatgtttgtgttgagcttcactgttcagttgctcccacagatgtagatttgatatctacattctactttcacatacctataaaggagttatttttcatattttggtatgttgttgttttcactgaacttcaagattttaattgtcaacctcatatgttggaaagcagatggttctaggcacacttgaagaatggttgtcactgaacttaagggattttaattgttactgaactttattgatgcatagtgaatttaccattctaattgttgtgactgcatgatatcaaaacagtgacatgtctttttagttgctactgttgtcgggttgggtggtgcaggagaaaacaatgatcccactgctcaatctatcgatctatgagccaaacaagacacaaatcatggaacaagtggattgcctgcatcttaccatcagtgtgttgaagaatggttggatgacaaaggccaaggagaatgctgcagctatgttattcagtttatatctggtccatgacaataaaaaagataatgaatgatacagagaatgtggaatgtatcatgtatgcatagccttttattcgagtcagctattaaacaagcaaaatggctggagtgattaaacatactaaactattgttcaagtgagtagagatattttgcaacacttaaataatggatagtatcttatcgttat

SEQ ID NO: 34159 - DNA, 890 bp, Zea mays
  Clone ID: UC-ZMFLMO17223B10_FLI
cgccaacgtcgacaccttcatagtcttcagatccctgaccccgctcctggtcgccatcgccgacacgacgttccggaagcagccatgcccttccaagttcacgttcctgtccctcgtggtcatcctgggcggagcggtcggctacgtgacgacggattcggcgttcagcctcacggcgtactcgtgggcgctcgcgtacctggtgaccataacgactgagatggtgtacatcaagcacatcgtcaccagcctggggctcaacacctggggcttcgtgctctacaacaacttcctctccttgatgctggcccccgtgttctggttccttacaggcgagcacaggtcggtcttcgcagcgatggagtccaggggcgaaggctggtttcaactggacgccgtcgtggcggtggcgctgtcgtgcgtcttcgggctgctcatcagtttctttggcttcgcagccaggagagctgtatcggcgaccgcgttcaccgtgaccggggtcgtgaacaagttcctcaccgtggccatcaatgtcatgatctgggacaagcatgccagtgcgtatggttcggtctgcttgctgttcaccatcctcggtggggtgctctaccagcaatcggttacggtgaaaggaaacggtgcagttgtggcacagcgtgagctggtgcccgagcaacctgaggaggttgacgaggagaaacaaagcttagtttcttcagctaaataatacggtgcaacggatcacttgcaatgataggatccgtttgcaggtttattctttggcctttgaatgggctcgtttatgtgtctgcgaaacaaacatgagggaatactatactagtggaagtagcacttccgtcaatggaagccctgctattgtttgaatttgc

SEQ ID NO: 34160 - DNA, 2585 bp, Zea mays
  Clone ID: UC-ZMFLMO17223C09_FLI
ttgattgcaagaaaatggcattggcttggatggtttcaaaggagaatagctcacattgtgctggcggaattcttgccgatgatcagggccttgggaagacagtgtctactattgcccttatacaaaaacagaggatggaacagtcgaaatttatgtttgttgattcagatcgtttgaaatctgaagcactaaaccttgatgaagatgatgagggagaacaaactgttagcaatgaacctaaaaaggaccaaggcgcttgttcattgtcaacatctgctggtactagtgctgaactttttgttaatcaaccgaataatgttgtgaataaaatggttgaaaccaaagcagaacgcaagaaaaaagctaaagtttccacatcatctgcatccacctcacgttccatgacaaggccagctgcaggtactctagtagtgtgccctgctagtgttcttaagcagtggtctaacgaattaactgacaaggttagcgaaagtgctaaattatctgttttagtctaccatggtggtgcaaggaccaaagatccacgtgagctggcaaaatacgatgtagttgtcactacatatacaattgtggccaatgaagtacctaaacagatggctgatgatgacgcagatcaaaagaacagtgaagaaccctctgctagcaataaaagaaagccatcggcgaatatgcaaaccaaggctaagaaaaagaagaagaaacttaaggactcaaactttgaccttgacagtggtccaattgcaagagtgcgatggtttagggttgtgcttgatgaagctcagacaataaaaaacttccgaactgtagtggccagagcctgttgtgggctaagagcaaagcggagatggtgcttatcaggaacacctatacaaaatgcaattgatgatctgtttagctatttccgttttttgaaatatgatccgtattgcacgtataactcgttttgcacaatgattaagcacccaattgctagagatgcaattaatggatacaagaaacttcaggctgtgctgaaggtagttctcctgcgtcgtacgaaagaaactgtgatcaatggcaaaccaataataaatttacctcctaagacaattaatctgaataaagtagatttcacacaagaggagcggtcgttttatttgatgctggaagaacgctctcggcaacaattcaaggcatttgctgcggctgggacactcaaacaaaactatgccaacatccttttaatgttgctgcgacttcggcaagcctgtgatcatcctattcttgtaaagggcaatcagtcagaatatggaggtgatggttctatagaaatggcaaagaaacttcctaaggaagtggtgatagatttgcttgcaaaactggaagtggggtcaacactttgtggcttatgcaatgatacacctgaggatgctattgtgacaatttgtggtcatgttttctgctatcaatgtatacatgaacgaataacgactgatgagaatatgtgccctgcccctaattgcagtagaacattaggtcttgaattgttattttcgtcaggagctttaaagatttgcatctctggcaaatccagttctgcagtagctagttcatcatcagataacgagtcatcttcaatcagtcaaagcagctttgtctcatccaagatacaagcagccattgatatactgaattcaatcattgtcatggatcctcttactgaaagttatacaatggaatcaagcagaagtggactaggccctgtgaaagccattgtcttttcccaatggactggcatgctggatttgctggagctttcactgaatatcaactgtatacagtacaggagactagatggaacaatgtctctcaatttaagagaaaaaaatgtgaaggattttaacactgacccagaggttagagttatgattatgtcactgaaagctggtaatcttggtctcaacatggtttctgcttgccatgtaattctccttgatctctggtggaacccttatgctgaggaccaggcagttgatagggcacacaggattgggcagactaggcctgttactgtatctcgcttgacggttaaagacactgtggaagatcgtattttagctctgcaggaggaaaagagaaccatggtgaactctgctttcggtgatgacaaagccggcggccatgcgacccggctcaccgtggaagacctgcggtacctatttaggatatgattgcgagggaactctctcaatgcctcggtcaacttgtcagggcatgatgcgttgtaccttgtaatcgtagtccggcaaaagggcggtgtaccattgcgagggtaggctcattggtccatgtccaccacgccttgctgcagctccagttttgtggtgctcagatttctagatgggtaatctagggctagatagcatgtgtaattataacccccaaccccccctccccggggcatggaggagagttccgcagtgccaatgctttatgatttagtgtatgtatatacatgatcaccatgtctaacttgcaatgagttgttttagctcgagatgtgagactgatactgccagcggctc

SEQ ID NO: 34161 - DNA, 1233 bp, Zea mays
  Clone ID: UC-ZMFLMO17223C10_FLI
gaaagctgagaagagatattctcaacagaaacacctttgccatggaagccatggatttcctataaacaaatagctccagtgagtaaaattataaatgggtagtcataagacgtgtaaacgtacctaaagcagagcatatagttcaggaatattctccacaagtgtctcaaataatcagatccaagcaaccatgagcatgacaaaattaagtattaggtatgtattgtttcatttgataattctaggatgtttgtacttcacatcagagttcagttgtttcaacatctttgtttctctaatgcagctactactacatcctgaatctgatgattcagctcaactttcctagattgagactgaaaagctgctagcccagttagttgagactgagatgaacagacgtttgaaggaggacacttacaaaggaaagaagtttaatgcattctgtcacttcttgggctaccaagctaggggagcactgcctgcaaagtttgattgcgattatgcctacgttttggggcatgtgtgctaccacatcatagctgccggattgaacggataacggatacatgactacagtgacaaatcttaagaatccagtgaacaagtggcgatgtggtgcgactcctatttcgtattactactttattcgcttgatgggacgcaaggcttcccatgtggcattggaatgtgctcttcaatcacatccaaacatggtcaaattttcaccattgatccaacctctgctacggcaatttccagcatcggcggtgtgctctttacaaagccttagagctgcctctcctgcaaagtctgaacttgcagagatagtcccacaagagaaatcaccaaaagattccattcaaccaatgtcaccgagtccaaggtattctacctcaagatgaagggcgactaccacaggtcaggcagagagccttggaaccgaactcttggagatggtgcctagcagggaagaggagattaagttgaaagaataaagggaggatgctttgtcgacttttgtagttaatgattatgtgagacttcagtttaagggctcaacttttactggttcttggaagtcatttagtagccctaagatttcatcagcattcttagtagtaattgctatagtatcaaatgggattgtggtatgagttgctcgagtactaagtactaacgttgttgtacattgtgaagctaagtgggtaatatcaaaagggattaagattt

SEQ ID NO: 34162 - DNA, 1277 bp, Zea mays
  Clone ID: UC-ZMFLMO17223D05_FLI
tgatattcctcacccaggaataggcaatgcacgtaggttgcaagtgcctaaccaagacatgcagcataaggtactgatagaagctgtggaaaaccatatgcctcaggcgattgttattgatgaaattggaactaaactagaggccatggctgcaagcaccattgcacagaggggcatacagcttgtggcaactgcccatggggtaacgatagagaatctgatcatgaacccatcactagagatgcttgtgggaggaatacagagtgtcacacttggtgatgaagaagctaaccggagaggagttcaaaaaactgttctggagcgcaagggcccatcaacatttacatgtgctgcagagatcgtctccaaaaaagaattacgtgtccatcgtagtttggaagccacggtagatgctttactcgcagtgactctctaaggaatgccagaagaagcttagactctgcatttagtcttgactctgctgaagggcatatagtgaggtcagatggagctgattcaagctttaatctttatgcatatgggaacttagtttgtacgtaacttattggataggatgttctagatctccgagtcgactgccttgcaagccattcatcagctggagttggacgacagtgttacttcaacttataatatcagtgaagctgatgcagtgatcgcgttacattcaaagctcaagaagaactatcagattcaggctgtgctgaaatctcaagatataccggttttcctcgtaaagacaaactccctgcctcaaatcaccagggcactccgtgctcttgtcgacgatcacatggacgaagtgatagactacaatgataaagaagaagcaaggtcatcagaagaaaccgatgctctggaggaggcaaggctggcaatcgagcaagtagtgattccgaaaggcgagagcgtgcagctactgccaaggccatcaagcatcatctcgtcccaagtgggtctcgtcgaaagcttcagcctcaagtgggaggtcgtaggccaggagcctaaggcatgcgtgaggatccttccgcactttgcgccaaaacaagtcgaagctgtcgcgcgagaaaccccagcggagcccgccgactcggactgggagagccacgatgactcggatcatacccagagtggcatcaccaggctacctttcctaccggattagcgcggcgtctggcgtatcctttcagttcttcgtggccctgccgcctgctgtgtatgtattccatttatttatcttggtaataacttgcacc

SEQ ID NO: 34163 - DNA, 693 bp, Zea mays
  Clone ID: UC-ZMFLMO17223D07_FLI
gtggcattagcggtgcaagctactacactgggactttcaacacggtgaacagatcggccgacggacgctacgtggctgtgtccagccgagggaacttctatctgacgtgggagcccgggcagccgttctggcaaccccacaacagggcggtggcacggaggattcagaacatggggtggagagcggacggtggactttggctgctggtgcgcggtggtggcctcttcctcagcagaggaaccgggataactgaagattttgaggaggtgcaggtgcagagccgggggtttgggatcctggacgtgggctaccgctcgcaggaggaggcctgggctgctggtggcagcggcgtgctgctcaagaccacaaacggagggaagagctggatgcgcgacaaggctgccgacaacatcgccgccaatctctactccgtcaagttccttgatgacaggaaaggcttcgtgctgggcaacgacggcgtgttgcttcggtatcttggctgacattctatgtatatgtgtgtacagcgaacggcatgtgctgctgctactactactgtaaaaggctgcttactgtgcttgcgttctctcttctgcaacccaaattgagtgtaaagatgcatgtgctgcttgctaggaacttgaaaaccttgtatacccgtatctactatctatatatatgctaccttgttgc

SEQ ID NO: 34164 - DNA, 1251 bp, Zea mays
  Clone ID: UC-ZMFLMO17223D08_FLI
aaccccaacaaacttccaggcgacggactgaggatgagtgaagaggataaggctgctgcttctgctgagcagcctaagagggcccctaagctcaatgaaaggatcctctcctctctgtccaggaggtccgtagctgctcatccatggcatgatctcgagatcggtcctggtgctcctgctgtattcaatgttgtaagtaccatcattgctttctaacggcttggcatgttatatgtttgctctgctgaaacatttgatgcacctacaacatactggtacatgagtctgttgacagtggtttgcttgttgaggaaaaataagtgcatggttttttttaattacgatatttaacaaatctagttagctccaaacaatgaccgtgttatataattttttattcaggttgttgagatcacaaagggaagcaaagtcaaatacgagcttgacaagaaaactggactgattaaggttgatcgagtcctttactcatcagttgtataccctcacaattatggtttcattccaaggactctttgtgaagacaatgacccaatggatgtgttggtcctgatgcaggagcctgttgttcctggttcgttcctgagagctagagcaattggccttatgcccatgattgaccagggtgaaaaggatgacaagataatagcagtatgtgctgacgatcctgaataccgtcactacaacgacatcagcgagctgtctcctcaccgcctgcaagagatcaagcgcttctttgaagattacaagaaaaacgagaacaaagaagtcgcagttgatgcattcttgcccgcgacaacagctcaagaagccattcagtactccatggacctgtatgcccagtatattttgcaaagcttgaggcagtagattgcaagcaacaatttatctatcatgcgtcttggatcggggcgtgattttaataagccgaatcgcttgctatattgcgaaccttggaattgagaacagcgtcactagctgtgattcgctcctttctcgttaaattatcatatgaataggccaagtccatacgtttaccgtgtggcgctctgtcagtcttcgtctacccaagtagctagctgcatggagggatgtctagcgttgctatgagatggcactcgtgggtctgcgggctgactacatgggtccgttcctgtgttttccgtaaaataaaattataattctatataattgaatcatttaatttatgtgatctttttgtgtattccaatc

SEQ ID NO: 34165 - DNA, 1401 bp, Zea mays
  Clone ID: UC-ZMFLMO17223E02_FLI
ttgcaagccccgaagcttgtgatgtctctagtggaaaggttgaggatgctaagacacgaaatgagggtataaaaaaagttagaagaggcgaggatgcatgtaataccttgaagtctttcaaagatggagagaagcctcatgaaagcatcttcaaaagtttgacaccagtgtgcacacctcgtcatgctaacaaggtccaaccattggcagtagcaagtccacggggccaaaagaagaaatcagctgttgtcaggctttctttcaagaggcagtctttcgatggagaacaaactactgaaatatgttcctctagaaggtacttgatccgcccacgagctggattattggttccacaagctggtgagaaaatttctgaaggttgttggtctgtgcttgagccttcggcattcaagctgcgaggggaaagttttttcaaggacaaaaagaagtctcctgccccagcttgttctccatacacttcatttggtgtggacatattcatgtcccctaggaaaattcaccacattgcccagcatattgagcttccatctgtaaagccaaatgataaaattccttcgctacttatcgtaaatattcagatgcctacatatcctgctgctatgttccttggtgatagtgacggtgaagggattaatctggtgctatatttcaaactgaacgataactttgagaaagaaatttctccccagtttcatgacagcatcaagagacttgtaagcgacgaaacggagaaggtcaagggtttcccattggactcaacagtccctttcagagaaagattgaagatattggcagggttagttaacccagatgacatgaacctgagttctgcggagaggaagcttgttcaggcttacaatgaaaagccagtcctctcaaggcctcagcacaacttttatgtgggatcaaattacttggagatcgaccttgatgtacaccgctttagcttcatctcgaggaaagggctcgaagcattccgagaaagattgaaacatgggatgattgatctcggtctaaccatacaggcccagaagcaggaggaacttccagagcatgtactgtgctgtgtaaggctaaacaaaattgattttgtcgataatgggcaaataccaacactactgccatgtgacgatgactaaaaagttcggccagcagcctagcaacaaattaactgaaactgatgtttcggccaagaacatgagcatgtgctcacaagtccattccccgaagaattgtgagatgaactgaagtggggatctgcgtgtatagtcatggtttttttttttctttcgtattctggtgttgcgaatcaaattctgttggaacttggaagttgatttgcgagtccggaattgaacatgccggcaagacgtcttatcc

SEQ ID NO: 34166 - DNA, 699 bp, Zea mays
  Clone ID: UC-ZMFLMO17223E05_FLI
ctcagcggcatattcctttgattttccttcaaaacattactgggttcatggtcggatcaaagtctgaagctagtggaattgccaaagctggagcaaagatggtcatggcagtttcctgtgctaaggttcctaaaattacaataattgttggtggaagttttggggctgggaattatggaatgtgcggacgtgcatatagcccaaactttttatttctttggccaactgctaggatatctgttatgggtggcatccaggcagctggagttctcgctcaaatagaaaagaacaacaaaaggagacaaggagtggagtggagcaaggacgaggaagaagccttcaaagccaaagtcgtggaggcttacgacagagaaggaagcccgtactactccactgctaggctatgggacgacggggtcatcgaccctgctgacaccaggcgggttctgagcctctgcctctccgcttcggccaagccggttccggaagacacaagatacggtgtattccggatgtgaataaatgtgtgtgagtaataacgcagacgtgtttaataaaaagctgcctgcacgcacccaatgtgtgtgcacaaataaaaatttcgccctggtttctgtcgtcgaaatatgttgaagagtgttgttcatttcatatattactatctgatgaatgggaagtgttcttcatttgatagtaggt

SEQ ID NO: 34167 - DNA, 1564 bp, Zea mays
  Clone ID: UC-ZMFLMO17223E07_FLI
ggattggaggccacaaacttgcagcagcaagcatgatggttctttctggtcaatcatttcctgcaaatgctggtgaatcagtgagaaatgcgcatgtcttggcagtatttaaagagggtagagactgtacatcttcacttacacttagggagtatcataacaggccagtgtcaatgattgataatggagctaacatgaagctggatctggaaaacatagacaattctcatatgttgatgtcatcaccagacttcaatgcaactgtatgtcattcttacaaggatcaaacattcttaacactggaaactaatacctctgtgatgactgagaaagatagcagtcaggcccgtaatgcaagccagcagtttgtcagtactgctttaagaacacaaaatgtgtctcaggaaccattgtgtaccgcgattgctccaaagcaactcatagatcctcaagttcagaaaaaatcatatggtgtttttggttctggcagtgcccatcttgggcatctgactgttggtaatcagcaactaaatgagagatggcatcaaagacaatctgattctttatccagtgtggaagttagagctaggggtcattcagctatgatagtgcagcctgctctggaaaatcacagcagaaatggagttgcacagaagggtcctcgcatagctaatgttgtacatagattcaagtgctctgttgaacctatagaaattggtgctgtgttatctgggaagttgtggtcctcaagtcaagcaatcttcccaaaagggtttaagagcagagtaaaatacttcagtgttgtagatccagtacaaatgacatactacatatctgaaatattggacgctggacagcagggaccactttttatggtgactgtagaaaactgtcctggtgaaattttcataaacatctctcctaccaagtgctggaacatggttcgtgaaaggctcaatatggaaataaggaggcagctcaatatgggaagagctaaccttcctacactacagcctccaggatcagttgatggccatgaaatgtttgggttgttaacaccagcaatagttcaggcaattgaggcccgggacagagattatatctgtacagagtactggcgatcaaggccccatgcaacaattgagaatcgagacaatcagaatatgtcacctcaggatccaccccttgttgcactgagggggctcttccagcgggctaattgtgatgaactgcgagcactacgcagtttgctgatgagcaatagaattctgggcgacaattctaggcagcaggcttgccaaatccttgatgaggagattgcgaagcaatggcactgaccagcgtaaatacaggatgttgtactaaccaattgtttggcatgattttgttttgacgggataaatcagttttaaggcttgcttcttccgttgcccttgtgcccattcttttcattcttgtgaccatacccaattctgtaagaattgctaccttattgagtgatataagaggtgcctcatctactactacggggttgcaaattatgatccttgtttttttcttgatc

SEQ ID NO: 34168 - DNA, 1707 bp, Zea mays
  Clone ID: UC-ZMFLMO17223E11_FLI
cacattaaaccttgaacgagttaggcaaatcaagagtcgtctggttgcgatatctggtcgagtacagaaggtgagggatgagcttgagcatttactggatgatgaaatggatatggctgaaatgtacttgacagagaagcttactcaacaagaaatcagtgaggcttcatctagagctgaggttgatgatgcatctcttacagaagacgataggcaagtatcatagcaagtttttttttctttgaaagaacggaacaagcaatactccatttgttatccacggataacatgaagtggtttatatgcatcttcttgcaaatttgcatataccaattctctaatgtattttatcatttgtgtgtgtgtgtacgcgtttagggatgaagattatagaagtgaaccagatggaagcaatggtagtgttataggttataagcccaatattgaagagctagagatgcttctagaggcttactttgtgcaaattgatggcacacttaacaagctatcacatgtaatttcacttgccctcttactcacatggttgtcaatattgttttgtttaggaggtactatatggtataacaacaaatgttttcttgaagtgagatatcactttaaacacaaatctaaagtatgatgaaagtatttgatttgtgttgggatgatgctgttacgaataaggtataacagatgcttccacaagtaaaacaaactaaggagttgtaagcgtttcactattgcacctttaaatattggcaaagtgtctagttggtttgattgagcgttccctgtcattaattattgttttctacttatttaactatttctttaataaacaacaggctgtttctatttggtttagtaatggcatccatttatctaaacaaactaatcttaacacagcatagaattagcaatttcttgtaaaattagataacttaagccagtgaatcctgtgtcagtggtttactttattctgcacctaattaccgatagttcttggttgcctttcctatcagtgacacaaggacactagtgtggggagctgagcttcacattcataagatgtcttattcgcatgtttctgatcctttaaatgtcctctatgattgaagctgagggagtacgtcgatgacacagaagattatatcaatataatgttggacgacaagcagaatcagctgctgcagatgggagttatgctgtcaactgctactgtcgtcatcactgctggagtggctgtagttggtctttttggtatgaatattggcatatcactttacgcagacccaacaaccgaggaggaaactcgagcagcaaataggaaattttgggaaactactttcgggaccgttgctggctgcgtgattttgtacatcatagccatgggttggggaaagagaagtggattactgcaatgatgcggaagcatgactgcatgagtgttctgtacccagtgaatactgggttcacaaaaatctccaaaatgagagattcagcttgttcgctgcggcttgctgcggctgcaatccggctgcggctgcggcttctacagtatttttctctctatggattgcagctgcagcagtccaaacagctgcaacagtgtcggcttgtagccaaccgaacacgcccattgtattggcatgctgctcgatcatactgctgccagaaaatacgcctcgttccactatgctggaaaag

SEQ ID NO: 34169 - DNA, 1376 bp, Zea mays
  Clone ID: UC-ZMFLMO17223F12_FLI
tgatactcctagtgtacctgaatcttacactacggtcacggagtcaaagtttcaggtgcctgtggaggttctttttaatttgttattgtctgatggtgcttttggctttttggatgatttccacaaaaattgtggtgacaaagaatttagttgctccaaatggcgtacagatgaacaagggggacttgtaagggatgtctcatttttgcacccaataaaaatttatcttggtgcaaaatttgggacttgtcaagaggtccagaaacttcgtctttacaaaaacaggcgtctagtgattcaaacctctcagtcaataggtgatgccccatatggggaccatttcactgtagagggcatctgggatgttgaacaagatagcctagatgagaactgttgttacctcaggatatatattaatgtagccttctcaaagaaaacaatatttagagggaaaatagagcagtcaacaaaagatgaatgccgagaagttttcagtctctggattaagctcggccatgatcttttgaagcaggagtgtgatcgatcaaaaggcacttccagcacaactgattctggtgctcaatcaggggctataacgaacgaggaaaataccggggaagtagcagtacccatggtgagtatctcacaggatgtatctggtgcgaggagcctcattcctccttttcaagatccccagcagagaacaggaagagattcttccatcgggtccacttcacaagaactgtggggttcactaacgtcacacatgagatcaagccaacttggtccagtactagcagtggcgctggtggctatcattgtcctattgcaggtaaccatcatagttctgctaactaggtccccccaggtccagatggctcctcacgggatctcgacgggcagtttcgggtacagcaaagaaagcatggagtgggcgcagaagcgcctcagcctactcagggaggagatgcaggtggctgaggcgcacatggagaggatgaggcacgagtttgcctggctcagatcttacctggagggactggagaggctgaggcgccgcacatgaccgcagcgcgtgtacacgacaggggcacgattccgcgatgcggattcgttggtatacagtacgaactcggagacgttgttcaggtttcttcttcttctgtgttgctacagaccgtacagatgcaaacggagagctggtgccgtggtggtggtgttgcagaggtattgccgtaaggcagaactgccagatcccggtacagcattcaatgtaaatagctgggggacgtgtcattgccatgacgatacagcggcgtgatgttagaaacctcgcactactttttttttcagaaagtaaaaaactttttgtggtt

SEQ ID NO: 34170 - DNA, 1306 bp, Zea mays
  Clone ID: UC-ZMFLMO17223G04_FLI
ggagatccacctgcactcaatatcattcagtacataccaagcacttacaactggaaagcagctgggcttactgttactcagcaaatcaaaaccctcagctcttctgaccagtatcttcaaatttcattctccatttctgcaaacacaagaggtcagactgccaatataaattttagaattccgtcatggacatttgctgatggtgcaggagcaactttaaatgacaaagatttggggtctatatctccaggatctttcctatcaatcaccaaacagtggaactccgatgatcacttagcgctacactttccaatcaggttaaggacggaagcaattaaagatgacagactggaatatgcatcccttcaagcaatcctgtttgggccatttgttcttgctggcctatccactggtgactgggatgcaaaagctggcaacggcagtgctatttcagattggatcaccgctgtccctccagcacacaactcacagctggtaaccttcacacaagtatccaacggaaaggcatttgtcctctcaagtgcaaatggcaccctgacgatgcaagagcgacctgaagtcgacggcaccgacgccgccatccacgcgacattcagggctcaccctcaggaggactcaacagagctgcatgacatctacagcacaaccttgacgggaacttccattctgctcgaaccattcgacttgccgggaaccgtgatcaccaacaacctcactctatctgcgcagaagagctccgattccctcttcaacatcgtgcccgggctcgatggaaaccctaactcggtctccctcgagctcgggaccaaaccaggatgcttcttggtgacgggcacgaactactccgcagggacgaggattgaagtcaactgcaagagttcccttgagagcattggcgggatactcgagcaggcggcgagcttttcgcgaactgacccattgaggcagtatcacccgatcagcttcgtcgcgaaggggatggccaggaacttcctcctcgagccattgtacagtttgagggacgaattctacacggtttacttcaacgtcagggcctgagtcctgacgcttacacttgcagtagaagtaatacagaataaataatgtgcgcgcgacctttttcacacttgcagtagaagtaatacagaacagccaatgaagaagcaattgggttgtttgaactgtatcacacgcaggagtattcactttgtgtgaaaccacttgttatgcaataccaagcgagtcataccccgttccttcgatcatttgctaaggaagttacagt

SEQ ID NO: 34171 - DNA, 879 bp, Zea mays
  Clone ID: UC-ZMFLMO17223H08_FLI
gtcggctacagtgcacattgctaaacgctcccgccgtctcgcgagccgccgccgggtccttacgcaagtccgcgacgtgcatcgcctggagaggctcccgtctcgccgccctggggatcccatctcatctgtgcagccgcgcgtggcccaagggagccagaagctaagagttagagaggcgcgtgatgtcttcagaggaggcgagggcaagcttttcggagttggtggttggttcgccaacccggacagagggcgaaacttattcttcaggtgatatgtcgtctgaggagggtgcacacgtcacttgtttcacagaggatcttcacgatgtaacacttcactttcagatagtgaggttttctaaacagatatacgtgtgggttggatgcaacacagcaaagtttggccatttatatgctgctgcaaccactagaccggataacagagtgagtgttacctctgtactaggaggaacatctgataacaccggttcaagtatggctcgccgtctagtgctgaagactggcctgaacatagtcctggcatgcaacatcccaaaggacagccccatacttgaggctgctgcggagaggaagctggttgagaagctgaaaggtttgggctacattaaaaccccagctgtgggggctaacacttcctcggcacaatgatccgtggtgtgatctagtgagctttcggtcgacgtgtagcttcatcactacatccagcagagagcggttgtgatttttggcgggctttgactgtgctacctgttctctcatgtggcaaaaggttattgtgaacatgttcgttgtgatgtactccgccctaaaataaacccccttcgtatttcaaggagaaacaatcttaattctgact

SEQ ID NO: 34172 - DNA, 1787 bp, Zea mays
  Clone ID: UC-ZMFLMO17224A07_FLI
tcgctgggaatcccgctacccctgctactcgtaacatcactgttgatacggttgcaccggccgtcacgattgacagcatcagtgatgatactggcgcacaagctaatgacttcattaccaatgacgacacccttgtcttcaatggcactgcagaagcagatagcacagttgttgtcagcttagatggtattgaaatcggcactgtgactgctaatggtgctggtgagtggaccttggattacaccggcaccctcctggcagatggcgactatgagctgagtgtgactgccaccaatcccactggcaacagcgcaacagcaactcaaacaattgttgttgataccactgctccgactgtcaccatcaatgccattgcggttgatgacatcatcaatgccgtggaagcaggtagtcctgttgcagtcagtggcaccacgactggtgttgaagatggtcaagtcgtcactgtcaccattgatggcaatacctacaccgccaccgttactggtaatgcttggacattcaatatccctgtcgcagacattgccaactttgaagcgactgaagaagtcgtagccactgtcagtgacctagccgggaatcccgctacccccgctactcgcaacatcactgttgataccactgctccgactgtcaccatcaatgccattgcggttgatgacatcatcaatgccgtggaagcaggtagtcctgttgcagtcagtggcaccacgactggtgttgaagatggtcaagtcgtcactgtcaccattgatggcaatacctacaccgccaccgttactggtaatgcttggacattcaatatccctgtcgcagacattgccaactttgaagcgactgaagaagtcgtagctactgtcagtgatcccggtcgaaaaccactagattggcccccgtggtttgcactgccaaggccaactcttccacttttccttcccccactacggtttggggatggggtttactgcgattttgctgcatgacctggagcacctgggccccggcggaatccaccagtcgttctaactcggtcaaaccttccgcaaagctctggtcatccaactcactggttttaagtcccatcaccaagaccctttcctgccctgcttccacctgacgggcgatgaattcccgttcaaattccgcctctaggctttccaccaaatcgaggatggcttcttcggccaaatcttccaaggccaccgctggggaaaccacccaatcggctaccctatcccccatatcgtcactgctttggggcaataaatgggccaaataccccgtgtctatatagcctgtgacgccgccaccccgtttagcaaaaccctggccagtaacgcttagcaccactagggcatccaatctttgcagggccatggcaattaaactagattccctgggggcttcgccctttaaatccgtggtgaggcaacgaatgccggatagtcgtttttccccatagcggggcaattccaagggcggaatttgggtttgtcggggcgtacctacccccacccggataatttgcccccgtcggttcacatacactgaaaccggctgtttaatttcctgactgatggcccccaaacgctgggctaattccaccgttagcaggcgatcgccggggagacgctgttgatagaggcgctttagttgcttaatttgactggttttaagccgttgggtttggccgtagatggtatcgataggctttagtcctaattggtagattatggaggcaaaaaacagaagttgaatttatagcc

SEQ ID NO: 34173 - DNA, 2144 bp, Zea mays
  Clone ID: UC-ZMFLMO17224B11_FLI
catccctcctccagttccagctagaggaggcggtggagaacgaggatttcgcggaggccgccaaactcaagagggacatcatagaggccaccggaaacgacgctgtagcccacgtcatggccgagctcaagaatgctatagaggaacagcggtaccaggacgcgtcaaggttgacaaggcttgctgggaccagcttggttggtgggtgggatatgctaaggacactgatgattccatcgggagaattgtacgaataagccctggtgtcgggagatatgtggcgaagagctacaacccaaggcaattggtcactgcatcttcaggaactccattatttgaaattttccttgtcaaagaagatgatgagacatatacaatgaaggtggtacacatgcgaccaacaaaaggaacttcaggtgcaccatccatatcatcaacaataacagaaagcccagcaaaggtagagaatgaaaattcatcagaaagtagtgctatatctgacagtgttacagaggaggcaaatacagatactacggtaagaggaaatgaggatgctgaagagaaagcacaagatgttggtagcagcaaggatagtagtgtcgaaggattaaaaagtgttttgaatttttttaagtctcggattcctgaattcaaagttcaggtgataaatgttgatgtggctgaggaaactgaattagctgcaaattcgtctgaagaattagtgcaagatgatgtgaaaagtactccagaaagctcattggaagagccagccactgaggaactcgagcaggaggaagatgttccggaagaaaatacggatgaagaaagtaaaagcacggaagtgaagctttttattagtggagtggttcacaataaagaagatgctggagcaaaatcatatgttcgagttccagctgaaataaataacatggaaaaggactcctttgaactgtacattcctggagaaggttctgatcgtgatttggctgaaacaaaggctgcaaaacagaaagttgcagatatggctgctaaattagcctcagagcttatgccgtctgatgttgccaaggcattatggggtacagccaagagttcttcaaagataaataaagaagttcaggagcttttaaggcttacgttaagcaaggcccgagtcaagctgaccgaaaataccatttttaaacgaatcattatggacactaacagcacagatccatttaatggtctctatgtgggagcatttagtccatatggaccagaaattgtgcagcttcgtcggaagttcggccactggaacagtactgatgacgttgagtttttcgagtatgtcgaagcagtaaagttgactggtgatctgagtgttcctgctggccagataacgttccgtgctaagattgggaagggcaagcgacttgagaatcgaggagcatatccagaggaatttggtgtggtaatttcgtcctgccgatctgattgtttgaaagatgctaagatattgccagttacaaaggtcagggtagaatagctcagcctggattcaaaaatcctcgatgggtggatggtgagctgttggtactcaatggcaagagtacaattccacaccttggaggcgcagagctcggtttcctgtatagtgtacctgagcagagttttctggttctcttcgatcggcttaatcttcccgagtgatgagactcctaaagggagcagactcctcacatgtagattgcatgaacgcgcagaggccggccacagctccaagtgaccgaaacaggtctggggggccgtttccccatcgtcttctgccctctgggcttcctgccaatcctttctccgcacctactttttaggagctcatgtgcttaactcgtttcagagtgtgagggaaagtcgacaccattgctggtctaaactaacggaggagtcttaatactaataatatatatgttatagcatggtagtttgctctccaatgccacagttgtagctgtattgggtatgggcatgacagttttgcgagttttacccgtcatcgttgatttcagtaattaccgaattgaataaaaatcgttctggtgtatcgtgatgttacaattataataatataaaacaaggcaaataaagtctcatgatttatgatcgtt

SEQ ID NO: 34174 - DNA, 1427 bp, Zea mays
  Clone ID: UC-ZMFLMO17224C08_FLI
gctataaccttgacatgttcactaaagcaggggctgtttttaagataatcaaacaaaaaatcaaaatcttgaattgcagcgattttatattgtttacctatcaacagtaaattatcgttgtaaatattgaaaatttgtccacgttccttcccttccgtatttgggtgacgttggcctaatgtaaaaagagctttttgtaaaagtaatttaatttcgctagaaataattttgtttgtaatctcactgactatttcattgcttgaatttgtagaaacatgttgtaaggcatcatttttcaaaaaagataagtagttgcttctaacaatactttgtattttcgataacttcagatctgtccgtagttttatattttttgaagactgcttaatataagcatgtaaagctttggctatctcgtctaatccgtgtgaaaaatcacttataaattttaaatttaaacataaattagtagtcgcattattttcttttgtttttctaccctcaataatattttgaataggaataaatcctaatttaatttcagggcgatcccgataagcgtagccggaacttacaccgtattcaaaattccgtgaaaaatatggtacagctcctggatgatattttaatcattaaccgtgccgaagcgggcaaattggaatttaatcctaattggttagatttgaaattattgttccagcaatttatcgaagaaattcaattaagtgtcagtgaccaatattattttgactttatttgtagcgctcaagatacgaaggcattggtggatgaaaggttagtgcggtctattttatctaatctgttatctaatgcgattaaatactctcccgggggagggcagattaaaattgccctaagcctagattcggaacagattatttttgaagtcaccgaccagggcattggcatttcgccagaggaccaaaagcaaatttttgaaccctttcatcggggcaaaaatgtcagaaatattacgggaacaggactcggtttaatggttgccaagaaatgtgttgacttacacagtggcagtatcttgctaaaaagtgcagttgaccagggaacaacagttactatctgtttaaaacgctataaccatttgcctcgagcttaggcgtagaaacatgtcacggcaattcccaagctctaattttaggttcggcgtgggtattttactttccacagttttgaccggcaggggagtcaacaccttacggtaaaacaaactattccagctcccttgctttacaggggactatcagcgggaatttcctggtaactcacgctatcgggggttatggcaagggccctagactagttgtagttgggcggttttgcgctttttgcggccacctttgggggcatctgctaggcaatatttgaccacattggccaattcttccaat

SEQ ID NO: 34175 - DNA, 1731 bp, Zea mays
  Clone ID: UC-ZMFLMO17224E06_FLI
acggtttgggccgagcgatttacattaacctccaggacagggatgtgaaacagggagccagcacccttactcaacagttggcccgcagtttgttcagtgaagtagggcgggaaaatacggcggggcgtaaaattcgggaaatgtttgtcgccctcaagttggaagcggtgtatagcaaagacgacattttaaaagcctatttgaatcgagtttacctaggggctggtaattacggctttgaagatgcggcccagttttatttcgacaaatctgcccaggatttggatgtgggggaagcggccaccctagtggcaatgttgccagctcccaatctttacaaccccgtgcaggattatcaaacctccgtacaattgcggaatcgggttattgagcgcatggccatgttgggcatgattgacgaacaggaagccaaccgggctaggcgatcgcgcattcaggtcagtcccaaggctacccaaaccctttcccaacggcaggctccctacttttacggttacatttttggcgaattaaaccatttactaggcgaagatgtggccaaagaaggcaattttgtcgtggaaactagccttaacttaaaaatgcaggccctagcggaaaaaagcttacaaaaattcctcaccacggagggaaaaaagtatgcggtttcccagggggcagtggttaccctggacagtcgtaccggggcagttttggccatggtggggggcaaaagttaccgggaaagtcaatttaatcgggcgagccaagcccaacggcaaccaggctcaacgttcaagctttttgcctacacagcggcgatcccaaacagcggcaaccggatattacgttggcgaaaacttatttagactggcaaccgaccattcccctagatcaaggtttggcaatgactatcgaagatttcaaatctcgccacgaaggatgattaatcacgaccgcctctttaaggaacttttgacaattttttttgcagagttcctttagcaaaagttcagattgctccccccgaccgcgtcaaagttaaggctgaatgtttgcgactattggtaaccctcaagctagatccggctagaatgcaattaatctctggctttgtggacacctatctcacccttaaccaagcggaagagacaatttttaaagaagctatcgctgaattttcccccctggaacaggaggacgttatgcagttaacaaccagttggatgcttcagggcattgaacagggcatcgaacgtggacaaaaatctctgctactcaaacaaattagacatcgttttggagagttgaatgcagttaatttgtcgaggattgacattctcacagtgcctcaattggaacagttgggagaagtgctgttggactgctctgatttcgcagaattagaacaatggctagcggcccaatctgaaacacctgagcgaaaaatttagtgaatttccagaggtggatgttgccatgaatgttcccaaagaatcaggtttcaaccatcggcttccaattccaaactgagttgataaagttgccgacggggcagtttagtttcttctgccaattgccgactagcctgggagcgagttaaccctttagccattaaacttctcaattcgtcccgtagattttcttcagagaagctgggcctgtcctccggtgtagccccggcaatgactaagcaaaattctcctttcggtgtattttccgtaaagtagg

SEQ ID NO: 34176 - DNA, 821 bp, Zea mays
  Clone ID: UC-ZMFLMO17224G11_FLI
gtaaacttcaaagtatatatcaccgtagcggctaacttttctagatattttgggttcgttacagtaggctaatatatttactaatgaataaagtagcccatttattctttctttgatgcgttgcaaaaaatagagtttttcatgaaatggactgataattgagagacaatcttttattgtgtttacacaattttcacaaaagttttgattagtcattttttcagaaatgaaatttagtggagcaataaaatagcattaaattatttaattggacattaataactattctattttttaaaagaattaatcgacttatataaaaattttactcatttatttcaaataagaaagatgcagttacaataaattgttatggatacagtttacttttcagcaactgttatggttactaatcagcttaactgtaatgcttttctaatttagaaacaaaaaatgaagcctaagtttatgacaacctcgcctaatcagaccctctaccaaacggtagcggatcaaattcatggactgattagcgaagggactttccagccaggcgatcgcctaccatcggtgcgaaaattacatcagcagtggtcagtaagtatttcaacagtcttggaagcttatcgcctacttgaggatcgaggattaatcgaagctcgtccccagtcaggctactttgtcaaaaccatattgaatttcctacccgacgagcctagtcccagcacacctcagtctgccgataatcctgttgatacgtctttagccttccgtgtaaataattcaatgttgaaacctggaatcattggcttaggggcggc

SEQ ID NO: 34177 - DNA, 881 bp, Zea mays
  Clone ID: UC-ZMFLMO17224H10_FLI
tgctctttcaaaatatgtggattggacagacagaggtacatgcatcctttttggtgatgctgctggtgctgtgttggtacaggcatgcagcgctgatgaagatggcttgctaggtttttgtgttcaaagtgatggcaatgggcaaaaacacctaaatgccgcaacggcaaacgatgagtcaatcttgtccaataccaatggtgttcctggatttccgccaaagaaggcaacctactcatgcattcagatgaacggaaaggaagttttccgctttgctgtccgatgtgtgccacagtccattgagaaggcactccaagaagctggtttgcccgcctccagtatagactggttgttgttacatcaagctaatcagcggattattgatgcggctgccagtcgattagatatcccgtccgacaaggttatttcaaatcttgccaactatggcaataccagcgcggcatccatcccgttagctttggatgaggctgttcgcagtggcaaggtgaaggctggcgatattattgcggcgtcaggttttggtgctggacttacctggggttcagctattgtcaagtggggctaattatttgacgtgaaccgtaaacatatcaatgagatagcttcaagccttcgaaggcctcgggaggcctacatctgttggttcgtttccgtgtttttctgtgcaacatttttctttcgcatgtaccagttttccttgcacatgaaaatgcagtgccattttaccgtaatccatctgttccttaggctcattacacagttgagagagattgtaatgtagttggcagtagtttgagtggtggatgtaatgtaagttcttgaattttgcatggagataaatttggtggggttaaaagatg

SEQ ID NO: 34178 - DNA, 1126 bp, Zea mays
  Clone ID: UC-ZMFLMO17225C08_FLI
ttcatccagcggggcatctgctccaggtcagaccacagttgccacaccaattcgatgggggcatccacttccacttgcacgctatgttctaaccaattagccatgggttttgccgatgtttaccaaaattactgagatgccaggactgcagtttgcaaacgggcttggttggccaaaatcgcctgggccgcttgacgaccggacagggtggccccctccatactatcgatgtaatcctgttgggtgtagctaccggctaaaaagaagttggctatgggggttgcttggctggggcggaacaggtccatgcccggtgcttcccggtacaaagattgggctagtttaattacgctgtaccaagtcatattcaaatccgccgctgaggggaaaagggctttgacttgtttgagtacccgataggcgatcgcctcgttggattctttcataaaagggtcaccgggggtcaataccagttgtaatagggaaccttcccctgggcggtaatagtcggcggggctagtgagggcgaggtcggcaaaacaggaaaactctgcgtcgctggtgtagagcaaattatctaagccaaaggcttgttccaactgtttgcgtttagcgggatcttagtcctgaaagctttccgccggagtgctatcagcgttacctcaacggttacatctacgcttcccgtgaccaattgccggattgtgccatcaattgtgcagtgcaatgtttcaccgtggcggaatcccagtccagaatagttgcccccattgtttttgaccatagcctttggggcctgctgattgtgcaccaatgctccagttcccgcacttggcaaacggcagaaatccaactgatgcaaagccttggtaaccaattggcgatcgccattcaacaatcattactgtacgaacgtttgcaggaggagttatcggaaaggcaaagggccgaacaaaaactgttggaagtgaaccaactgcaaaaaggcatttttgatgtggccaactacatgattatttccaccgacaggagggggattatcagtacctttaatcgcactgcggaggaaattttgggctatacagcggcggaactgattggccagcaaaccccgttaattttccac

SEQ ID NO: 34179 - DNA, 574 bp, Zea mays
  Clone ID: UC-ZMFLMO17225G01_FLI
ttagcaattccccaagctcttctggagacaaattaagttcaaccagggattgcagccagttgacagagatgcgcatgggtttccttttctactgatttgtattaatgcttgcttagtttgcgatggcgtcagcggcatctattgtatcgctgaaggcattaccccaggccactccgggtcatgtttacaactttcggaacaaatttatagctctggaagctcaatgaaccaaagtttcccactaactagcctaaaatagagtggccttccccatcccatcaaccctcggaaaatttaacgaatttaatacagcataggttaataggttagtcttacatcacaccatctggtgaaccggaatgagtttttgcgttaatcccaattgtccccatccgaaaaaccccaataatgtgcaggtatgccaggcctgtgggaatagtctgcgcctcaacggccgttaccaaaccttgggtttattaggaaaagggggatttggggccacctttgccgcagcggacgtggcactgccggggactcccatttgtgtggtgaagcagttacggccccaaaccga

SEQ ID NO: 34180 - DNA, 579 bp, Zea mays
  Clone ID: UC-ZMFLMO17225G10_FLI
tgagcgagatttacctcatccgggcaaacctcagccaagcggatttggtcaaagctaatctatccaggacagtgctatacgaggctaatcttgatggggctgacctcaagggaactaggctattctacggcacctgggaccaggctagtccccgcagccgcaaccatattcccaactacgaaaccggcgaatatacgggcgcagtggtggaaaatgccaattttagtaagactaagaacatgagtgaggagcagaggtgctattgctgtgcctggggaggaacgttaaccagaaaaactatccccggcggctgtgaaggaatcgaaaatcgtcttgatcgatgaatgattgaaagagcaaaaaggttaggtagagaattaatgaaacaattttcaacctgttagcttctcctacgaatgaagggaatgatcgcctttgttatttgttgcggtttgtcgcagtagggccaaggagttgatgtacaaaatacagccccccagggcccataccccttcggcaaagacattaatgcggtgggtcatttcccggctgtaaaggtaatctgccctagcgggggaa

SEQ ID NO: 34181 - DNA, 573 bp, Zea mays
  Clone ID: UC-ZMFLMO17225H04_FLI
cccagtgcaactaatgtctaaggcggcctacgccctgccggagaatttcacagtgcaatttgtccgctccctggtgacggggcaagcctggtttggtatttcttggtgtgccctttatctagaaccggccaatgtgttggccaattttcctccggaaaagcgtaatttacgcccccaagcagtgcaaaacgccatggagtatctcaatctctacgaatcctattgtttagagggggatatttaaatttggactaaattgacagcatttttggccggatttttcagactttttaggcgatcggggtagaatccaagcaagaactccctgtattttgccttcccctatgtctaaccaaccttcccccggtggcctaattaagctcagcgtcggtgatgtagtttccggcggcctcagggtttaccgcgaccatttcaaatcctatctctggctggcagggcaatcctacctttggcttttaattccctttgccataaccgggttagtgatgttagccatagctgggctagcggcggtaatggagccgatcgccgtgggaggcataatagttttgg

SEQ ID NO: 34182 - DNA, 1368 bp, Zea mays
  Clone ID: UC-ZMFLMO17225H06_FLI
ggcttgaaaaaattgaacctgaggtccccatcggcagatcgctatgcgcggtttttggtggaaaagggctatgcggtggccatctgtgaccaggtggaggatgcagcggaagcccaggcagaaaaacgcatggtggaacggcaggtgaccaagttactcacccccggcactttgaccgatgacagtatgcttccggccaagcggaataatttcctggcggcgatcgccatggtggaggataaatggggcctggcccatgcggatatctccactggggaattttttacgtgccaatccagtaatttggatgacctagcagtggaattacttcgactccaaccgtcggaagtattgatacccacctctgcccccgatattcgcaatattttgcgccctggggaaccttcagagcatattcctaaacagttacccaccagtttttgttattctctccgttcccaagcgcccttttccttggtggaagcaaaacagagattactaaccacttttcgagttaaatctttggagggcatgggctgtgaaggtttacccctagcaatccgggcggcggggggattattggaatatatcgaagatacccaaaaagcccatgtggtgcccattcaaccattaaaaacctatggcttaaccgattttctggttttggatccaaggctttttagtttggggtttacccattgtgatgattgtggtcggtggtgctagttggtggttagcaggcttagccatggagccggtttatcgttcctaccaacaaatccagcagttcaccgctgatattgcccacgaattacgtacaccgattacggcgattcaggcaacgttggaaacgacattaaatgcagaacctaatgctgaagaaacccatagcaccttgcaaaccttaaaacgacaaaattatcgtctcagccatttaatccatgatttattactcctctcccgcatggatttaacaacagttaatccgacccagtttaccctttgttgtctcaatgatttagttgaagatttaaccgaagaatttgccagtttggcgatcgccgctggggtattgttatctgcgaagttagacaatcaagcaaatatctgggtcaggggagaagaagaacagctttatcgtttggtgggtaatttaatcagtaatgccattcactacaccccaacggggggcgaggtaaccgtcatgcttgagaccgataaacagcaagccatcatcaaagtccaagatacgggcattggtattgcttcggagaatcaaagccgggtttttgaccgtttttatcgggtggatacggcccggtctcgacaacggggaggggcaggattaggccttgccattgcccaggc

SEQ ID NO: 34183 - DNA, 928 bp, Zea mays
  Clone ID: UC-ZMFLMO17225H10_FLI
aactcaccggtaatccagctttgcgagagcagttaattcgtcttattcaaggactaagtaatttggtttccaccacagaacatctgacgaaacaggtgcaatatgcccagcaattaaatcaactttccgatgatttggccctggtggccagggcccaggaattgcaaactcctagagttattcccgcccaaccccaaaaaaccgtcacaaaaccttaggaaacccctaaaattagccttcgaggtgtgccatatcaatcacctgaattattaagtttaattacctttacccatgactgccgtacccccatcctgccaaatccttgacggtaaagccctcgcccaaaaaatgcagggggaattacaacgggacattgcccaactggtggcccagggccatcgatcgccggggttggcggtgttgatggtgggggacaatccagccagtgccgtttatgtccgcaataaggaaaaagcctgtgaaaaattgggcatggtttcctttggcaagcatttttccgctgatacggaccaggaaacattgacggcggcgatcgccagtttgaatgaggatgaacgggtggatggcattttggtgcaattgcccctaccggatcatctcgatgcagtcaaactattacacaccattgatcccagtaaagatgcagacgggttgcatccagtcaatttgggtcatttggtgcggggagaagagggtctaaggagttgtactccagcgggggtgatggctctattggcggaatataaccttgatttaacgggcaaaaatgcggtggtgttggggcgcagtattttggtgggcaaacccctggctctaatgttgctagagaaaaattgcaccgttaccattgcccattctcgcacccaaaacttggccgatatcacccggcaagcagacatcctcgtag

SEQ ID NO: 34184 - DNA, 634 bp, Zea mays
  Clone ID: UC-ZMFLMO17226A05_FLI
tctggcggtatagcgacgccatcattccccgaacaaaatcccctcaagctagagatggcctgggggattttccttgatagttttgcggtttgattgcagttttttattagtaataattgccgactttgcgatggtgtacggcggttaacccttctgctttagctacccgaccattggttacttggctgtaaacaatccagtgatcactacattccatccgactagctacttcacactccaaataggctagcgcatcggtcaaaataggcgatcgccgcttacccctggccccattggaacggcgaggctatggctacctgttggattttgtcgtgatttggttattcagcagtttagctacgggttgggtccagctactaatttttttggttggttggtttgccctgagggtagttttagtgtccgctaaccaggggcaaagtttggggggctgggctttcgacactagggtggtacacctgaaaatgaaacgtttaccgggcattttggaactgagtcaacgggaaggtattttgggggctgcctcctacctagccatggtgggtttaaacatcaactttgccaatggggtaagttttttgcttttggtggctcccctgtttggagatttaat

SEQ ID NO: 34185 - DNA, 926 bp, Zea mays
  Clone ID: UC-ZMFLMO17226B12_FLI
gggcatggcctatgtggttaagcccctaggtggtgatcagtttacgttggtggctaatgtacgggcggaagagtggttagagcttggccagtaaggattaggaagtaatcggcttggtgaaaccatctatctaaaaaattccagaaaagcccatgctatgataatgattatcattatttagaagtttgcccgtgatggccatggggaggaagggcattgtttttcccttggctgttgcctatattctcgataatttgttggctaattcctagggtgtgaggactcctatgttaagaaaactgtcactagtgtggggtttgggtgccctgatggcgatcgccgggggagggggggaagctttagccgaaccagggggcaaaattgaacctttgcagttcggtcaatccgtggaagagatggactccaaccccatgggacagatcacttccgtgtcggagcttagggatgtgcagcccaccgcctgggcctacgaagcactcaaaagtttagtggagcgctacggttgcattgttggttatcctgaccgcacttttcgcggcgatggagccctatcccgttgggaatttgctgcgggactaaatgcctgcatgaacgtcatggagcggttaatccaggagaacgtagcggttttacgggaagacgttgataagttgaagcgcttagcccaggagtttcagggggaattggccgccctgggggcccgggttgataatttggaagtccgcacagcttacctggaagaccatcaattttccaccaccaccaaattaagtggacaggtggtgacggccctgagtggcattgtcagcggcgacaaaaataatggcactgaatcaattaccagaaacaccaccttgggttaccgcacccgtttggagctcaatactagctttcggggagatgac

SEQ ID NO: 34186 - DNA, 956 bp, Zea mays
  Clone ID: UC-ZMFLMO17226F06_FLI
atgcccagcgtcaccaacgctagactggaaagtattttgtatttcataattgcaatgagtgtcattgagtggggctattttatatgtccctctctttttgtcaatgctctttttgttaccgatttatggcattactttttgctttattttttgcatcaattacagcttggacgtttataattgccagattttattcagtaacactatgggcaaaaatatttggctaatcctatctctatgcaccaccatgattactgcttgcagtcaggagcaaatgcaggagatggcctctaatgccatggtcacccagaaccgaactcctgataaaacttggcgggttaagcctgggtctgtgcatgatggagatacctttcgggcagtggcggatgttactaacgaggaaattaaggtgaggatcgcctgtattgatgccccagaaattaagcaagccgggggcattgaatcccgtgattatctccggggaatgctgacggataatcgggaaatcattctgatgggtgccgaaaaagaccaatatgggcgcagtgtggtggaagtttttgcaatgactgacacgccaggacttgaggtgggagttaatggggaaatggttttggcaggtatggcccactactatgaaggccataagaggtcatgccctgagaatgcagaacagtatgaattcctggagcaggaggcgatttccaataaagctggggtttgggctaatggggatgcagagcggccctgggactggcggagaaggaataagtaggggttagtggagattaaaaatagagaaaaaccaatagaaagaagctaaaagcaaggtttatccttataaatgaattttagtcattgcgtaaacgtttagatttattacagttttagaaaagttaggaatcattattttgtttctgcactaacatccaaacatagagtaaaaatctacgctt

SEQ ID NO: 34187 - DNA, 598 bp, Zea mays
  Clone ID: UC-ZMFLMO17227A02_FLI
aaaacgatggggctcggaagttcatcaccggtactttgctggcatccggtgcctggcaagatttgggcaaggcccccgtacaagcggcggtggaattcacctatcttttggaaggctgtcaatttaacctcaaagttaaccaggcaactttgcagattcccgatcgccaggcagtgagtgcgttgttatttgcgggtaacttcaattacagcttgaataatcccaatccccaggaacgggtcagcgtggccaaacagtacattgaagcgtggcaatccgacttggatactttccggggcattgtccacgaaaaattcttggcggagcaacaaccccaaacggtgtttggttaattcggtataactatttgggggtttaacacctctaacatggagcaatcaatccgtagaaatttccgttgaccatactttatccatggacaccaagccccctcgacaacgattgattggtttgaccgggggcattgctacgggaaaaagtacggttacggattatttacagcaaaaatacagcgtccctatcctcgacgccgacctctatgcccgccaagcagtggaaccgggttctgaaattctag

SEQ ID NO: 34188 - DNA, 1402 bp, Zea mays
  Clone ID: UC-ZMFLMO17227A06_FLI
tcagaagccaaggctttaggaatcaagatgggggtgccgctgttcaaaattcgagatttggttgagcgacataatattcaggttttttcttccaattactgtttgtacggcgacttatcccacaggataatgaccagcctgcaattatttagccctgtcgtggaaatttattccattgatgaagcgtttctggaactgactccaaatcaaagtaatacaaattatggggaagaaattcggcgttgccttaaacaatgggtaggcattcccgtttctattggcattgcccccactaaggtactcgctaaagtggcaactgatgtggcaaaacaatccggggctggaacattttgtttagacaaagcagaagcggctgatactattttggcaacgatgccgatcgccgatatttggggcattggacgacggttagagaagtggtttaccactaggggcgtctcaacagccttgcaattcaaacaagccaatcctgaacttatccgcaaaaaaatgggggtcgtggggcaacggctattactagaactccagggtatttcctgtttacccctagaactaattcctaacccaaagcaagaaacctgcgtttcccgttcctttgctcaagcggtaacgacattggatgaattacaaacggcgatcgccttttttgtcagtcgggcggcggagaaactgcggcgacaacagcaaaccccagcagtgatgattatttttgcccgcaccagcttcttcattgagcaaccaatttccatctcccagacgattgccctgccgactccaacccattacaccccagaattacttaaattggctcaaaccagcctcaaacaaatctttcgaccccatcatccctacaaaaaagctggcgtgataatgaccgggttacagtcggaacgcattgtgcaaggcgatcgccaccgctgtgatgttatttggcctcaattctggagctgctttggccaccgtagtgggggtattaattgaagtgccagtgatgttaatgctggtggaaatttgcaaaaaaacagccttttggttccccagggacccggaaaaagccactttgctagacccccgttgtataaatcaagaaattaggatctaaaaacgtgtttggaaagttttattctgccccctcaatcgaccaactaaagcgaccgcaatactggggaactttcactcagtttccccccaaatttggggggccaggggggcttttaaaacaagctctaaccaactttgcctaattgccagcaatgaccgactttaaccatcctccccggattttatttctctatggttccctacgggagcgttcctacagccgtttactggccgaagaagcgggccgcatcatcaccaccatgggagcggaaaccaaatt

SEQ ID NO: 34189 - DNA, 599 bp, Zea mays
  Clone ID: UC-ZMFLMO17227A08_FLI
aaaccgtcaaaattacgaacctagcaacgggacaacttcaggctaccctagtagtggctcccactattgcccgcgccattgtctggatagggccagactgcctggcgatcggcggcattgatggccacattcggttgtggtatcccttcaccgagcaggcaccagtcctcgtaacggcccacaccgatattgtcaatagcctcagttgggatgccaactcgaacctcctggctagctccagtagcgacagcaccgtcaaactctgggatgtagagacgggcatctgtcatcgaatctggcgcgaggcggtgcccgttcggtgggctacctggagtcctgacgggcatactctggccatcagccgagaagatggcggcattgtcctctggaatccccacagcgatcaagccccgcgttacctcaacggtcatccggaaactgtttggagtttagactggaaccccgatggtgcctggctggctagcagttcccatgatgccacggtgcgattgtgggatgtggtgacgggacgctgtcggcgaattctacgcagtcaccagaactgggtctggtatgctcgctggcacccacaccaacca

SEQ ID NO: 34190 - DNA, 689 bp, Zea mays
  Clone ID: UC-ZMFLMO17227B05_FLI
cctttgccaaattcccttcactgccgacctgccgggggtactgctcaccgggccgtttatgccggagtctgtacggcaaaagttaaaggtcagtgcccagaataatcctgacctcactatcctgccctatttttctgaaccgaccatgttgatgtgggcggcggaacgggtaatcacgatggggggctacaacaccacctgcgaaattctgtccttccaaaaaccagcgctgattattccccgcattaaaccccgccaagaacaatggctgagggccacccgtttaaaacaactggggctggtagatgtgcttcatcccgatcaggtaaatgcccaaaatttgacagcttggctccactctgcgccgaccaaccaatataacaaaccagttctaaatctccgggccacccaacaacttcccctcgttctgggtcaattgctcagcacccgtaactgttttatgtcccaagcctgctagtcaattccgttgtaaattttccatggccatcgcctacgttgttaaacgctatccccgttattcggaaacgttcattgttaatgaaattcttgcccacgaagcagcgggtttagacatcaaaatttttgccctccgtcctccggtagatagctatttccaagacaaaattgcccgggtgaagcccccgttacctgtatccaaaaacccagcc

SEQ ID NO: 34191 - DNA, 213 bp, Zea mays
  Clone ID: UC-ZMFLMO17227C08_FLI
tatctcgatattgctgtgccctcttctgtatcgggtactgaggaagttgtcttgggaacccaggacgtctttaaaacccaatttgttgaattggcacccgtcagttagctttaaatccctcccagggagcaagtaagttttctttcccttcctcagctaagggtagagctatccgttggaagattaacaaaaatctgcttgcggatagctttt

SEQ ID NO: 34192 - DNA, 966 bp, Zea mays
  Clone ID: UC-ZMFLMO17227D08_FLI
atgttcaacaagaatacggccacattcaagaggtgattttgcaaccccatagccctgggcaaaaacaaacagataatatttccgcctacagcccacaaaaattggtgcaagttattaccttagcaagggcaatattacccgcagaaattaccctacaaataccgcctaatttagtgccaaatttcagtgatctactagcttgtttagctgctggagttagggatttaggtggcattgtacccattgatgaagttaaccctgattatcatcaccaatcggtgaatcaactaagtcaattgctagaagaaaatggctatttattgcaaccaaggtttccagtttatcccacttatttttcctggctcaattgtgatttacagcaacggctatcagtttttatcaactaatatcattagccaatttgggcaacaattttttctgctatctggcgaccataacgttgctggcgatcgccatggacgattgcaaaagcacggaggcgcttacagtaagaatctggtgacaaagaagttctggtgggtaggtcttaaattttgtatggggcctaacgactaagctcaccagacgcagataacctttgtaacccaaccaaacagcttatggcgttccggtgcagctcggttgttagtattcgtcaagcttcagagaatcctcaaatgcctttacattaaagactgaatcaagaatgattggcagccctttgtgtttagctattgagttcgtttcaagatcgacgacccaggacagtgaattaaccttctcccaaaaatgcatctttctcaagctttccttttccacagagctgaaattatttgctccgctttgattcgtaaatatccataaaacgaatccagttactgacatctttacgcttccaaaacctgctttcattgaagaagtaagggagagacagttaagcatctgacgatcaaacgactcaaaaag

SEQ ID NO: 34193 - DNA, 734 bp, Zea mays
  Clone ID: UC-ZMFLMO17227E06_FLI
gctgtgagtgtaccaacggtagtaaccaaggatgtcataggcgttggagccttgcttagagaagtaaccagccttagcccaggtctggacagtgcgaacgctcacaccggcttcctgggccaattctgtcacagaaacaaataaagaaggggtagaggacataggagcaaagggggggcactaccaggaagcatacccagagaagaaggaaagttaaggaacgacgacgaagaccaagcaacagcaaaatcacacaaacaagagagcaacctaagtcccgatagagaccacaaacgtcacatctgtagtggattactgacaaaccaaggataatgaggctctgggcgcagccttaagcatggcagggacaagagtgggtttgtcggggcatagttcccccactgtgggacagcactaaccccagcaaggtaaggaaaagaagaataacccttccatcgcggacataaaaatccgagggggtcaagctccggctccaacgaaaagtaagcagggacatacgggccatacctagagtgattggtgtaagagcaactacggagccaaccagggggtccgatggactcagacctccaaaggactcgagacttacgcttctgaagaatccaagggctatccgggtaagggctcggtggtgcggacaggttcaacttagagttaggaggagccgtgaggtagtgagcacatgggagaggcgggggcagctggggtgaggc

SEQ ID NO: 34194 - DNA, 1854 bp, Zea mays
  Clone ID: UC-ZMFLMO17227F02_FLI
ccgttggtttgactttaatgtttttgggcttggccatttgggttaagttgacccccatttttcgcattacggaatttgtttccgataccctggggtttttgaccaatcttttgcccaactatgtttctgggcccctgattttggccttgggactattttttgtcttttggggtcaaagtcgcaccgttggttctatttccgaggtgttgcaaccggataacgaccaggagttggtggacgtgctactggcccaccgtcgccttaataagggggctaaaattgtcgtagtggggggaggtacgggcttatcgactcttttacggggcttgaaacattacagcgctaacattactgccattgttaccgtggccgatgacggtggttcctccgggcgtttacgacgggaaatgggtatgttgcccccaggggatattcgcaattgcattggggccctggcggacgaagaaaagttattaacagagttgtttcaataccgttttaaagctggggatgggctgtcgggccacagttttggtaatttgttcctcactgccatggcggaaattaccggagatttggaaatggcggcgatcgcctgctcgaaggttttagcggtgcgggggaaggtgttgccagccaccctggacgatgtcaaattgtgggcagaaatggaggacgggcgctatgtggagggggaatccaatatccctgaagcccaaggacgcattcggcgcatcggttgtttaccagaatcccctaaggctttgccagcggtgctcaaggccattaaagcggccgactatatcatcattggcccgggcagtttatacaccagcattttgcctaatttgctcattcccgaaattcaaacggcgatcgccaaggccaaggtgccccgcatttatatctgcaatgtgatgacccaaccaggggaaacggataattacactgtctcagaccatttaacggcgatcgccaaattaccaatcaccaacaacaggtggggcaaatccaggcggaaattagccagagtcaacagcagtttttgcacattcaacaggaaaaatccttccataacacccaaaccctgccccagctagaagccgcagtgcagaccagtcagcaacagttggagcaactccggcaccaggcccaggcgatcgcctccgcttccgaagcatgggtacaggaacaaacccaactcagccgcactgtcaaccaattacaagacgagttaatcccccaacgcagtcagttggcccagctagaggaacgccaacaacaattgctaaccaatttggctgaattaacccctctgctcacaaaggtttctgttgagttggaagaaaaacagtttgcccaagggcagttcaacttccagggagaagcactaaccagtcagattcaaactctggccagcgatttggcccaactggaacaggaacggagtttgctacaggaaacccaaacccgcctgctcaaagaacaacaggaaaaacaacggcaattggacaaattagaagcggctagtcaagctcagcaggaagtgcagggcacctacgccaccaaagtgattttgcagtcggatttacccggggtctgcggtttagtggcccaattgggtcaggtggagccccaatatcaactggctctggaaattgcggccgggggccgtttgggttttcttgttgtggaagatgatggtgtggcggcggcgggcattgaaatcctcaaacaggccaaagcaggacgggccacttttttacccctgaataaaattcgtcctcccaagggtcaaaatcccaaccttagttatgcccatggttacattgacctggcagtgaatttaatcga

SEQ ID NO: 34195 - DNA, 506 bp, Zea mays
  Clone ID: UC-ZMFLMO17227G03_FLI
tgctacggctccggggcaattggcggtatttttgcccccatgttgggcattgcttccattgtcagtgtagccatggcgagacatttccatttactctttcccagtcaaattcctgaacccgctgtaatggcgatcgccggcatgggagctttagtagcggcaacggtgcgagccccattaactgcaattctgttaaccatagaaatgacggacaactattttgtgattttgcctttgttagttacctgcctagtggccagtgtggtggcggaagcattggggggtaaacccatttatacagtcttgctagaaagaactttagctaaacaaaaccgtggctaagatttattgtcttgaccccgattcttttagcgaaggaaaatctggcctcccctttgaaccttgggtaaacccgtggggtctaaacccccgtaaccgccaaagaggtaggttttgttggttaagcccttagtcaatccagcggtagaagaaaacgaagctagcat

SEQ ID NO: 34196 - DNA, 887 bp, Zea mays
  Clone ID: UC-ZMFLMO17227H05_FLI
gtcagcaccagagcaaactccagaatcaaaattacaagaaattgttcatcagcgcagtcagtggatttataaacacctgattagaaaagaaattcttaatccctcagtgccagagaaagagtatgtctctggtgaaggatttccttatttagggagaaactatcgcctacaagtcattgcagatgatgctagtcaagaaaaacttaaatattaccgaggacgatttcagctacaacaatcatcgcaacaccaaggtcgagaattatttattgaatggtataaaagtcatcttaaagcccatcttcagagtaaagtggagcagtttaagcatcgagttgaagtcaatcccaactcaattcagatcagagagcttgggaatcgttggggttcatgtagcacaaaaggagatctatattttcactggcgagtcgcaatgcttccaagcaacatagtaaattatgtagttgttcatgaaatggctcatcttaaagaacgccgccacaatcaaactttttgggaaactattgaatgtatattgcctgattaccaagactcaaaacaatggttagcgactcaaggtatatactacgatctctaatagcgagatagtaatgaaaatgagcagattaatcgagagggagaaaaacaactttgagggccatgcatgaaggaaccgccggtctaggatgctaaatcctcgtcgctgatactgatagggtggtttttgtcaatgaaaattttaattttaagctataatattaaattattaaagatattgctgaaaaatagtaatgttttatatgatattagactccacactagcccatccattaatccttatttctcagaaaggtaggggaaaaatctggcaaaattatagttaaggt

SEQ ID NO: 34197 - DNA, 859 bp, Zea mays
  Clone ID: UC-ZMFLMO17228C09_FLI
tgcaaagtaaggtcagcattgcccggggggaattggaacaggcccagtccaggttacgggcggccaaggaaaaccgagaactggcggaatataaccaccgcatcaccatttcccgccgagcggaggaagaaaatcaggtggccattaatgtggccaatcaaaaattagaccgggagttcaagttggcccagctccgggagcaattatccgctgtggaggaaaagctcaatggcattgttcaaatcaaaagtccttactctggcactattcgccgcattaagtttgaccgccaaaccgacggtaagctggccgttaccctctacctcgacactactaacccaaatccctagtgccgagattgaagaaccagaactgcgggaaccggaagaggacgataccccggagttgatggaagacccccagggacaatctaatcctttcctggcccccgaactggatgagttggtggacaacaaaattagcgaggacgtttggcaacaaatgttgggggaattgccctgctccgtcaccacggaagattgcattaatcaactgcaaaatgtcgctgtgcaaaattctcgattactggcagacctccaggaaaaaattgacgaagcccaaaatgcagtggacgaagcccgacgcaaaaacttggattccattgccattggtaatttttcccctttcatccaaacctttctctactccaccctggggcccgttagtaatggggtggaaccgccggtcaataatccctttcgcctcatccttggtaataccctatctgcctttctcggtcagggtttgggggctttattcaattggtcagactacgccgccaacgattcccagcaacaac

SEQ ID NO: 34198 - DNA, 735 bp, Zea mays
  Clone ID: UC-ZMFLMO17228D11_FLI
gggatggcaccataacggttaatgtttttgacgaccccgccagtagcaccactttacccatgacggaaggtggtccctccatcaatgctgttcaagttcccctgctcacgttggattcggccctggtcaagcttggcttgccccaaccccaggtgattaaaatcgacacccagggcaatgaattgtccatcctccggggagcagcccaaacattagccaaagttgatgttttatttctggagtgctggctctatcggggttacggtcccaaaacccccctgttaacggagattgcccattggttgttgccattcaactttcgcctttgggacgtttctgagccctaccgtggtccccagggggagttgaccactctggattgcattttcattaacaccgccgccggcctagttccaaactggtactactagcttttccctttcctctagaaagtgtctgaaaagtgcaaagctaggtgttcatccccctaaatcaacccactaaagctctggcggagggcttttgtgacagttccccccttcccaaggggggctaggggggattaaacagtcaaaactcaactttacctagccggagccttaattacgaaagtaagggagcttaacaaaggtgaattcttgccccgcttaatatagtcattctggatttttgagcgatgctggggaaaatatctctgcattttcttattcgtaggctataatttgcctggagtag

SEQ ID NO: 34199 - DNA, 689 bp, Zea mays
  Clone ID: UC-ZMFLMO17228E09_FLI
agggccccaaagagaggttccatcaccacccccaaaaccatttcaaaggttagcaatcccaccacaaactccggcgagaatccccagcccttgagcaagtcccccaggtaaaggcggtaagttatccacatcaaagttactgagccctgaaccaaggcaatgccccaaacccgccgccacagaaccgcagaatactgacccatgggtaattccaaatcctattcaagggggatttaagttgctgttgttaacgttgaaaactatttaccaatgcttgccactgttggagccgagcctatcgcatttactccaccaaatcaattgactattgacagaatcttgaacaatgcctgggccaggaaccgttgcaaccagttacattaagaaatgtaaagaaaatttccccactgtccttttcccatggtccctagcaatgctgaatctcaatccgtagttgtaattggtgctggcattggtggtctgacaacggcggccctgttagcccaacagggttatcgagtcaaagtttatgaacaggcggccatagtggggggttgtgcatccacctttcggcgacggggttttattttcgatgtgggggccacccaggtggcgggcctagagccagggggaattcaccaccgcattttccgccagttgcaagtggatttgccggaagcatccctgtg

SEQ ID NO: 34200 - DNA, 1040 bp, Zea mays
  Clone ID: UC-ZMFLMO17228F04_FLI
tgcggtgcgcccttgaactgcaaagtaatcggagcactgcctggcactggggcgctaggccaaccgctaatataccaagtagtaccttgaagggattgggacttggaagtttccatggcttgaacagaattgctaggaaaaaagggctgggccttacccatagccaacgcaaatccacccataatggcggcaaaaaacaaagtccgggaaaagttcaggcgcatggttggagtattgcaattagctaaaaaacaagatatctatacccccatgattttaccattgggaatttcttgcctagaattgggacggaacagtttcccaattgtttttgcctttgccattagaggctattgctgaaaccttatttttccctgcaatggtgagcactccgagctaatctcccaaaacttctgccagggaggctttccatggctaaccttaaagtctggttagcggccatcattcaagcattttgccatttccaactatgccccgtccctttgaccgatcgataaaggtttagctttcacccatttgaaaggcaccattcaggcttttatcaaacaaatgtttggggaagcattgccgattcgctttcgggctagttattttccctttaccgaaccctcagcggaagtggatgtgcaatggcagggtaaatggctagaggtgatgggctgtggcatggtggaccccaacgtaatggaagcagtgggttatgacccggaagtttacactggctttgccgcaggctttggggtagagcgatttgccatggtgttgcaccaaattgacgatattcgtcggctctataacagtgatctgcggtttctgcggcagttttaatgttttaaaattgatcaactaattaactctcagagcgtgtttgaaaagcccccctggcccccaagtttggggggaagttaaaaataaaagtgccccagcattgtcgaagatttaatgaggagatttaggggacaaaataaaacttttcaaacagattctcagcgctggggaacattcagggatggtgatgc

SEQ ID NO: 34201 - DNA, 509 bp, Zea mays
  Clone ID: UC-ZMFLMO17228F11_FLI
tcttatcgggctatggcaaatggcgacagttcagtgtgtttgagtgttttttgtcagtcaagcagtttgctaagttacaaacggcgatggagaagttgattaaacttgatgaggatgcagtttgtatttatgtgttggatgaaaatacggtgcaacgcacgattacctacgggactccccaaccagaaaaacctggtagtattattatctaagaagtcattcttcaaattttggcatacctatagcgagggccttttccctgggggggttgccaaattgcttctgaaccttgaaaaatcaatactttcacgcattcagactgcgtactattttgaaggtctggctgattttggaaagatattctggaaggtttgccaaagtctgctttcctccactttccccgtaaggggtcggagggggcggtctttccttctactaatcccggcgatcgggactgaaacgattgttgtgcccctggcggtcgctttcaatgcctctttccttctact

SEQ ID NO: 34202 - DNA, 700 bp, Zea mays
  Clone ID: UC-ZMFLMO17228F12_FLI
ttcggggatctctaaattctccagagttggattggctttattaatttcggcaacacgactctctaaattttgttgtaccgcttgtaaatttttaatttcggcttcgatgctatcccgctttgcctgccgaatctctaactccccagcaattttttctgattggctccggcgttcttctaatcgagtgatatctttatcaattatttttttctgttcttgtaactcagaaagcgtattgttaatttttgttttgctaagctcctgttctgctaagagcaaaatttccctttctttttttgtcgctaaacttgctgttgccgccccgctgactcctgcggtaaatcccattattccagattgaagcggttgaatttttgcggctattcctactaatgcgacaattatccctgctgcaagaggaataacgttcgtcaaggtaggcgatgacaattgccgggggctgtccataatttaaaaaattgttgctatacaagggaacacgaacaataaagcaaaaaagtatggtttatttacctaaaataaatcgataatagggtaaaagtaaatgaccatctattacttcactgcttttggacgtaattgcatccttttttgtttaatatagaatcgtattattttaatcaaaaaaacaatccaagcaattcagtaaaggcaaagaacagtaattaagaactaggac

SEQ ID NO: 34203 - DNA, 677 bp, Zea mays
  Clone ID: UC-ZMFLMO17228G12_FLI
tcggtaccgggtgtcgcagtttattgccggacatcgacatcagcaccagtcccgccggtcggatattaccctttatttcccgacccctagagcaacggtttagtcatcgcagtgccacccattccctgttggccagtttcaccctagccctggtcagttatgccctttggtttgccatgccagtcattcccctagtaattgtccatgccctgaatatcggttacttcgccggttggttcttggactgcttcaccaaatccggggtggaaatgttttacccgttgggggtgcgctgtgtttgccccggtaatcgcaacttaagaatctctactggcagtgccgccgaatattggctgatggtcttcgtagtggcgatcgccgtttggactttccaactcaataacaccggcggtttggtgaaaaacttcaatgccctgattgccgctcccagtggggtggtggaattgtacaaccgcaaggggggcaacgaaattatctacgccgaatatgaaggggtgtgggcggggaaccgtgcgccgataaaggaagaggccccggtaattgccaccaatggccaaggctttttggttctgcgggatgaccaggtggtgaaagtgggcaccgaagcggacagcaccatcattgttaatcgcattcggggccgggagggggaaccc

SEQ ID NO: 34204 - DNA, 334 bp, Zea mays
  Clone ID: UC-ZMFLMO17229A01_FLI
aggcaggatgcaactttttgtccaagaaatggattaaattcccaagggggagtatcatttgaatcaaacaattatccaggtcactatattcgacatcgaaactttgaactgtggcttgataaatttagcggatttacagaaagcacaattttcagaaatgacgctactttcattcaaagagatgtaccttaaaatagttgtcagtttttaacccaactcaaagtcgttagcatcgcttattttcagcataatttggctaagtgccttggaatcaataaagcctagttatgcacaaaataatccggcgctctttagcagtaaagtgatttcattt

SEQ ID NO: 34205 - DNA, 493 bp, Zea mays
  Clone ID: UC-ZMFLMO17229A08_FLI
tgcggaagctaagacgcacctaccaggcgcaaatgatggatatgactcaggcgatttgtaattactttcctaaaatgaccagagtatctaggccaaaaggaggctatattctctggattgaaatgccagaaatagttgatactcttcagctatacgaggatgcattacgtcataatattgccattgctccaggtagtatgttttcttcatctggcggttatcgtaactgttttcgacttaattttggtttgccttttacagaagagattcagcaagcaatgattgtacttggacaacttttgcatgagcagacaaaataaactttacaattcaaggcaattttaaattaaagagaatttagagaaaaattattatggataccgtggttcataaattaaaaggtcaattttggggaaggggacagtgaacgctatttggcccaactgagtagctacgaccatttatgggcaaactggcggaggaaccacttagt

SEQ ID NO: 34206 - DNA, 861 bp, Zea mays
  Clone ID: UC-ZMFLMO17229C05_FLI
agaagagctacgcacttccctgaaagaattactatttaaagaggggagtttccgatggaatcgtttggaaaatttattgcgtaatgccaaaaattcccctggctttgattttgattatgtgcttaatgaagcaacagaatttttactttcagaccggggacaattcattcgcgatcgcctggtggcggaattagtcaacagtattgatcaactggggcgcaacacttggcaacaggtcagccacaatatccaggaaagaattagttttctgggtgacttaggtaatggcaacggtaaagcccatcaaaccaaaacgatcaaagttgtgcctcaacccgccatcgctcaacaggaggaaacttggcagcatttacaaaatctttggcaaattcttaaagagacccccggttttgaccccctcaagtttgtgccggtgttgagtcaaattattgttaatcccacttcccgtcggatgggtcaacaggtggcggaaggactactgcaaaaggcgatcgccagggtaatccggcaatgggccctggctttggaaagtcagcccaatccagccatcaaaatccgcaatgcagcctaggccatggttgccataggttccagtcaaaattttgctgaggcgagatcaagccagtgccggtcaatgagacaataaaaggttacgtccccaaattgccttggtaatgagtctgaattggattagtcgcgccgatcgcctacaagccttacccccctatgtttttgcccgcctcgatgagttgaaagccaaggccagggaacagggcctggatttaattgacttgggcatgggcaaccccgatggcaaagccccccaaccgattatcgaag

SEQ ID NO: 34207 - DNA, 489 bp, Zea mays
  Clone ID: UC-ZMFLMO17229C08_FLI
cgtgattccttcggtaggtaataggaaagtcttgccacccctaggaatatggccccaccaatgccagccaagatatagagggattgattgccggtgcccaaaccaatgaaccgatagcaaataaagacaatgcccaccaggagcaataacggggtgatgtcaaagtatctgccgtggtcgcccgcttcgttttggatgcccaaaaaaccttcctcgatggcccgcttagccaacatgggattacccccagctcggctttgcagtttggcaatctggtttggctttagtcccgaccccagggaaatggcctctttttccatcaagtctcggatctggtattgcgccaggggcttgagttcaatgcgaggcacatagataaacaagtcagtgcgggggggattagtggccgccaacagcatgggaacccccacgtccttcagttttttgagccaaagccgaaatttgacttccagataatgggcatcgtcg

SEQ ID NO: 34208 - DNA, 1023 bp, Zea mays
  Clone ID: UC-ZMFLMO17229E06_FLI
tcacagtggcggtggttttattttttctgttagttattccccctttttgggaacaactgcaaattctcatcggttccctgcctaaagttggcgatcgcctggagaatttttttgaagactggcacgaccggatggaggtgaaattttttagccaagctttttccgtcgatgatctgccggactccatttccgccctgggggccaatgcccttagttccctgattaacctattttccaattccgtcaccgctgtcctgcaaataatcttcatcctggcgatcgccgtgatgatgttgctttctccccaagcctatcgacagggcaccctaaaattatttccctccttttaccgccgccgggccgacgaaatcctgacccaatcagaatcttccctgggcaattggctcacgggcattgtcattaactctttttttatcgccagtctcagcggcattgggttatggatattgcaaattaaattagtcctagtccatgctttgatggcgggaattttaaatttcattcctaacattggccccgccgccagtgtggtatttcccctgatgattgctgtgctggacgccccctggaaaatcattgccgtactaattctctatttcctcattcaaaatgtggaaagctattggctgacccccattgttatggccaagcaagtttccctgctgcccgcggtcaccctcatcgcccaactattttttgccagcatattcggacttttaggtttgatcatgaccaataatgaggaattaggcaaaaaattcgacaaatccgtctttcctggcacccagggcggccctttggagcacgtcattaccgctaaagcagtggcctttggggaagcgctgaaaccagaatttaaggtttattctggccaggtaatcgccaacgcccaagccatggccgaccagttacaaaaacggggctttgacctggtatccggcggcaccgataaccatttaatgttggtagacctgcgctcaatcgccatgaccggcaaagggg

SEQ ID NO: 34209 - DNA, 2067 bp, Zea mays
  Clone ID: UC-ZMFLMO17229E07_FLI
ctgcaaataatgctgactcgaataatttacttgctactcctcacttcatttaattttttgtctaagaatctccccccagccggactcctaccatgacaaaccagaatatgcccccggaaacacctatcatttggcttaattttagtcctgctctgcggcgttttgatcgtcctctactacgacaattaggcaaaagtcaggctattttgcaatgggattatcatcaaactgctgacgaacccaattgtctaacagtgggattagatttaatcggagaatacctggaaaattttcaccaacctgtccatttaattggtcatagcaccagtggattgttagctttattgtacgcccgacaatgtcccgaaaaagtccgttccctctccctactctccgttggtgtatatcctgccctcgactggcaagcccattattacagccaatttgatgccatgcgttacagccgtcatttgctccttggtcaaatggcccaccatctatttaattgtcgttccctacgtcaaacccaaaccattgttaatattttggaaaatgatcgacaattgggggctagtgcagatgtaaattgcccattatgtagtactgataagttatgggggaaaggggatgttgaaccgtttttgggtatggtttaagttggtttcacggcattcaatcatgcggtggtttttggttaagttaggttttcttaaaaagtctgagttaactagtcggatggtgaattttcatcctgcaccagaggagattatgtcgggggaagtggtaattgttggtgacagaaatcacaaaaaatgggcttgttttcgttgtccgagtggttgtggtgaactgattttactgtctcttaataaaaaccagcatccttcatggcgcgttgattgtgattggttaaatcgtccaacattacatccttcggttcgacagttaaaccattgtcaatgtcacttctggattaagcgaggtgtcactcagtggtgtgctgattctcggcataataaataatactcaaattttgaggttaagaaaattgaaatggtgttaccgactttaaatttttccatattaatatttgaattttgaatttctcaccaattgattcaaatgagtttatttcaaaccaactaaatgaatagtttcctgcaatagtaatcctttcaaaatatcaaaccccatgcctacgcctttatcctgcattgtttttataactttattccagactgtaggattcttactggcttcgagaaattcatgcccttcccatgttaaagatttgacaaagtattggggagtttcccccatagtttgaactggtttatttcccatgatttcaataagtccagcttcatgagcaagcttgagatggtaaactaactctgcatcttcatatccttgaataccaagttcggaagaagaaaaaggttcataaaaagtatttttttcttctacagcaagcaaaattttcttgattaattccatatctcttttcatattctagtcctcaagatcgcccggggcaggtaaatcatatttttttggacttgaaaatcaacctggaggaacggcatttacagggagtttgtcgcatcgccctcacgccggtgcgagctggcattgagcaattgacgttggacgcagtggacttgaaaattgcctgggtcttaattaagggggtgagccaaagctttgactatgacggggaaaaattaaccatcaacccattgcaacccctgggaacggaaccggtcaccctggaaattcagtacgaattgaaaaatccccgccggggcatttattttatccagcccgatcgccattaccccgataagccggtgcaagtgtggacccagggggaagatgaagattcccgctattggttcccctgttttgattacccaggacaattggccacatcggaaattcgggtgcaggtagccaaaccccatcgggttatttccaacggcagtttaattgagcaaaaagatttaggcaatgagcaaattttccactggtcccaaagtcaaattcaccctacctatttaatgaccc

SEQ ID NO: 34210 - DNA, 650 bp, Zea mays
  Clone ID: UC-ZMFLMO17229E09_FLI
tcgtcggggaacgccacgtagccccccaggggaatagcccggatggaatattccgtttcggcaccttggtatttcaacagcggtggcccaaatcctaaggcaaagcgagtgacatggatgccctgtaaacgggcggccgcaaagtggcccaactcatgcacagcaattagtactgcaagtactccgatcgccgccaacgccgctaaaactgacataaatttctcaaataggaaaaaactggggacgaaatcccgccgaacgtgtaattcccccgattttaacccaacggccgccagaccgtgttccctggcccatgcaaacccctaagtttctgttaacctgaagaaggtgagggtatctgacaaaaattccagattacacagttatcaatatcaactctatccgttagtcaatggcggctctcagaattatatgggcgatgagcaccaagatattggcaaggtaatagcaaaactggaaacttcaaaggaagtcgttgctaacctaaaactccagacctttcttcgttctgcttttctctcagaggcatcacatattaacagtggtgaggatgtcggcaaatttctagaggctatccttcaagaaggggaagaaatgtttaattaccttgccaaccacgccccggtttt

SEQ ID NO: 34211 - DNA, 894 bp, Zea mays
  Clone ID: UC-ZMFLMO17229H01_FLI
ctaattaatgcttggcagaaaatatttcccgaactgtttttaccttttagttccatgccctctactttaaaaagtcatattcgttatccagtggatatgtttagtacccaatcggagcgattgttgacctatcacatggaagatattgatgtattttataaccgggaagaccaatggcgtattccccaggaaacctatgccgatgagcaacaacccattgccccgtattacctaattatgaaattggcagggattgatgccaaagaagaggaatttgttctttcccaagtttatactcctaatgcccgcaataacctgattgccctactctttgcccgctgtgatgaacaaaattatggcaaattgttgctctacaccttacccaaggaacgactggtttatggcccagagcaaattgaagctttggtgaaccaagatccagtaatttccgaacggattagtctttggaaccgccggggctcccgggccattcagggtaatttgctggtaattcccattgaagaatccttactttatgtggaaccaatttatctggaagctgagaaaaatagtttgcccaccctcgctcgggttgtggtggtttatggtaatcaaattgccatggcagaaagcttaaatgaagccatagaggcaatttttgatcgccgaaatggagactagcggtcagaagttggggggaattaataaaagtattgcggtgcattacccccatgcgaacaaactcagcgttttccaaaccgggaatcaagcggaaaacccgtccctgttctccccagcgtaaattggtctgaaaacccaccatattccacaattgtcctgccttatcttcctggcgcaattgcaccactgcatagggctttttctccttgttag

SEQ ID NO: 34212 - DNA, 748 bp, Zea mays
  Clone ID: UC-ZMFLMO17230A04_FLI
tgttacgctccacactggtgtgggtttagccacattaacccaaacggtggaccgggtaggggatgaccatttgcgtctcatactcagtgggaccattgacggtttccatgaatggtactggggcgatggttgggtccaatcccgtttggaaggtatttccctgttgcccctaaatttaggccagacccttagtttactcaagctaaagcaatttgttaccaccgttaaaagcccagtcgtttaagccagggcttttccccttggttgactagccaaagtaagaggcataaaccagcgatacccatcactccggaaagaggattgcggtcaatgcccgtcacccaagccggcattttttccgtataggtcactaattgccccacattgacaatgtaataggcccagaccatgcccccgtggagaccaatgctatggcccaggcgatcgaggctctcgccactccctcagtctttggttccagcgtttggttgcagccttttttttaaccggccaagtttttttgcacattttgcaagggcgcattaatcggcgcaataccctggagcaaatgaatatggtcggccccgaatccatggcgatcgccttgattactgctggttttgtgggtatggtgttcaccattcaagtggcgagagaatttatttactatggggccaccacgaccattgggggagttttatccctatcgttaactagggaattggccccggtgctgacagcggtggtt

SEQ ID NO: 34213 - DNA, 890 bp, Zea mays
  Clone ID: UC-ZMFLMO17230A09_FLI
ctttaaagatttggttaacgatgtggccatgcagattgccgcttgtcccaatgtggagtacgttagcgtagccgacattccccaggaaatggtggctaaagagaaggaaattgaaatggggcgcgacgacctgggcaaaaagcccgccaatatcaaagaaaagattgtccaagggcgcattgataaacgcctcaaggagctatctttgctagaccagccctacatcaaagaccaaaatctcaccattgaagagttggttaaacaggcgatcgccgaattgggggaaaacatccaagttcgtcgctttatccgctttaaccttggtgaaggcatcgaaaaagcagaaaccaactttgcggaagaagtggccgccgccgctaagggctagtaactcaggcttgattaccgcactacttattagctaaatctaagaaccttttgaacccagatttccaccgccacaggccagggaagatttgggtttttgcttttgggataaaccccagaaaatcttggcagcccatctttgctttgcccagagagtgtgtcaaaatcgtgggtaacttagtctgtcctaggcttccataacttataattatcgccatcattgctatgttgccattgccattaattgctaacggaaaaggatttatccgcgctctagaaaacgacggggctttggcagtgtatgcccccctagaaggtggttatgaaggtcgttaccaaagacgcctacgggccaacggctacgccagtatatccctttcggcaaggggtttgggggacgtggaagcctatttgatgcaagtccatggagtacgtccggcccatttaggtaagaaaaacattgcccaagaaggagcggtgggaccgatttattttgcccagcc

SEQ ID NO: 34214 - DNA, 1925 bp, Zea mays
  Clone ID: UC-ZMFLMO17230B08_FLI
caccacaccacacctcctcgcttccactccgctcgtctgacatctcgtcccgtcctttcgtttcgaagcctcgcgagccccgacgatggccaccgccgcggtgtcggtcgacgagaagctcgacaagcttcgcgccgaggtcgccaagctcgaccagatcagcgagaacgagaagtccgggttcatcagcctcgtgtcacgctacctcagtggggaagcggagcagatcgagtggagcaagatccagacccctacggatgaggtggtggtgccctacgataccgtcgcgtcgcctcccgaagatctcgaggagacgaagaagctgctggataagctcgttgtgctcaagcttaacggagggctcgggacgaccatgggctgcactgggcccaagtctgtcattgaagtccgcaatgggttcacattccttgaccttattgtgattcaaattgaggtatccttcattaacctgaacatcttctcttactgtttggatatggaagaatcagtctatgctttattcgttacatgtctctgcagtccctgaacaagaagtatggatgcaatgtccctttacttctgatgaactctttcaacacccatgatgacacacagaagattgttgagaagtattccaactccaacatcgaaattcatactttcaatcagagccagtatcctcgcattgttaccgaggacttcttgccacttcccagcaaagggaaatctgggaaggatggctggtatcctcctggtcatggtgatgtgtttccctctttgaataacagcggaaaacttgacatcttattggctcagggcaaggagtatgtctttgttgcaaactcagacaacttgggtgctatagtcgacatcagtatccaaataggatgatcaaatttgcatacctgttttaatacttactattgccgtgtgctttgaattgaaaattgtatccttaatcagcacagagatcctaaaccatctgatcaataaccagaacgagtactgcatggaggttactccaaagacgctggctgacgttaagggtggcactctcatctcttacgaaggaagagttcagcttttggagattgcccaagtatccgatgagcatgtgaatgaatttaaatcaatcgagaagtttaagatattcaacactaacaacttgtgggtgaaccttaaagctatcaagagactcgtagaggctgaggcacttaagatggaaattattccaaaccccaaggaagttgatggtgtgaaagtccttcaactcgaaaccgcagctggtgcagctattcggttcttcgacaaagcgattggaattaatgttccccgctcaaggtttctcccagtgaaggctacatctgatctgttgcttgtgcagtctgatctttacaccttggttgatggctttgtcatccgcaacccatccagagcgaatccagctaacccttcaattgagcttggacctgagttcaagaaggttgccaatttccttggtcggttcaagtccatccccagcatagttgagcttgacagcttgaaggtttctggtgatgtctggtttggctctggaattacactcaagggcaaggtgacaattatcgccaagcctggagtgaagttggagattccagatggagacgtacttgagaacaaggatgtcaatggccctgaggatctttaagcaatgtttatcatcaccagttttcccaaggacatgtcacaggaactgccaagcctaatcactcctactgagctctatattttgtaattttcatgtgcattccgattccgctgtgagggtcatgtgagcccgctagagaataattgtaatcttctttgctgcgtctgtacttctgtttttgtgcgccaggacgtatatttttactgaaatgatactccgaagagcacgtatggtgtct

SEQ ID NO: 34215 - DNA, 802 bp, Zea mays
  Clone ID: UC-ZMFLMO17230B11_FLI
tcaaacgtttatgataccatctgtgaaattttagctcaatacgttattgcatctgaccctaactttgttggtattgaaagttcttatctcactcaatatttaaaaaaaattaatgtttttaacattataaaaaattgtctaataagtaatcctaatcaagaaatagtttcgcttctgattgacttctcaaatgtcgataatacaaatctatatttaaaagcagaattacctctcacaatagtagaaaatatagtttcaagtgtaatacttgttcctagactgaaggaaatcgtccaaaataattgcgaatataatttcgttctaattagtcaatacaattgcctatctaattttcgtctttctttagagtctcatttttccttacccgatattagtcactcagaatttagcaagatttggcaagaaaagcaatctcaggaatttcctctctatggacagtttcttgatttaatcacttttcaattagcaaatcagatttcaatcaatgttcctagtgaaagcgagcgtacaaatatttgttatgaaggtgaacgaaaatttcatacttttataggtcaatataccatcccatccggtgaaacaaaatcctcttttcgaatagacaaacctcaagttattttaccgataaaaattaatggtaaactaataataaaaaatgaaatagaacaagtttatattattaataatcaattctttgaacaaactccttccctttctgttgaaattcacttttcgctaatgcttggcaaaccattactattggagatttttgaagtttata

SEQ ID NO: 34216 - DNA, 669 bp, Zea mays
  Clone ID: UC-ZMFLMO17230D05_FLI
ctacagagtatggctgaaatgacattatcagccgctaaacgtggtgctgaactaacccgccatttgctggcctttgcgcgcggaaacccccttgaccccaaaccgaagaatattaatcatttagtggaggcgatgtggggacttattcgccgaaccctgccggaaaatattgagcttgaatttgcccctgaccccgatctgggtattgccgaggtcgatgctaatgaattggaaacagcattgctaaatctggtagtcaatgcccgtgatgccatgcaagatggtggcaaattaatcattgagacttcctctgctgtgctggacaatgattacgccgctctccactgtgaagtgataccgggtgactatgtaatgatttgcgtttcggatactggcattggcatgagcgcagatacggtaagccatgcttttgagcccttttttactaccaaaccagtaggcaaaggtagtggccttggcttaagcatggtctttggttttacgaaacaatcaggtggacacataaaaatttattctgaactcggtgaaggtacttccatcaagctgtatttccctaaggtgaaagacgctcagcgaataaactatcaaccggcgaaggaactaatacccaaaagcggcacggagcatatcctggttgtcgaggatgac

SEQ ID NO: 34217 - DNA, 607 bp, Zea mays
  Clone ID: UC-ZMFLMO17230D06_FLI
taatcaagagttagataaattacttggtaatattccctatctcaatggtggtttttttgatgttcatcagttagagattaaatatgaaaatatccaaattcctgatgatgcttttgaacaattatttgtcttttttggtaactgggattggcatttagataatcgtattactaagaatcagaatgaaattaatcctgatattctaggttatatctttgagaagtatattaaccagaagcaaatgggggcttactatacgaaggaagatattacagaatacattagtaaaaatacaattattccttttctatttgatgcgacgaagaaggaatgtgaggtcacttttcgtgccgatggggaaatttggtcgctactgaaagaaaacccaaatcgatatatttatgatgcggttctaaaaggtgttgatgtagatttaccgctagaaattgcagcaggaattaatgatgtttctcagcggcaagattggaatcaatcagcatcagacgaatttgctctaccaactgaaacttggcgtgaacatattgtccgtcgtcagcgttgtttggatattcgggaaaaactcaaatccggcgaaatgactagcatc

SEQ ID NO: 34218 - DNA, 969 bp, Zea mays
  Clone ID: UC-ZMFLMO17230E08_FLI
tcttgcctggagccccaatgggcaatacctcgccagcggaggctatgacaacactgtctttatctggaaggtcgagaaggaggttactagccttcgcaccctggagcatcccactatcctgagtgcgatcgcctggcatcccgatggtgagttgctggccacctcctgccacgacggcaatattcgactttggcactggcaaaccgggcagtgtgtcactcgcatcagcggtcatcaaggagaaattctgacccttaaattttcccccgatggcaagcgactctacagcagcagtcaagacgaaacctggaaaacctgggactggcaaacgggtacctgcctcgccagcgatcgccttgatcgcccctatgaaggaatgaatatttccgaagtccgagggttgaccgaagttcggaaagcagcattgagagcactgggagctacggaagggagtcaacctccaggtgaccttgtgaggtggctccgaaaaactgaacaggggagaaagctctaacctgtggtcacaacagaaaagttagactaagcgacgccttcacaggagccgcttgtcttcaaaaccagacatgaaacgttagcttcatccggctcctcaataatttgacccttatcataggaacatctggatgcttgaaaaatccgcttttggagctttaaaaggggtgacaacagaaaggggtacatgcacgatggcaggattgccacccttgaaggggtggttgctcactatgccagtggcgtgacccctagtatctcgactaagctatgaccatgaccagaaaccagaaggtagtgaaagcgagtagacccaggttcggagacgatgttgtcggggagctaacgtaaccggtgctatcggatggctaccatctcggaaaggtagtgcaaagggaggtaacgcttccaacccttctacctcagctctccaactactaggtagctgactaagac

SEQ ID NO: 34219 - DNA, 625 bp, Zea mays
  Clone ID: UC-ZMFLMO17230F05_FLI
tcaccagttgcccgctagcaaaaccattgattgcctgttagtagatggaccgcccgcctaccgagaagacattcaatattcccggtttcctgcagtgccttttttccaaccgcaattggcaccccacagcaccatcattttggatgacattaaccgtaggggagaacaggaaattttagcccgttggcaaacattgctcaatgttagttttgatagctccattggcaatgtggcgatcgcccatctgtcggcctagggtaaattttaaaaatcccctgatccaccagtttcagggaaagccgggtaaaaatctgccagtgttgggatattggatattgagggaacgagctagaaccctactatctgtcagcctagcaaaccaaatgctttacatcgtcagactagttcaggaaaattaagtttgacccatagattaatcctaatcttttgctatgaaatccccccaggctcaacaaatcctagaccaggcccgccgtttgctctacgaaaaagccatggtcaaaatcaatgggcaatacgtggggacggtggcggccattccccaatcggatcaccatgatttgaactatacggaagttttcattcgggacaatgtgccggtgat

SEQ ID NO: 34220 - DNA, 1541 bp, Zea mays
  Clone ID: UC-ZMFLMO17230F07_FLI
atttgctggaaaccaagggcatttttttggcagaggaaaagccagaccatgactttctcgctgatatccgagctggccaggtaatgaaaacggaggtggaaagcctggagcagagtctcaccctagcccaggtgctaccgattatgtccaattcccatcaccggggctttcccgtggtgcaggggggcaaactggtgggggtatttacccaaacggatttggccaatgcggcccaggagtcggtgcacattgcccttaagcaaattatgacccccaatcccatcactgtagatccggaagcgcccctcagtgatgtgctctatttgctcaaccgttatcaactttcccggttgccggtggtggaaggggacaacaaattagtgggcattatcacccgcacagacattattcgggaggaagtgagtcagttaggggggcaaattatccatcctccccatcccgcctacagcgtataccaaacccgatcgccgttggtgggagaagggcgcattttattacccatccgggactccgatagtgctttagttttgtttcaaattgcggcggcaatcgccaaaaagcaaaactacgaaattgactgtttgcaggtggtcaaggtatctaaagctcaatccccttctgtgcaaagggtgcaatggcagaggcaacggcaactgatgcaaaaactggaacgcattgcccgccaccagagagtgttattccatacggaaatcaagctggcctacagcattaccgacaccatccttgataccattcaaacccgccatagcgacctgctaatccttgaatggcaaggggaaatgcccattggcggccaaatttttggccaaatcacggatcaatggtggtatcccaacgttttaaaccccgcactttcgcttcattttgaatataaaaacagctatctggctctaaacccagaccgagaaacttatttttaaaagttgttgaacccaagggggaaaattcaatgtctagctcctctaacaaagctttgactaagtcgcccactagttctttatcaatttcgtgttcaggcaggggagccataatttctagttgttgaccatagtaagcaatgcgggaactgcgatgttcaccgagttcttccagcaaagcttcaaattcgtcccaatccacatcccgcaaaaccaaggtctggccgggaagcacactgatgcggtctagggctagcaacatggctcttcttcctcgcaatatggctagtttccattatggcccctctaccaaagagcaggattaatccccagcctaaggcagaagtgaatagagagaactaactattaacccagtcctggggaactaagaatttttccgttaattccgcctcgggactaccggcttcgggactgtagcaatattgccaacgtactaagggaggtaaagacatcaaaatggactcagtgcggccattggtttgcaaaccgaaaatggtgccccggtcatagaccaagttaaattccacataccgaccccggcgatataactggaactgccgt

SEQ ID NO: 34221 - DNA, 951 bp, Zea mays
  Clone ID: UC-ZMFLMO17230G07_FLI
gcctatttttaccaaaaatccggccagtttggcttaattaatgatgtccacgccatggctaacccaattttgctctggttttccaccggggccatggcattactaacaggcactgttatttggcaaaaaatacgtcaattttcctcccagaccatcaatgcacctttgcgggggataaccctttatattgaggtcaattacgccgtcaatctactgccttggttgggcattagtcgttgcacttttttttaccactacctacccgcctacgcctttagtattttagccctcgctttaatcctagaaactttactggacagtccccggcacagtcataacgtcattgcttgggcagttttaaccctagtggcgatagccttttggtattggttgcctgttttcttgggattaccattgactcctaggggctttgccctgcggatgctatttcccagttggatttgaagcaaagacaatccttccaaataaaatcggcacggtctcagattcaggccgaaatggattgactgggacagttggcttcaccccgatggcttcttggaagtacggactggggggtatattgaaaagttggggttgatggctccccagactaatttttcagcaactaccattttgagcactcccagggaaaattctatgttagatctcagcggcaagcacgcctttgttaccggcatcgccaataatcgctccattgcctggggcattgcccaacaactacaccaggccggggctgaaattggcgttagttatcttccagatgagaaaggcagatttgaaaagaaagtgcgggagttgaccgagcctttgcatcctaccctcgtcttgccgggggacgtacaggacgatgcccaggtggatgccctgttccatagcgttaaggaaaaatggggcaaactcgatatttgatccccggtaccggctcgg

SEQ ID NO: 34222 - DNA, 593 bp, Zea mays
  Clone ID: UC-ZMFLMO17230H02_FLI
aagcgcaacggtttgacggaggcagaggctttagctcgcattactagtcaaatgcccttggcggaaaaggtagctctagcggatgtggtgttggacaactccgggcaaattgcggacctagaaccacaaattatcaaggcttggcatcaccgttaacatttccttgcactgatacttccatcaggcgatcgccagggcgaaaactggactaagattaagttccgcagaaacaaatcgagctctatgccgtcagtgggcataaatcgccagaattttaactttttagacgctaccatatttagtgttttgcccctacaatgagactccccgcacactagatatggagtcttgttccggcaagaccgatggcaaaatgaatcacttgcaagaatggcggcaaagttgtgtagacgaccaactaacccgcctcaatgtcactccccttttaggggatgcccccgcccaacatttgctttatgctgaagcgctccagcgccgtaatgacggccgagttagtgacggtttaatgaaacgttatgcccacgtggcctcggggggctggtggtgttctggcattgatttactgtccgggg

SEQ ID NO: 34223 - DNA, 1135 bp, Zea mays
  Clone ID: UC-ZMFLMO17231F11_FLI
atttccaccggcaccaaagaaactttttccccttcccgcagttgcttttctccccccggcaactgaccaatccgaattttgggcccctgtaaatcttgcaaaagggtaatgggggtgtccatttcctgctccactgaccgtagtaggcgaaccatggtggcatggtcctcataactaccgtgggaaaaattcagccgggccacattcatgcccgcatccaccatctgacgtatcacctctaccgaactactggcggggccaatggtggccacaattttggtgcgatgacttaggggtctcataaacttcaccgggttaatcagggctggcactggaattttagtccaacttactgaggaggaattaagggaatgttatggagccgccatcccctgggccgccaaccaagccgtagtccaggcattttgaaaattaaaaccgccggtaataccatctacgtcgaggatttccccggcaaaatataatccagggcaacaacggctagccatggtcttaaaatccacttccttgagggtaatgcccccacaggtgacaaattcttctttgaacacccctttacctttgatcaaaaagtcaatttattctttcaaaagcccgacagtaaaactaaatctaatcttgattatatcgagcaaactcttttaccaatgctacaacaaactccccaggaaatcactaatttactccggggtttaaatggggaatatattgccagtgggccggcgggggcacctagtcgtggtcgccctgatgtactgccaacgggacggaatttctatgcggtggatatccgggccattcccacagaaacggcttgggacattggccgtcgagccgctgaaaccctgattgaaaggtacacccaagaccacggagaatatccccaaactttagctatttctatttggggcacttccaccatgcgtactggcggggatgacattgcccaggttctggccctattgggagtacaaccagtgtgggatagcccttcccgtcgcattgttgattttgaaattttgcccaccactgtactaaaacgtccccgggtggatgtgaccatcagaatttctggattttttcgggatagtttccccaacttggtggaatttct

SEQ ID NO: 34224 - DNA, 1106 bp, Zea mays
  Clone ID: UC-ZMFLMO17233B03_FLI
gaaccaacacacttgctgatttactggagtcaaagcatttctctgcagttgctaggtacacaggaaacctactgagcttagagcgctgagtactaatgaggggctttggaggattgggggccctgttcgtgggcaccggccacacatgcgtccgcccgggcctgcaggaagactcaaaactgcgatggctctttcttgagcggctgcgataactgaagaaagatatgaatgagattctttcgatgaataattccagcaaaaataatgttttcttctgttgtgtatacttggcagaaggaatggataatccatgctatggagcttgggtgattgcaacagtactgcaagtgcttttatttttcttttttgctaggttgttttccagtttgctttggtgcatttgtggtactgcctctttctggttaattaaatggtgttacatttttggcttacatttttgtggtgacggtcaggccaaattcttccaccctattctggttaattaaatggtgttaccaagggacagacaaattcactttatcggtttagctgatgtttgctggacagtgtggaagacccaaaaaaaacggtgtgtgctttgaagggaaaagaacaagacacctactgaaatcatattgtgctatgctaacatattggacaggtttataaaaaggagtcatctcagctcagctggagcatggcgcagaaattctcaagaagacggcgctgcactttcatcagcgagatcgaatggatggaggtgacaatagggtgacgatcatctgaaggcagagcattccatgctgagagacttttgttgaaaactgagcacagcatgtgcgctgttaaaagccatctggccatgtaaaggttcaggtgtgtggctatgaacgctttacgttgtgaggtaacgcctctcagtgtagttcatgttgtgccaattggatgaaccctctgttcattccaatgtgtttttttgcggtttgattagttttcttttcattccaatgtgtttttatgcggtttgtttagttccttttttcttagttacaaacctttgtaattttgttactgtcaaataatgaaattcagctttcccgtggtgg

SEQ ID NO: 34225 - DNA, 602 bp, Zea mays
  Clone ID: UC-ZMFLMO17233C09_FLI
cagacaccatgtcgctgatgggatcggacgaccactgcagtgtaacataactttctgattctgtggtggctatggtcttgaacattggtcgggagggccccaaagttgttccggtcgaagaagcggtgaagaccaaagaggagacggagaaggctgctctaaaggtggtgtatgctcttatgacatcgcttttcggtgacgttaaagtcgcagaggaagggaaatttgtcatatctgtagatgggaatgtggcgcacttggatgggaggagtggcgatgtcgaatgtgaaaatgctacgctgaaggaacggatcaagaccgccttccgtcgcatacagggcgccgtgagaccaatcccactttcagcctcttgataacttgtttgacatttcccatttgaacaaagtagcattctctgtttacaccagagtaccgggttttttttccctctctatcgaaaggaaccccagatgccttgtacggcatgctactcaagaggatttgattgttgatctgggattgcctctgtaaaatcacctgtaacattgtcatcctaacttgaaccacctccatcgttttcagtaaatttctacttaattttc

SEQ ID NO: 34226 - DNA, 452 bp, Zea mays
  Clone ID: UC-ZMFLMO17233C12_FLI
caacaatttgatcaggcaataacctgacgaccctggtttgttctgtgaatgcattttcgtcgtgcttcaacaacagggaccggactacatggtccgcaacgcaaggaggtccatgctggaggagctggaggggatgctggagatcgtggagcctcagccgccggggaagccgaggacgcttagccgcaggaggttcgatctcccagaaggcgtagccatcgaaaaggagacgcgggaggcgggcaagtgaagtgcatcggtgggtggtggcatgcttgggcagtttggtatatgcgcgatgcggactatagagtttgagtttgtgctgctaccgaaccgtggaccaccttaccccgttgagatgtttgatagctggactttttgtgctgttgtatttgtagaccagaacgttgttctttgtaataaattggcgtgtgctgctttttgctaat

SEQ ID NO: 34227 - DNA, 1180 bp, Zea mays
  Clone ID: UC-ZMFLMO17233D02_FLI
gctaacactcctgtatccgagctactactcctagtcctagtacaggctacagaggcagagcgagcaaaactgcctgtacatagcaaccatcaacggcgaccgatccaagtagtgagcattagtggatctactacgtacatatatagaaggaaacagctgcagctctctctctctcgctgtttcctgcgtgatctgcttgtgtagctactagctagctagcggagcggaacccatgggctgcgaggaggaagagaggctgctgttcccgtccttcgtctttcccgagagcttcgaggaggccgccacccccggctccggtggtgagcagaagaaggctcggcagcgtcggaggcgcaagccgcggccggcggaggttggcgagggcgcggacgagcaggccaggaagcggcggctgagcgacgaccaggcgcggttcctggagctcagcttcaggaaggagcgcaagctggagacgccccgcaaggtgcagctggccgccgagctgggcctcgacgccaagcaggtggccgtctggttccagaaccgccgcgcccgccacaagagcaagctcatggaggaggagttctccaagctccgcgccgcgcacgacgccgtcgtcctccacaactgccacctcgagaccgagctgctgaagatgaaggacaggctggcggaggtggaggaggagaagacgaagctcgtcgcggcggcggcggcggcggccggcggcggagcgggcgctgggagcagcagcccgagctcgtcgtcgttctcgacggtgacgcaccacccggccgcggcgctgcaggtggggcagttcggggtggagccggaggaggccgccgacctcgcctacatgaccgagtacgcctacaacagctacatgaacatgatggacctcgcgcccggctacttcggcggagtcgtctacgactacgaccacttcaactgatccacgagcatgcaggaggaggaggaggaagctacaagacgaaggaaggaaggattgactggcctatcagctaggtactattttcgtgttaatggatggatggaccgatttgcagggctcgcgtagcagtagtagcaatcaaggtcactagtatagtctgtcagtacgacgacgtcgatcagtcaatgtcctcctgacgataattattaagtcgatctattcagtagt

SEQ ID NO: 34228 - DNA, 2286 bp, Zea mays
  Clone ID: UC-ZMFLMO17233D09_FLI
tcagtcagtccccgggccttgctctccctccacttcgccgcgacgatctcctcccacccgtagaccaacaacaacggtactaaccagtaccagccccgcatgcctctcgcggcggctgccgcggccgttgccgcatgtccttcgccgatcggcctcacccgctctttgtgccgtatcgaggcgcatccgcggcgccggcggaggttccggttggaggcaaattcgtcggcgtctacgtccgctcccgcgccgaccgcggcggatgagggaggcggagcggggttgtgccccgtggtcaggttcgacatggccgacttcaccgccgccgaccgcgtcagcgtcgggctccatggacggtcggatgagatgatcttcgaggccacggtgtgcgatccgagcagcgagctgtatgggtcaacggtggtcctgcggcagctgaagagtttgcaggcgaagcgcagggggcgtcgcgctctcgaggtgctgaagaagctggctcgtcgccaaatgatgtaccactcctacgcacttcaggtccatggttacattgctccgtgcaatgccgtggaggaggaagatgtcccgttagtattggttcatgggtatcatgggagtcattccctgcgtcactggttgcaactctcagattggatcccaaccttagaggcaacattagcgttggacgaagaacaagtgaggagggtaggagatgactctgttggaggaccagctgtaactcgacagctgcgtcttatcaggatattgatgagagaccttttgattggtgtaaattatctacatagccatgggctggcacacaccgagcttaggatagagaatgttcacgtgagcccaatagacaagcatgttaaagtcggtattcttggaaatgctgctgattttcaagacaatgatcttagcagcagtacaattgcaagtaacaatgacaggcggaaaatgatgatagcctttgacatgagatgtgttggcttcatcatggcaaagatggttttgagagagctaatggatccttcgactttctttaaattcaaatcattcctgacaaagggaaatgacccatcctgtttgcgtgagttcctactaccaaccctctaccaaaattctccatctgggaatattggtttgcagatgctagataggcagtggggtgctggttggaatcttttagccttattgctggcaacaaaaccagaggaaaggataagttgtgttgatgcattgcgacacccgttcctttgtgggccaaaatggcgtataaatccgtcagcaaatctcattcggtggggcttgggatcaactgctgtccgcatggctgaagattatatatatgggcgtcatcagcgtagacgtttatcatattttgttgaattgatggaggttctaaaccctagtttaagaacacagaattggcttcacctcctacctggtcgttggcgcctcttgtactgcactggacgacacattggcctaacacttcgtcagccttcccctagagttctcatcagtgctgtgtaccttacagttagttcagagtcagtcgatcaagtcttctctctgacctcagatgttggtttcagaattatgccagaacccaattggcctcacgacaaatctggcagtgagggagttttgtctgtcaccgcatcagcaaggatagctgctggtaggatttatattaacgaacatgacagtaaagaggatatggtcacatcttctatgagatatcttcatggtaataaatggagaaaattctcgcaaataaaggagctgccatctagtctccctgcagtaaacattgctatggatgaaatccacgtatcgataagctgcacctcgactatgacagttaattctgcacaaaaggcgctgaaagagatccgtacacaaaccccgccggaaatgttcgatttgtcaaagattgtttgtgggacatacattgatgcgaggttgatgattcttcgtggtgttaacgggtcggctctgctcttcactagagcaaatccaatgattgacgcctgaggagactccgtccgccgccatgtaacgtgtattctttctttccctgtacattattatgtatttctagccgtacaatcaatttgtaacgagtgtagataacaaggtgtgtaggccatagttagaacgttgaaaattccttctcaagatgatctgttgcttccaagtacggagccttgacagggcttgagctgataaattattactctttccgtttcaaaatgaataaaattcacagttattgaggtc

SEQ ID NO: 34229 - DNA, 2063 bp, Zea mays
  Clone ID: UC-ZMFLMO17233E04_FLI
gcacgctgcacgctgcacgccgccgcgccgcacttctccccatccggcgccttctctatcctcgccgctgaagacgtcgtgccgtgcgtagcgagcagaggctgattgataagctcaaaaggctcaacaactcagccgctagcatccagactctttcgcgttggtgcatttttcaccgcaagaaggccaaaagggttgtagacacatgggaaaaacagtttactagtgcaagggaggataagaaaatatcattcctatatctatcaaatgatatcctgcaaaacagtaaacgcaagggagcagactatgtggatgagttctggagggttctacctagatccctgaagcatgtctatgaaaaaggaggaggagaagggaagaatcaggtggcgagattgatatcaatctgggatgaccgtaaagtttttgggacccgtattgaaagtatgaaaaatggcattcttggtgacaaccctcctatattggataacaatgggaatagtttaaatcctagctctaatcccacttcaaattctaaagctgcacggaaggattctggtacaatagtaaaaaaactcactgttggtggtatgcctgaaaagatcgtgtctgcataccaattagtgcttgatcagcattttgatgaagacactgctttaaacaaatgtaagactactttgggccttttggagaggataaataaagatattaatgattctatcatcaacggtaatcagccagcattgtcattgatctctgaccttcaagaacaggaaatgacccttaaacattgtatcaaacaactcgaaagtgtagatatggcgaggatatccctggtcaatcaattgaaagaagctctcaacgaacaggagtcgaaatcattagttcttcgcgatcaattgcaagttgctcaaacagaggctcaacgtgtcatccaacttaggaaacaactggggggtgcccttgtcacgagcgtcacacattctacttctagtccgctcatgattactccaccagaacaaacttcggctataatgcagggttcagaagtaagatcgacacatccccagtcacaaccactgaatcctgcagcttcgcttccccctacagtcagtgcagtgggtgatgagtccaagagaacggcggcagctatggcggataagcttgcatctttgtcagcacctgtgcaggtgctgacctccattctctcatcttttgctgctgagcaagctgcttccataaatggtggatcatcttctggggaattctctggaggaccaccaggtttccacattgataagaggcctaggcttgagaaaacaggtcaggcctctgacatgggtgctcctcctcccttttttgggcaagcggcacaggtgcaacaacagattggaggcacgcatccaccagctccagctccaggctcattcccaccacctccaccgccattgccgtctctactgccaccgctcctgcaacagttcggtcaaaatactggagggatgattggaatgggaggacctttcgggatgatggctggatctatgccacctccgcctccattgtccaacattctgccggcaggttttccgcgaccaagtgggccacctcctccacctccacttccaccagctcagagccagccccagcagcagtctcctcaggcggcacagcaatcaccaacatcaactggattctttcagtcatcgggcatggggttctttccgcctgcgcaggtgcagcaatctccatctgcccaacgccagtgactcaacggtggctctggcattcatgggcgtaaaggcagcggcgcccttgtgtgttaactttgtacactgaacaatatttcactctgtgtcgagcttaaacgtggctggctggtcctgcaagcgaggcagggccaatggccacgaattagagagattgtagaataggcatgcgtcctctgctatgtataactattcacttttttttgttttgttttgtttgtctgagtagttttaacttttcctttttcccgtttgcattgatcccccgaggcagaagaaagtgactttggaaag

SEQ ID NO: 34230 - DNA, 1920 bp, Zea mays
  Clone ID: UC-ZMFLMO17233F10_FLI
ccgccctccgcgatgcggcaacgcgcgccttggcctccgcgggcctcttccgtggcctccacggcggcgcctcctccgagcacggccgcgaacccgcaggtcctcttacgctctacaggaagctagtgagccaagggaagctcacgcatgatagttaccaggaaaatgtagcttccgaattagacaacctacttagtaggcttcaacggtacgagatggaaatggaggattatcatgacaagctgtacttctgggagaatagcagggagaaagagcggcgcaggcttcttgtcgaagaagctgaagataagcagcgtggtggtgtatggattgatgagagaaggggatttcttgacaagttggttgcgcggagaagaagaggaagcatagaacctggagttggtaagtgggtctcgtacctgaaccgagagaagaaactagatacattggtaggccatagaccagtcgctcctgttgctcctaaaggattgtatctctatggaaatgttggaagtgggaagacaatgttgatggacatgttctatggggccactgaaggtgtcatcaaacacaggaggaggtttcactttcatgaggccatgcttgaaatacatgatcatatgcatgatgtatggaagagacgtgatgatgacaaatctattcactcaagtgctttcagttggatatcaagccttccttttgacacgaaaattaaggagtggttgattggcgaagagaagtacaaacaacagacacaggaaaagcacatccttttggcagttgctgacaagtttttggttgatagacaggcaaataaaactggagcaagcattctatgctttgatgagatacagaccattgatgtttttgctgtggtagcactttctggcattctaagcaggctgttaagcacggggacagtacttgtagcaaccagtaataaagcaccagaagatctgaatcaggatgggatgcaaagggacatcttccttgagttattatcaaaattggatgaaaactgcaatgagattcttgtgggtactgaaaaggattatcgccgcctaattccgacagaaggctcaactgaggttcactatttttggcctgccacttctgatgctcgcagcatgtatgaggctatgtggcatgacataactgaccaatcaggaggaaatattgtttctgtcaccattcctgtaatgtttgggaggtctattgagattcctcaaagctgtaatggtgtcgcaaggtttgacttcgagtatctatgtggtcgcccagttggagcagcagattatatagcactagctaggaactaccatacaattttcatatcagaaattccagcgatgagtatgaagattcgtgacaaggcaagaaggtttatcactcttatcgatgagttgtacaaccaccactgccgccttatatgcctagctgcctcatccattgatgatctttttcaaggaactgaggaaggacctctttttgatttagagagttttcagtttgaaaccgagtccgaagggacaaagctgaggagggatgttttggcggaaggcaatgctggctcaggaccatctactaccggccttgtggcgatattgtctggtcaagaagagatgtttgcgttccgcagggcgatatcacggcttatcgagatgcagaccccgctgtatctggagcgtgtgcaggctgtacatccttcgttccgtcgtcctggtcttgcaagcaataacaggcctgcagttcctcagcctgctccggtggtttgacagcctcgcgctgtaccattgctttatttcgagtttcgtgtgagaaggcaataaaaccaaccagagatggtaacagtgagacattgtaaatgattgtagaaaggttgtgattattaataagttaaaatttcctattttaaacttc

SEQ ID NO: 34231 - DNA, 1562 bp, Zea mays
  Clone ID: UC-ZMFLMO17233H12_FLI
gcgagaatccgaggagcgctgccaagcgcctccgcgacgggatcgacgcgacttgattcgcgagtttcaacgtcgcgaggagagcagaaaattacgcaggcagagcggctgccggctgggtgttgaagctagagcggctaggagcaggttcggagcgctaccaaacaggcccttaacctaagcgctcctgcccttcggatccggaagttggaggcgcgcgaggaggcgaggcttgcaaggtctcccttgctagacggcaacggggtgacgatggcgcacgagcggggcgccgccgcatccacccacccagcggctccaacctccgaggaagacgcgctatttattgatttattacatgaagcgcccctgtctggtcaccgggagcctagaagcatagttggtgggaccttgtactgtatcttattggtaggttttgctgctgttgccatttcagctccatggatatttcttttcgcgccagatatgatctctccattgctatgtagctccaatgctatccttctcgttcttacaggcatttttcaacaatattgggttcaccaggtcaggaaagtgagattgcagggctattacgattttagccagaaactgaagcgtattgctcgacttccatttgctactattgcttgtgggactgctttgatgctcttaatcatggtctggcaacctcttttacaaatactatcagtttcactgcttctcaggattgccattgtagttgaagtcacgtgtgctggatgttttatgggcttatatttatggcacatccacagatacaactctttgaatgggcagcctgatattttgcggtcattatattctgcactccaaccatctaatactttggaagatcgaagatatcatgatgcccgtctttctgatcagcagatggcgttacttcagtaccaaagagagaatatccattatctgagtgaggaggttctccgcttgcaagaatgcttaagcaaataccagagaactgctggaaccactcctcaggttgatcttgcccatcttttagcaactcgtgatcaagaactccgagcactcactgctgagatgaatcaagtgcactccgaacttcaacatgcccgtggtttgatcgatgaaaaggattcagagctccagcgtatccgtctgagcaacaaccagtatgttgaagaaaacgataggctcagagctattctcggtgagtggagtgctcgagccgcaaagcttgaacgtgcattggaggcagagcgggtgtcaaacgtcgaattgaggaaaaatattgcaaagtttagaggtcatttgtacaaagagcaggaggcctgacttcggtatgttatagctggttccagaattttacctaaggcacctgactaaaggcacaatttttggatatagaagggtatctcggtctggatccattcgaactgggattgattacgagattggcacgtaattgtagaatgcgtagtttgatgtacatgtgttcgtaggtttgagcatgtagagtatggtatccctcgaaaaaaaaggaatatggtattcatgtggtg

SEQ ID NO: 34232 - DNA, 4512 bp, Zea mays
  Clone ID: UC-ZMFLMO17234A12_FLI
tctcgcggagtcgagtcgagtttagtcgtggtaagtcgatccattgttttcgttagtcggatgaatgattagttgtgtggatatataaggcttgtgctattaaattgatttgtgttgtgtgaatgaaattattttcatgagtatgtatgtcttgtattatgaaactaattagagatatgcatggtgcttgtaggtggattatgcctagagtattttggtaaagatatttctcaagtatagatgatttggttattgtatatgaattgagtgatcaagttaataatgtaaaaacaacgtttagtacttatagcgctttgccgataagatttattagtggttgagtgaatttctaatgtatggtgacatgaatgccttgttgtattatgtggttttagttcttctaaagataaagtgttgagtgttctaaatgttaaaagcatgataagtgtagaagttaaataagatctaagttagagttcttgttgtttggactgcatgtccaattttattacgtggctagttaagtaaagtaaaccgtgttttctgtagaagtattatatataaaacttgtagataatctttttaccttgcttgtgtaaaaatttcatgaccataggttcagtagtttaggagttatgatttttccaagtccagtttcagaatctgtccagattctgtactgatttcgaaaatgaccttgtttgtccaagttaaactgagaatcagctcttagtaattatagaagaattgtagtacttttcttaagctttccaacaaattttggatcaccccttttggtggtctagaagtcaagttatggctgtttgaaatgtgatgtttgaatctgtcaaaaatctggacagcaatgtgtgtttgaattaactgactttgatacacattgaatcgccttgagatgattataaatgaattgtagacaattctactagctttctaaaaagtctaggatcacctgatttggatatctgaaactccagttatgaaattttaaagtgagtggccgaattctgtccaaatctggacagaaattatgtttagttccgtttgacctttttaaagatcgaattttgttgtgatggaaatacaaaagttatagaggactttataagctttccagaaagttctagtttactatttttggatggatattttgtgagttatgagcaaaacaattgactatagtacagttgtccagaaattctgtaaatgtgaatgcttgactttactcttgtttggctaggatggattagtcaatttttgattcttgattgatgaatgctagtgaactagtaattatttaggccttctatggtaatagtaaacttaataatatggaaaaggtttagtagacatatatatctattagtaagttgatctggtcctcttgtggctataaacgtgatataagtgccttgtgtttgaatagcaaagtttagagttgaaatgctgattatatatataagtgttttagataattaagttgagaaaactaattaaaatgcttctatccttattctaaatcttaaatgtccgattctaataagtctaagattagtctaagtctggtaatcgattggtgtatactctggcataggaaaaatatagtcttcatgcatgattgtagtttcttgttcaaattaacttcggttaagctagagaaactcgattgttgtgtttcattgtttatcgacatctagcttatgctgatgagtattgtattgcgcctcgccattaagtacttagttctctattgcataggccgtaaagtcttatgttattgagatgtcttatttagtggtgtgtaattcaagtcatttagcaaagtggtttagaaggttagtagcttatttgtattcttgttctaaatttgaagtgtataaataatgaccttatgctttataaatcttttggtgttatgttcgaactaaagaaaatataggaactatatctagttttataattcttcatgtttggatttgattcgtgtaaattagagaacgtgatcattatgttggttgtgtatctctatctaatgcttggttatgaatgtttgtgatgtcttacttgaagtgtttcccctctatagtataagttatttattatttgctattcatgtccttactcatatgcattattgcatatcatctagatacgttaattaatcacgtgatgtggaggacatgtaatactcaaagttgtataaaaggaataaatagtgaattccctattttatgtgccacattgcatcataaaaagagcatccaagtaattgagagtgattacattacaaaataaatgataccaaaataaaataaaatgcatcatgttggagttttattgttggtgcatttaataaaatgataatgttgataataataataaaataataattctaaaggttgaatcgaatccctaaattaaaattagggttttgaaaatgagaagaagagaaaggatataaaaatatgaataatataattatattttaaaaaaaactggtatttcaatctcacagaagtaaaagggattaatgtagcacaagcttgaatttaagtttgagttcaaaatttaaacttggaaatagaagagagagaaagaaaatcaggaaaaagaaaaggaaaagtgaaggggttgcgtgtgggccggctgctgggatctcggcccatctggccagtagctcccgcgcggcccatccccttctcaccgtgcgcagggtcggctgacgtgtgggacctccgtgtcagccggttggttcatcgccaacgccgccgtatgcgaaggaagagggatccgtggagctcgggcgtattggttggagatccgttcgctgctgctagccaactcccgcgccgtacgcggtttccgctgtggttattcgccggtcgcccctgcaactccggatccggacgccgtcagctctaacctttcctcccctcgactacttccacggcgcgctcggctcaaagtccgccggtaacttcggcatggcgaccgcgcatatcctaccatgaccgcacctatccgaccatttaaacctccctcacagctactccgccccgctttttcttcttccctgcgctcgcgttttcctcccgtgctcgcatcctctctgctatcgcatcacgccgccgccacaaccatctcgcgccgtcgtcgtcattggggcccagggcttggttcaaaagcttcggactacgtcatcgtatgcgtacctggcgaatcggagcactacattgtcgtcgtggcgcgcgaattgctcgccggaactgattctcccccccgcggatctgggtgtgcgcgtgggcagcttcgccatttcttctagctctggtaatgactctcccacagcattggctaccctctaggttacatgatgcgccagttaaatttaggattagcacgccaggacgtggttgggccagctccggccaagctccgccgcggcgccccctggacatcgccgctggcaatgactgggtggaagaaatcacttatgccgttgatcataggatggacggccgagattaaaaccaagaatacctcttcgcgttataaaatctgagccctcggtttaggatcgtgtggcttagatcgtttagaaccctgtccgttgattcggtgatcaatggtagttgagagaagtaaccctatatggttgagctgatctaatcgggaccgcatattttagatcggacgatcagtttttgcccataccccttcgcgggtcaacattgctaaagagcccctctgctttcaggatatcaacccgccgtccagtggggagtgttctgagtctgagtacttttgcgtagaagcccctgacttttctgaaaaatgaggcccagtccagaggtgtttaaaaacagagaaatatttatagaaattcatttttaatacaaaaacaaatctagaaacttgtaaaatgcatagaaaattcattttaactccaaattgagccattccaatttctaaaattttgtaataatattctctatcatttagtgtatctgtttttacatgaaaacagtaagaaagttaatttctcacctaatcctattttaatcacattaaaccttaggaaattcataacttgaattctataactccaaatctaatgattccagttcctaggatctcattttaatgtgtagatttttactgtatattttattcatctgtttggtgtgatgttgatattggctatactatgtatgtattgtgttgatgcgaatagacgagcaagccactgtggaaactgaggttcaacaagtagaggtagctgagcaggagctcattgaaggagaagaacaggtggttcaggaggagccacaaggcgaggagtttgatctgatctaggtggcgtttctcagtcgacattggcgccaacgatccttagttcgttttatatttatctttattttgtaataagtcttccgctatgtaataaatactctgatgttttgtgacatttatctctatacactctgttattat

SEQ ID NO: 34233 - DNA, 1392 bp, Zea mays
  Clone ID: UC-ZMFLMO17234C12_FLI
caactcgccgtctgccttctgcgcctccatttcggcctctgtcccttgcaagttcaatctcacctccaaccatgggtaaagagaagtcccacatcaacattgtggttattggccacgttgactctggcaagtcgaccaccacaggacacctgatctacaagcttggaggcattgacaagcgtgtgatcgagaggtttgagaaggaggctgctgaaatgaacaagcggtccttcaagtacgcatgggtgctcgacaagctcaaggctgagcgtgagagaggtatcaccattgatatcgctctgtggaagtttgagaccaccaagtactactgcacggtcattgatgcccctggacaccgtgacttcatcaagaacatgatcactggtacctcccaggctgactgtgctgtccttatcattgactccaccactggtggttttgaggctggtatctccaaggatggccagacccgtgaacatgctctccttgcgttcacccttggagtgaagcagatgatttgctgctgcaacaagatggatgcaaccactccaaaatactccaaggcacgttatgatgagattgtgaaggaagtctcatcctacctcaagaaagttgggtacaaccctgataagattgccttcgttcccatttctggttttgagggcgacaacatgattgagaggtccaccaaccttgactggtacaaaggcccaaccctgcttgaggctcttgaccagatcaccgagcccaagaggccttcggacaagcccctgcgtctgcccctccaggatgtgtacaagattggtggtattggaactgtaccggttggtcgtgtggagactggtgtcatcaagcctggtatggtagtcacctttggtccaactggcctgactactgaggtgaagtctgttgagatgcaccatgaggcgcttcaggaggctcttccgggcgacaatgttggcttcaacgtgaagaacgttgctgtcaaggatctcaagcgtgggttcgtggcctccaactccaaggatgaccctgccaaggaggctgccagcttcacctcccaggtcatcatcatgaaccaccctgggcagattggcaacggctatgccccagtgctggactgccacacctcccacatcgccgtcaagtttgctgagctcattaccaagatcgacaggcgatctggcaaggagctcgagaaggagcccaagttcctgaagaacggtgatgctggtatggtgaagatgattcccaccaagcctatggtggtggagacattctccgcgtatcctcccctgggtaggtttgccgtccgcgacatgaggcagacggttgctgttggagtcatcaagagtgtggagaagaaggacccaaccggcgccaaggtgacca

SEQ ID NO: 34234 - DNA, 783 bp, Zea mays
  Clone ID: UC-ZMFLMO17234E01_FLI
cacacgcaaacgcatcccatcctgtcctcgcgttactactagttagttagagagacagagaggatcgatctgctggcggcgtctaagctggagaaaggcggcgccaccgccgagggcgacgagataggcatcgacccagcggcggagactccggagcagcgcaacaagttcctggtcctccgcctgtacgaggcgctcaacgcccgggaccacgccgccgtgcagtcgctgctggcgcccgacctggagtggtggttccatggcccgcccaagcaccagcagcacatgatgcgcctcctgacaaccaccaccaccaccaccaccggcagcttccgcttcgtgccccgctccgtggacgccctcgccgcctcgtccggcaccgtgatcgccgagggccacgagaggggttgctactgggtgcacgcctggaccgtgggacccgatggggtgatcacccagctccgtgagtacttcaacaccgacctcaccgtcacccgcctcgccgccgccgtcgccgccaagtgcgtctggcagagccgccgccccgacagcgccaccaactccctgccgggactcctgctcgccctctgatcactctgagggataaattaaataccatctctatctatatactacgtatcatccttgtcgtcgtcagtcagtcagtgcaaccgtgtgcatgtatctatctatgtatctacgtattgtatttgtatcccatccatggccgtatgccactattatatatatacagtattacagtatatctcatcgactttgacc

SEQ ID NO: 34235 - DNA, 1211 bp, Zea mays
  Clone ID: UC-ZMFLMO17234G07_FLI
ggcacggtaataactgaccaggcttacgcgcgcggagccgcgcggcgagggcggcccaggcgcggcgcgcgcagggcaccaccttcctccgccaccacgccgccatcagcgtcgacgccctcgcggccaggctcctctcctcgctcgcggtgcggggtgaatcgtctgcgaggaccgaggaggagtcgcagtttccgcaggcaccagtgcgcaggcaaggcggttttatccgcaggaaggaaacggggcatgatagaccatccacgtcagtcgaattatcttagtcgttcaatcgttggttcccatgctctctcgtgcgcccatgtgtcttatctggaggcttctagcatccctgcccacccacggctccggcgacagcggttgctgctttggactccggatccggccgccatcgctgcaacggtccaggttctcctcattttcgtttttttgggtcgaagcacttggagcaatacctctaggactcagtgtctgcatcagtcagtccgcttcttctacgtgttgtggcacagtggccaatcagcatcgagaccgcgcaacaccagattgcgttgtctcatcatccttggctccggagggcataccgtagaaatgatgaatattgtaacaatgcttcagaaggataggttcacaccaagatattatgtggctgcacttactgacaacatgagtcttcaaaaggcagagatctatgaacaatcgcttattcaggttacctcctcgcatcacaagattccaaatgataacagagaaacgacttgaatacaaattgctctccagtataccctttaaccctttgctatacagattgcagctcgaaactccatggactacgtacaggggagcttcaaaacccgaaggaaaacactgaatttcagattcaatttactgaaccaattgctgaaatcccagtctgatagagcgacttggagcagcattttctcccttttctaagcaaggattctggctctcatcaagtgactcctccccctcacgttgactttgcggacatatgtctcaattccagtggtggagctacgaacaacaatctgatgtcctgatcgagagcgatggagctaatgtttgaatttgtgaactatggatgtgaacttgtgtgaatttgtgaacttatgtatttggacttatgtgaatttgcgaacttatatatttggactatgtgaatttgtgat

SEQ ID NO: 34236 - DNA, 2149 bp, Zea mays
  Clone ID: UC-ZMFLMO17235A02_FLI
cgtcgctgggcttggctttaccagtggcgggttcccacacgggggctagacgccgccaccgctgaccccgtctacaccgaatcccccgcgcgatttaacccctcgcctcgctcgccgcctccgcttccatacaaccgcgcactccaaacgcgcacgcgctgttcgttcctcggccgctctgtccacccacgtccttctccgcccccaacagatctccgccggccgtgcggttccctaattcgccttctccggggctgttggatctccgcggcggctgaggatgggcaactgctgcgtgacgccgaaagcagccgacgacgccggcggcggcaagaagcccaaggagccgaagcagaagaagggtaagaagccgaaccccttttcgatcgattacaaccgctcggggcaggcgagcgcgccaaagctggtggtgctgcgggatcccacggggcgggacatcgcggcgcggtacgagctcggcgcggagctcgggcgcggcgagttcggggttacctacctctgcacagaccgcgcctcaggggaggcgctggcctgcaagtccatctccaagaagaagctccgcaccgccgtcgacctcgaggacgtgcgccgggaggtcgagatcatgcgccacctccccaagcaccccaacgtcgtcacgctcagggacacgtacgaggacgacaatgccgtgcacctcgtcatggagctctgcgagggcggtgagctcttcgaccgcatcgtggcgcggggacactacactgagcgtgctgccgccttggtcttacgcactattgttgaggtcgtgcagatgtgccataagcatggagtgatgcacagggatctcaaaccagaaaatttcttgtttgcaaacaagaaagaatcagcggcacttaaggccattgattttggcctgtctgtatttttcacaccaggcgaacggttttctgagattgttggaagtccttattacatggctccagaggtgctaaagagaaactatggcccagaggttgatgtttggagtgcaggagtgattctgtacattcttctttgtggtgtccccccattctgggcagaaacggaacagggtgttgctcaggcaatcattcgatctgtcattgatttcaaaagagatccatggccaagggtgtctgataacgccaaagaccttgtcagagaaatgctgaatccggacccaaaacgacgattgacagctcaccaagtgcttggtcacccatggttgcagaacattaagaaggctccaaatgttaatttgggtgaaactgttaaggccagactccaacaattctctgtgatgaacaagttcaagaagcatgcacttagggttatagctgagcatctttcggtagaagaggctgctgacataaaggatatgtttgagaagatggatcttaacaaggatcaaatgcttagtttcgaggagctgaagcttggtctgcataagtttggtcaccagatgcctgatgcagatgttcaaacactaatggaagcggcggatgctgatggaaatgggtccttgaattatggagaatttgttacattatttgttcatctaagaaagattggaaatgatgagcatctgcataaggcatttgcatacttcgaccgtaaccagagtggttttattgaaattgatgaactccgtgagtcattagctgatgaccttggacaaaaccgtgaagagattatcaatgccatcatccgtgatgtagacaccgataaggatggcaagataagctacgatgagtttgcgacgatgatgaaggccggaacagactggaggaaagcatccagacagtactcgagagagcggttcacgagcctgagccttaagctgcaaaaggatggatcgctgcagatgacgagtacacggtagcccgataacaccacataggcaagttgtgaattacagatggaaaccatgtgtagatttttctggttgtttgttgacagcttttctgcttgtcctgatgttccattgctttgtattcttcgcttgcggcctgtttgaaggattaggggggattgtttatgctatgattgtatttagactgcatgatccatgcctcgctcgtttccaaagtgtactgtacaaaagaaagaggagaaagggattatgaggctc

SEQ ID NO: 34237 - DNA, 860 bp, Zea mays
  Clone ID: UC-ZMFLMO17235A08_FLI
gctgctacacgtcctcacatcggggatgtcgtcactgctctctcatatcttgcttctcaggcatatgacccaaatgcccctgttcaacacgtccggagcaattcatccacccccagggccagaaaccctgctgggtggaacggcgaccagcgcagcgtgcgctcgcctaaccatcattctccagacccgcggcgcagagacgctgcgggggcatccaagtatggagcagaggttagcaggactagctctaccagcgactctggccggcgatcaggcctggatgacatggacctgaccgggtcgcaagtgggaagcccagcgcagaccggaagaaggagagaagctccaaggggcaccgacagacagcgtgctgtcgcagaggccaggacatggggggagaattcaagggagcgaacaaatggccatggcagcttcgacagcacccatgagtgaagccgtcaggttctgttccagtcatcattccagaacccccaccatgggttgagtccactcattcatcagcaccagtcagatccgatcttgggacatggcgtcggtccaagtgtctgtgaataaggcttttcttgccctcctgtggcgaatgcaattctcctggcgcccattccttgccaatgcgacctgtgtgtgtcatgcctctggcgactgggagcctcaggaggagcctgtaggattcagtcagaggtagacaggtcagtgaagaaagaggaggggcgcggagtcacattggcgagtgttttgttttttttggcggctaaatgctgagtatgttcagctgcatgtgtcctttttgtgtatgtgtacgtgtaagacgtgtaatagcaaccgtgtcaggtttggct

SEQ ID NO: 34238 - DNA, 1262 bp, Zea mays
  Clone ID: UC-ZMFLMO17235B07_FLI
cggcgctcctcaggttccccggcggggaggcgctgtcggtggccgccatcctcgaggcgcccggggaggtcgtcgccaagtccgcgcacagcacgctgtaccgcgccgccgtgcgctccggggaggccgccgtgctgctgaggttcgtgcgccccgcgtgcgccgacgaggccttcgccgccgccgcgcggcggatcggcgccgtccgccaccccaacctcgtgccgctccgcgcggtgtacgtcggccccaggggcgagaagctgctcgtctaccccttctacgccgccggctcgctccaacgcttcttgcaagaggggatcgcggagtcgcagagatggagcatagtgtgcaagctctccgtcggcatcgccagggggctagaccacctgcacacgggcctggacaagccgatggtccacggcaacctgaagacgagcaacgtgctcctggacggcagctacgacgagtgcagggtgtcggactacgggctgcacctgctgctgagccccgccgcggcgcaggaggcgctggaggccgccgcggcgcaggggtacggggcgcccgagctggccaaggcgcgggacgccacgcgggagagcgacgtgtacagcctcggggtggtcctgctggagctgctggcaaccgcgcccgcgggcggcgacggcgtcggcgacggcatcctcctcctccctgcctcctcctcctcctccttcaagaacctggtcctcgagcgcaagatctccgacgcgttcggctcgtctgggcttgctaggcagtgcaggagcggggcggggaaggagaggagcctgggcgcgttcttcgagctggccacggcgtgctgcagcccgtcgccgtcgctgagacccagcgccaggcaggtactccagaggctccaggagatcgcgcggtgaatggatgcgaggaccgactggcgactatacatacatactgagtgtctgcgttgatcggtctgcgaaaagtgtcctcctgccccccagccaggatagatgatgaacccaacaacgtgtttcgtggtgggcggtttgaacccctgtgctgtacagtttcaccgggagcagacagcagaggtggtggtggtggtggtcatcgctgctagatgaacaagcatcactactagactgtgtgtctttgagtttgttcctcaaagtggaaacgtacgatcgtggagtacctgccctgaaaatatgtaaaaatgcttgtagtgatattagtgaacagggtacgtgttgtatttcgat

SEQ ID NO: 34239 - DNA, 1457 bp, Zea mays
  Clone ID: UC-ZMFLMO17235C06_FLI
tactgtgccatccggcgtgacctgctcgatgagtgcctcaccgtgctcggtgtggaacggctcagtatcgacgaggtgcagcgcatcgagtggaagcatctcaatgacaagatgaagaagtgggtgcatggggtcaagacagttgttcgctgcctgctcaccggtgagcgccggctctgtgaccaggtgcttgctgtgtccgatgagctccgggatgagtgctttgtggagtccaccaagtgctgcatcatgcagatccgtaactttggggatgctgtctctgtgtgcactcgctcgcccgagaagctttcccggatccttgacatgtatgaggcgcttgctgaggtgatccctgaactaaaggagctgttctttgggagttatgggggtgatgtcatccatgatctggagggggttcttgaaaggcttggtgacgcggtcaagggtacccttcttgagtttgggaaggtcctacaacaggagtcatcgcggcgacccatgatggctggtgagatccacccaatgacacgctatgtgatgaactatctcagattgttggtcgtttactgtgacacacttgacatacttttggatgacagtggtgctggagctgtagatcataatattttacataatggcaccgatgaggatcaggagtatctgaagagtttgaccccatttggacgccgtttagtcaaactgatatcttacttggaggttaatctggatgaaaaatctaaactttatgaggatggggcactgcagtgcatattttccatgaataacacactctacattgtacaaaaggttaaggattccgagcttgggaggattttaggtgatcactggatacggagacgccgtggcaagattaggcaaaattcaaagagctaccttagggtttcatggaccaaagttttgtcttatttgaaggatgatggacatggcagcagtgggagcgggagtttcggcagcagcgggaactcaagctctaggatcaaagaaaaaattaagaatttcaacttggcctttgaggagctatacaggagccaaacagtttggaaggtgccagatcctcaactccgagaagaactcaagatttctatatctgaaaatgtgatcccagcttaccgtgcctttactggaaggtatggcagtctagttgatagtggaaggaattctggaaaatacataaaatacactccagaggatttggagaatcacctgtctgatctatttgaagggtcactagggtctgccaaccattccaggagaagatgatgatttctcatgatgagatttggctacaggtatgcttttggtacgagggacaccatatcatcaaacagctatagtgaatgtgttgaactgccatatcgcaatgtaattcagaatacgaccccctttgttttgcaatcaatatatgtgtaatactaagtgatgtacatgttcttttt

SEQ ID NO: 34240 - DNA, 1769 bp, Zea mays
  Clone ID: UC-ZMFLMO17235C12_FLI
ccaagcctgacatgccgtccgccgcgctcatatctcctttcgtctactccgtccagtcccaactctccaccggcggcaggaggcgccggcgctagcccgtggcgagatgagcggcgggagcgtaagcgccgtgttttatgcggacaagtaccacccgatccaggccggcagcatcgacggcacggacgtcgcgccccacgataacgccgtcctccgcgccctcatctgctctcaggccggcctctacgaccctttcggcgaccccaaggcctccggcgacccccaccgcacggttttcgtcggccgcctctcgcgccagaccgacgacgacacgcttcggaaggcgatgagcaggtacgggagggtgaagagcatgcggttggtgcgtgacattgttacaggtgcttctcgtggttatgcatttgttgagtatgaaactgacagagagatgcatcgtgcctatgaggatgcacaccattcagttattgaaggcagtgaagtgattgttgattactacaggcaacagcttatgcctgggtggataccaaggcggctaggaggggggcttggtggaatgaaagaatctggacagcttcgctttggaggccgagagaggccatttcgtgctcccttgcgacctattccttatgatgaactgaagaagcttgggatcccaccgccacctgaagggcgatatatgacacgttatcaggttccaccaccaccaaggcggaagagcagcaatattgacattgaagattcacctcctgggagaagatccaaggacagagccggggttagtacctacagaaggcaaagaagttctaatgacgatgatgaaacccttctcaagaggaaaagcagccgagacgggctagaagaatcacaaagtcggaggagcgcaagatcatccattaccaaggaggacaacaggtacagcagtcagaggaagtccaaggaacatgacaaaggtcatcgcaagcacagacgaagccaagatccgggcgaagtatctcctccagcagaggaagacggtagctatgaaaggcagagaactttagaagaacctgatcgcagccctgatcggtaccatcaccactggcatcacagggatgatacatatgagagcagacacttgcgccacagggatcatcgcaagcgtagacgaagccaagaaccgggcgaagtatctccaccagaggaagactgtagccatgaaagggagagaacttcagacgaacctggtcgcagccctgatcggtaccatcaccactggcatcaaagggatggtacatatgagagcagacactcacgccacagggatcatcgcaagcgcagacgaagccaagagccaggcgtatctccactagaggaagacagtagctatgaaagggaaagaacttcagacgaacttggtcgcagccctgattggtaccatcaccatcggcatcacagggaggatacatatgagagcagacactctcaccacagggatcgccgacgccatggtgaccggcatcgcaccaagagaagcgagagtcgagattacagggactaggcaactctcactcgcaccacagggatccccgacgccatggtgaccggcatcacaccaagagaagtgagggtcgagattacactctccagtttcctagactacaatgtttcattatgtaaacttgattgtttttcgtactccttgatctagtaaggtttactgttgccctgtagtctctttcatgagaatgtattcctgtaccgaattttat

SEQ ID NO: 34241 - DNA, 1460 bp, Zea mays
  Clone ID: UC-ZMFLMO17235D02_FLI
gccaccaccgtcccactcgctcctgcgagctccagatccggtgtggcggcacggctcagggtggcaacgcgccgcaaccgccgtcgcgcccacacatgccatatccaaccaccatggagctcttcctcatcaagcccatgacatgagctctcgtcgaggtgggctccaggtccgttaccggcgcgggccgctctgtacatgacgccaccgccctcggggccacctccatggcgccctccatcagcaaccctaccagctccccaagtcccatctccatggcgcactctatcagcggtggcgacaccgacctgctcccacctccctgaagtgctccggtcaaactgcacgtgccaaggcagatgcgacgccgatccgctcccatctccatggcgcgctccggcagcggcggcaatgccgacccactcccacctccctggtatactcacagacgtagaaatgatgttaacactatcttcttctgtagggcaaattggacccagtcgttggtagacaagatcagattgagcgtgttactcagattttgggcaagcggacaaagaacaacccctgcctaatggagagcctggtgttggaaagactcctattgctgaggggcttgctcagcgtattgccaattgggatgttcctaaaacaattgaaggaaaaagaagttaggttattactcttgacatggggctccttgttgctggaactaaataccgaggagagtttgaagagagactaaagaaacttatggatgaaattaagcaaaatgaagacattattctctttattgatgaagtgcacacactgattggagcaggtgcagcagaagtgcattggtgccacaacactggatgagtataggaagcatatagagaaagatccttccttggaaagaaggtttcaaccagttaaggttccagagcctactgtggatgaaacaatacagatcttaagaggacttcgtgagagatatgaacttcatcacaaactaagatacacagatgatgctttaattgctgctgcacagttgtcttatcagtatatcagcgatcgttttctgcctgacaaagccattgacttgattgatgaagctggatctcgtgttaggctgaggcatgcgcagctccctgatgaagccaaagagctggacaaagagctgcggcagataaccaagcagaaaaatgaggctgtatgtggccaagattttgagaaggtatactgttatttggtacagcggcggcaacgccgatctgctcccacctccctggcaacgccgatctggttaataccaagcattatgttgtttccttttgagataaatattttgttaccaattttaccttttgtctcctcttcttgttttttgttctataatctgtagcaaatggctaacgatgaggatatccatcactttgtctatgacaatagaactgatatgttcaagattccgtagc

SEQ ID NO: 34242 - DNA, 442 bp, Zea mays
  Clone ID: UC-ZMFLMO17235F02_FLI
ctacgatgggattctcaagagagcaggtgagagcaaccgtgcggaggctgactgaaaacgggcagaacgtggacctgaatgtggtgctcgacaagctgatgaacggatgataagttgagcaatactgtcatttcacagtcccgcacagtactatggaaacttggaaagtgtcagctcatcagctgaaacgatttttctgtctgcaacgttgcatacctgattgtgcctggagaacaataatggccgaacagccgctcatcctgattgccggtcacggttgcttcatctggaatggaaacagctcagtgtgccttcagtgaattacagtatcacaatctgaatacgttgtccattttatgtatatgtggcgatgagacattctaaaacatatactgtggtttcttgtgatatgttaataagcagctttactctgtttttaggc

SEQ ID NO: 34243 - DNA, 1629 bp, Zea mays
  Clone ID: UC-ZMFLMO17235F03_FLI
cttggagagagagagagagagagacggccccgcagcggcggaggcggagatgggggcgtcggatctagaccggcagatcgagcagctgaagcggtgcgagccgctcacggaggcggaggtcaaggcactgtgcctcaaggccatggagatcctcatcgaggagagtaacgtgcagcgcgtcgacgcccccgtcaccatttgtggagacatacatggacagttctatgacatgaaggagctgttcaaagttggaggtgtgttgttgctttttattgttggacttcatttggcattagggtgtcttctcgaaagaacatattcagagcatggttgttttggaacttctgtcctggagaagccaatctagtctgtctggcggcaagcgcttattgatacttaacttccactacataacagtggatcacactaaccgtgaactgatttttctgaatggtatatgtataacactggagcatagaagtgataaaatgttaggtatccagaccgtattaccttaatacgaggaaaccatgagagcagacagatcacacaggtttatggattctatgatgagtgccttcgcaaatatggctcagtcaatgtctggagatattgcactgatatattcgactatttaagtttgtctgcacttattgagaacaaaatatttagtgtccatggaggcctttctcctgctatcacgacactggatcagataagagtaatagaccgcaagcaagaagtacctcatgatggggctatgtgtgaccttctatggtctgatccagaggacactgtagatggttggggactaagtcctcggggtgcaggattcctctttggtggaaatgtggtctcatcatttaaccattcaaacaacatagattacatttgtcgtgcacatcaacttgtcatggaagggtataaatggatgttcaatagcaagattgtaactgtatggtctgctcctaattactgctacaggtgtggcaatattgctgcaatcctagagctggatgagaacctgaataagcagttccgcgtatttgaagctgctccacatgaatcaagaggtgttcctgctaagaggccagcaccagattactttctgtgatgctacacagcgaacgcttgagcttactgtgctttcaagcgctggacctcatgttgcaagaagagctcaggccctacagctttccagccaggaggtggttttcaggatgtgtaaattgagtgtcatcttctcccttcaggtccatgatttgtaagagagttggattttggcatccagttttttcacagaacatcacccatttgagctggagaaatacgcccttgcgaaggggtttcatgtgatgtgctaaaagtacacgttgtaagatttttttttgcgattgcataccccctagaaaaaccgttcctggaatatgtggcaatcaggaaatgtgtcgatgctctggaaagtgtaggagatttttgtagtagtcatttgcgcgtgctgttagggactagggagcatgtggtcaggggacactagcactagcttgtcggcatgcaatggtgtattgtaactgtctttatgcagcatctctaattcaaatagctaactacatttgatgtcttcttctg

SEQ ID NO: 34244 - DNA, 1150 bp, Zea mays
  Clone ID: UC-ZMFLMO17235G07_FLI
gccaacctgcatctacttcaattgatgctcaagggatgtttgatgaaatgcagcaaagtgatacctctgttgccatcgcacatactgccttcaacactttcttcaacacggaggagctagataggtggcttgaaagctgcgatgaacagggtgaatcaattggagtcaataagatccatgtgaagcctcagttctttgatgtgggcaaggactataactgggcgaggggcattcggagcaccgagatccagctcgctgatggcaagaactgtgagctacataggtgttgggcagatatcttggatgctataagcaaggctcaacattcgactgacatcactggctggttgactatactggtgagggatgatagcaattctgtcgacctgcttacgaaggagggcttgctgactacccatgatgtggagattgcaaaaggagagcaggaaatcatgaacgaagtatttccagcagagagccggtcatctgggtttggtgtggctatggatcttccagacatatggccttgctatgagtccaaaccatctgatgcgcaaggctatgctgtaaaagggataccaaatctcagaaacacatgctatcggagtgcagtattgcagtgcctgtttatgctcggtaagctgctagaaaggatactaacatcgacatggttagccatccaagggtgctcacaaattggagtcggcggggttcttcagctgccgtatttgcttgagttctcacctgttctcgaggagctttttgtggaggcaagtgcttgggatgttctttacaactttgagcaaggagacacatggaatgttcaactcgtcggatccattgatggtgctgctgcttttggttttcccgagactcctgagcaagctgcaagagctagacttgtgagtggaattaagcaaccatggcctccacctatggcgtttgagtgcttagatttgtgcatggcctccgacaactcgacgatcatggtcagcggcttgggggcaagccgcatttcaagcggtgggaaatgttaggaatggttgccatatgaggcattagacggggataagtgggtatcttcacctataaaaggagagctgtaccggctgtaggggcatcaaagaatcattttacaacagaaatctct

SEQ ID NO: 34245 - DNA, 569 bp, Zea mays
  Clone ID: UC-ZMFLMO17235G12_FLI
aggcgctgcccggaatgtctcaaaggcattgatggttgtcttgaagaagatgatggtggactcttcccaccactagcagctatagaggaaggggaaatctgtggctgacaagggcccgccgccgcaactgtggtggcagagaaggtggtggcacagttagggcagccacaagaccccatcatctgggcgaggcggtagcatcatacttgtcatcatcctgtcacatagctttggatttgaagcatgaggagaagcattgtgggggagaagcttcagtgcaacattgttgttgtatagggattaacatcctcaagatcacttggaaaactttcacaaaaaactcgtaatgcaagcatatgttttattggaaaagttttccaagctgaatttctgaaagcctcctcactgctttagttatgctgaattggaatttgcagctaggggtttctcacaagtaaatttcttagctaaaggtggattttggtctgttcattgacgtgtcctttctgatggtggcgttgtttgttagctacaaaatcatcaatcaaagattgtaattatattgcgtc

SEQ ID NO: 34246 - DNA, 1526 bp, Zea mays
  Clone ID: UC-ZMFLMO17235H07_FLI
gctttctggacctgaaaaaccatctaaatattgatttcatcattttggaccttcgactagagacctccccaacagcaaccaaatagaaacaattgctggtttacaaatgccattaaaccctggttagagaagtgcaaatatagttctaatgcagtcttagacatacttcatgcgagtgtgaaatgtaacgttatatacttgtatactgaccttgttacttaatcattgtgatgttttataattttttttgttatgatttcatgtttaatagctctgtacagcatgtgtgatgataacattgttacttcctgtgatgttatatcctctctatgtgagtggtgatggcctcatggtaagtctacttctagttctatgtgtttacattattttaattttggcaatcttcacaatctaaaagtctgtcagaacaggtcatggaagtccctgaaatatctcctatgtcagaatacttgtccactcatgatgttattctttctgtggatggtctgaaaataaccagaactgatgaatggatcaagattctgaaccaaggtactacagcgaaatctagggatcctgaattccttgaaggctctcatagatatgttgccactagttctaccaagggttattgcgtgcccgattcatggatagatgcaagcaaaaatctctggcagataagagacaagctgccttgcccagatgaactgatagccttcgaaaaagttatctgtaacgtctcaaccattttggcagagaagactagcataggtagtgaccagaaggaagttgagggaaaatattgtttgattgcgaaagatgtagtaaagcttagaagatgtggaaacggatggcacaggactgaagatgatgaaagtagctgtgcatgttttgaggatgagcactgtttggtacctgttctgaacccaggcttttcatggattgaggtctcctatgccaggccatactctttgagatgtttacaaaaaggaggaaatttgttatcatcacatactgcaaatagtaactttggacagagtccttgtgaaggatcttttgtttatgtgggtgatctgtcatcagcagcacgttcggttaggttatcccactaccgacctcgatgggcacttctacttttcattgcagacatcccatatatcttggaaaatggtttaagtagcttgcttcatgcatctgcagcattggctgtaatcaattgcctaccggtgtattttctggatggtgaagcgattctggagactaccttaagctatgtagcttggtttaccccaagactgcaacgcagaattctaaaagtatgcagcgtggtgtggacgggtttattagtcattactttctcaagtatttgttattccacagtgctacattatggcgtatagcgaataacccatggaattttgtcttgaacaaagagaagatcattttaatggaacatgccaactgtactctgtccattgtaaattataagttgttttgacttatatatacatagcttttgttaggct

SEQ ID NO: 34247 - DNA, 1776 bp, Zea mays
  Clone ID: UC-ZMFLMO17236D01_FLI
cgccgttgattgatgcgctcactcatctcacatgggtgggactctttgctcttggagcaccacctgtctagtgggagctactccagcctctagacaccaactccagcgcccccgtatggaacaacaactccaccctcactgtctggacagcaagattcattcacctgtcatatagtttcatcgatgaatctgaaacttttattgttcctgtgttgcccctatccaaaggtcatgttccttggatcaactgtaaggtcaaaagagacctttgttcgctgttgctacaaagaatgcagatttttcttccaatcagccaaggctgccatctgaaaagataaggcttgaagcttccagcagtggtgaatattcacgctttaatagtctgtctgaacatagtggaggaccaaataaatggttgaagctcaatcagcagtacaaccaattttgtagtgacctgacaccattggcacctattggttctatatcagaaaaaatcaatgtgcaatcttcagaagtgacaaatcggtctgaaaatggaattactatgaaccttaatgttaatgagacagatataatagacacaacagaacttgcagatcaaatacaacaaagtggggcaactaagagcctgcgtcaccacaaagattcaggaggtgctgaaaaccatgttatgcttgagtcacatgatgggcttgcagcacaaccaccatttatatttactgacacacaaactataccagaagatacaagtgcgttggcgcctatcacgtcagcccaagctaggcaacaggtactgtctattggtacttcacctgtgttagacggaacaccacaattgcaacctggaaaggagaatgacgaatgtttgaacaacagtggccagataggcgtagagacacagaacacaatattgttctctctacttgagatggaagaattacaagacaaggaattggaggatgctcaggagcatagacaaaaatgtgaatctgaagcttatcgcaaagcacaaagagctttacttgaggcaaatggaagatgtgcaattcttcgtagaaaaagggagatttgctcttcacaagaccatggtttaattgcagagaattcttctttggtgcaatctttgagtattcggaatcctgaagatggccttgcaatgccatcactgctcaattctcagattcatgtagttagtcagattcctgaaaatcagggtggtagacacaggctgtgtcctgaagaaccttctcagcagcaaattgataagcatgaagatgaagcacgtccacactattgtgataagcttgctgctagcacaactgatcccagctctgtgagtgttgtcaatgctgacagcatcctttcagattatatggaggatgatcttttattcccgactagacaggcaagatcagaatgtgctctggatgttgagaatcaaatggaagaaactatacatgtatatgcagaggaaaacagacaagtttctggtgacggtggtcaggattatgaacttttagaagcttctttgaggtctagatgtcgtcgtctctgaaccgaagcaagaacaagtcttgccccatatggctgctcgtgatcggcaaccgatgaccctaggcttgacggatgacaggtccactgcaagtgatcactgactttagtttcaagtcgtgtgcggtgtgtgtcgtcgctcgtcggtctgtcgcgccattcaatacaagaaccccctgtaaatcagactaataaataaatcagctgaaaggatcaaagggttcg

SEQ ID NO: 34248 - DNA, 628 bp, Zea mays
  Clone ID: UC-ZMFLMO17236D11_FLI
atttcaattctactttggagttttctaatgaatttgacatgactgctcaagttaatgctagaatgcctctaacaattcatttgacatgcaaaagtgcaaatgcccttgctttattgtaataacatcataaactcccttcttcataggtagtaagaccaaaaaatgcttttagatgctaactagggaaaaatactatttgatactcataaacttgtaatagtaccaaaaacaatgtgttctgtggcaagccacaaaactagttcaggttttgattttcacccaaggagctaaggtactattcttttacaaataagatgataatcattgcagaatctgggtaaatgctcaatatgaactaattgtatataatttccatttcctgtaggatggttgatcaagtcagattcactcagatgtttccagactgaaaaggaatttttgctctgtgtactattagggaattcttgagagattagcacttaaattctttgaaacatcccttttctcgatgtacctcctatatatatcgtatgcttgattcatctacatgtttgtgttgctttttgaagtatctagacctgcagttatgattcaggatttcaaatagaagctttttatccatctaatc

SEQ ID NO: 34249 - DNA, 1256 bp, Zea mays
  Clone ID: UC-ZMFLMO17236F01_FLI
ggagcgaatgaatttctgtcctcttggtgctattaagtcaacatattttggcttcaaaatatgttgacttaatagtcccaggttatacccatctgcaaagggcgcagcctgttctgctgccacatcttctcttatcatatgttgaacagttggagcgtgatgctggtcggctggtcaactgcagggagcgaatgaatttctgtcctcttggtgcttgtgctttggctggaactggacttcccattgataggtttcaaactgctaaagatttgaaatttacggctccaatgaagaatagcattgatgcagtatcagaccgtgactttgtacttgagtttcttgctgccaattcgatcgctgctgttcatctttcgcgaattggtgaagaatgggttctttgggcatcagaggaatttgggtttctgataccaagtgacaaagtttcaactggaagcagcattatgccccagaagaaaaatccagacccaatggagcttgttcgtgggaaatctgctagggttgttggagacctcatgactgttctaaccctctgtaaaggccttccacaggcctacaaccgtgaccttcaggtgagcctaattctcataagtatgtcctctcttacatgagtgtgtattctgaagttttcgtcctgagcaggaagacaaggaacccttgcttgatagtgtgaaagctgtattaggaatgcttgaagtatgcacagagtttgctcaaaatatctcttttaattcaaaaagaatacaaagttcacttccagctggttatctggatgcaacgacgctggcggattatctcgtgaagaagggtgtccctttcagaacttctcacgagatagttggaaggtctgttgctctatgcgtctccaagaactgtcagctagctgagcttgaattggctgacctaaaatctgtccatcctgtatttgaggacgacgtctatgaatacctgggggttgaaaacgctgtaaacaagttcatatcctatggctctactggttcagaacaagtgaaaaagcagcttgaggattggcgcatccagctcggggtgagctcataacggttggcatggtccaagaaataagctcgcaaattagtgcttgcgatttttgtaggtgtatgttaacgtcgtgaactttttctgtgtgtttgttcatacatttcgaaaactggaacgaatgatgtaaacatgttggacaccttgagcctcttttatatattattattgcactgtgtttt

SEQ ID NO: 34250 - DNA, 1732 bp, Zea mays
  Clone ID: UC-ZMFLMO17236G06_FLI
gtttatctacctatctggtgtccgctttaatttctttcctcggtccctccaccccccttcgccctttccgacgcgccgcccgaaaccctagccccactgattctctccagcccagcccagccaaggggaggggatgtcggcggcgccagcggcgggagggcagggtggcgggggcattgacgccgcgctcctcgacgacatcatccgccgcctgctcgaggtgcggaccgcgcgcccagggaagcaggtgcagctctctgagtcggagatccgccagctgtgcaccgtctcccgcgccatcttcctcagccagcccaacctcctcgagctcgaggcgcccatcaagatctgcggtgacatccatggtcaatacagtgatcttctaaggctttttgaatatggaggttttcctcctgaagccaattatctattcttaggtgattatgttgatcgaggcaaacaaagtttggagactatatgccttcttcttgcttacaaaatcaagtaccctgagaacttttttcttctgaggggcaatcatgaatgtgcctcaataaacagaatatatggattttatgatgaatgcaagcgtcgatttaatgtgcggctatggaaggtcttcacagaatgttttaacactctacctgtggctgctcttatcgatgataaaatattatgtatgcacggtggactttctcccgatctagcacacttggatgagataaagaacttgcaacgtccaaccgatgtaccagatcaaggtctactgtgtgacttactttggtcagatccaggaaaagatgttcaagggtggggcatgaatgatagaggggtctcatatacctttggtgctgacaaggtttcagaattcctgcaaaggcatgatcttgatcttatttgtcgtgctcatcaggttgtcgaggatgggtatgaattctttgctgacagacagcttgtcaccatattctcggctcccaattattgtggtgaatttgataatgctggcgcaatgatgagcgttgacgaaactttgatgtgttccttccaaattctgaaacctgctgagagaaaacaaatttatggggccaaacaaaatgtgagatagtgaacccattttgcttccagcagctctgaggctctcctgtggatgcatcaagacaacagcatgatggcgccaaacttgaggtcagcattgggcaagggcaactaccagagcagagaaaccaaataatataccatacctaactgttcgcctggaagttactcttcatggcaagtgtttgaattttctcttgttactgcgtgtcgaacaatcatgtagctgtagatatagtgattgtggaaggatgaagttgccaaattgacccgtggcgatttccttctccagacaggaaaaattctgaacatcaaggagtttctgtttgcaagtttcactatttaaaagcaggtcgtgtcacttgtgcggagttaaggactggaccgaggcagtattatcagtttctggatatggattgttgtgctagtttcgatgcaggtgtcaaacaacaattaggctgaagaggtgagcaacatttaaggaggtgctgatgcttgctgataacctatgaaaaggcgttgctgtagctgactacttggtttgtggtcagataattctggacgtgaattttgatatgttggccagattagctgccaaataggtatttcgtatctcttgatttatgggattcacatt

SEQ ID NO: 34251 - DNA, 861 bp, Zea mays
  Clone ID: UC-ZMFLMO17236H03_FLI
ctccccctcctccacgcagacgcagctccctctcctctcagcccccacccatcgagccgctagcgccggcgcccggcggcggtatggaggctggtggcgaggagttcgcgatcggcgtggtgctctccgcgaagaccaccctgggggaggagttcgagggccagatcgtcgccttcgatcgaccctccaacctcctcgttatccaggagggcgtggggagggcggagagcggagagcggcggaacgtgagggtgctgaaggcgaactacatccgggagttctctgtgctcagcaagggagacgaccctctcgatcctgccggttgcatgctggaccttaactccatttatgcccgggaggatgctgcactcaggcaagcagagattgaagctgagaaaattggtgttggtgtcaccccagaagctcaaaatatattcgatgcgctgtccaagacgcttccggtgcagtgggacaagactgacattgttgtaatgaaggaggttcgtgtacgcagcccgtacctgcctgaaaatgttagtggaggaacagctgcagcaaacgaacgcgttaagaaagtgattgactttgaaaggaaaagattacattcacgtgcacctggccaattctcttaacctaaaagtattgatttttttttacattagcatgtgtttctgatactgcggcccgttttattattctcatcggtggggttttccataaaatatttcagcaaaaatgtggtaataatcacatcaactagcttgtttatgaactgtttgatagatgacttgttgtaattgaattgattataagccctctgtatttaggactgttagattgataataatctcctcttttttg

SEQ ID NO: 34252 - DNA, 1885 bp, Zea mays
  Clone ID: UC-ZMFLMO17236H10_FLI
atttgattaataacatgatgactaggcaagtgtttctttgtaagaaacatgtgcattaagtggtgagaataatccacattgtcttctagaacaattgacaccctatttgtaccaagtagatttttttcatgaacagacaaatttttcaaacaatgttgaatccgcatgttattatttgtgagatattgaggtcgaatctatatatatatagttcgtttttatgtaatcgttgtagaccaacatttttgtcaaatattttcgtatcgaacaatatactcaccattgaagattactcactcccaactctttcaagtacattcttctgaaactcaggccatgattggaatgagtttaattttagaatagcaaagtagcagcaaacatgcacaattgaaaaacattttttctatattaaggaataaacattccggtgggcctggacttttcattggtgcatgaataattagtgtcatttacagtgtcattcagagtttttcatggattgtattgcgctttaagttttcaaccctttatggtgggattagctgcatgaggggttctcacataaactttgagattaattaccaagtcagcttttgagagctcaaaagatggtcttcacattgagtagatttttgtgaaacatttacagatttaataaagtcattgtttattggttttaaattaaaaaacttgagctggcaagggaaaataacatcggacatcatatatagaggagaaattctcagtttctcacacgggtaaaaaatcctttaacctctgcttactcaaacatactggtaccgtagaccatatgatgaattatttactgaatttactataaaattattgaatgttaaactttatatgtatttactgaaagtcggcagtaacccattccttcctccttgtttagaaagaaagataaaaatgagtattttttcctaatgtctaacgcactctatctatacatgcattgccattcccagtttctttcgctcagatacatctccattttgttctgaagctcatatttgggaatacaaaagaatcgaaaggggaaaaggcagagaggattgttggtctcaactctcaagtcagtaccagcagcaaagttgaatgtttggtaatttgggtaccattgctcaaccttctcttttttattttgcctattgtttttcttcagtaaattcaagctgatacatcatactataatacagtccaaagctagctcttgcttcctgggatctgatcagagtttatatcagataatgagtcgttaaactaccaagaaaatgtcagtataataatagaactacagtagtatccctgtggtctctctctagagttgaataaaagtacttgcaggcttgttgcacaccttgactggcctatcctgagtcatgacccagatatgatcaagatgctatgtggcagttcctatccagccattttgtagtgggagaagcctggagagtacgtgttgtatgagcaacaacagcagaaacgacttttgcttcaacaacaccaacaagatctctatacatcaactgcattcaccgccacaggatcaatcattccatccatggaacctattcaatagcttccctaggcagaaagacaaacacaaatgaatatgaaacaacagattctggcaaacaattgtagcttggctggaggcgggcatcagcggcgacttcccactcgattcgctgtataataaatactatgagaggatactggtgtttcataagataatcatgcaactcatgaaaatccatgtaaaatatgtagctgactatggatggcctgatgctataattttagccatgtttgtcttatgcgtgtgattcaagtaatatctgatgtgaattattttaatgtt

SEQ ID NO: 34253 - DNA, 1012 bp, Zea mays
  Clone ID: UC-ZMFLMO17238A03_FLI
gcagattgcaggaggccagcctcgcacacacaggccatggaagaagatcattgtaattgtcgagggaatttatagcatggagggggagctatgcaaactccctgaggttatttctgtctgcaagaaatacaaggcctacacatatctagacgaagcacacagtattggagctgttgggaaaacagggagaggtgtttgtgagctgctcggagtggatccagctgatgttgacattatgatgggtacattcacaaaatcatttggatcatgtggaggttacattgcagcatcaaatgagattattcaccatctaaagcatacatgcccagcccatatttatgcaacatccatgtcacctccagcagtccagcaggtcatttcagctataaaggtcatccttggggaagatggaactaacagaggggccaagaagctcgctcaaattcgagagaacagcaatttcttccgctcggagcttcagaaaatgggttttgaggttcttggagataatgattcacctgtcatgcctatcatgctttacaatcctgctaaaattcctgcattctcaagggagtgcctgaggcaagctgttgctgttgttactgttgcatttcctgccacgccacttctacttgcgagagctaggatatgtatctcagcttcccactccagggaagatctcataaaaggattggaggttatcagcaaagttggtgaccttgtgggtatcaaatacttcccggttgagcaagaaaagaccacggctgttgaaaatctgaagaaaattcaatgaacaatggcaagaactctgaagctgttgtagggtcatcttagtgtgcatcgcatgcctcagtttggcccttctgtgcacctctgggcccttttttgtccttctgtttgtggagaaatttagactttgtacagtatgtatcatccaccatagttgaaaatataacgggcagatagacattgtcatcgaattcggagaagtaatttttccggtcaccacttt

SEQ ID NO: 34254 - DNA, 849 bp, Zea mays
  Clone ID: UC-ZMFLMO17238A06_FLI
cgccggtgtcgcgtgtccctcgttcgcgcacgcccagcccgcctccacctctcatgccggagcaccaccgcatcgccggagatccgccgtactggtgatccccggagcaggagcagacgcaatggaccgcctcatgatgtcccgcccaccccttcccgccccgacccatgccgctgcgggcgccgacggtgacttcctcgagctcgacgtgctctggcccgcctccccatccgcggtaggtctcggcctcctcgccgcgctcccggaggatgagggcaagaagaagaagcgcgccgcggccggggtcggggtcggggtcggagcccccgcccgatccgccgcgcgccccgtcccggagaccgtcgcagcgtccgcgatggcgaggtcggcgccggtgcggataccgtcggatcccgcgcggagggggaggtgggcccacgccggggcgggagctggcggcagcgcggaggacgccggggaggccttggtccccccgcacgagatcgtcgcgcgccgcgccgccgcgcacagctcggtgctggagggcgccgggaggacgctcaagggccgcgacctccgccgcgtccgcaatgccgtcctgcgccgcaccggcttcctcgactgaggcggaggcgagtcgtcacgtcgctttcgcgataaagttttgatcatgttgttttctcttcgcgattttgtttccccatgatgtgtttctggtccggctactttgattccttcccctgccgagaggggggttgggaaaaaatgaggtgagttgaggtgaacgagcgacgaagtaattatcttgctgtgttgtttcatcacacatatatggaaattttggccctt

SEQ ID NO: 34255 - DNA, 1545 bp, Zea mays
  Clone ID: UC-ZMFLMO17238A11_FLI
gccgactctgagctccagctggcgcgggcccggtgcgtcgcgctgcaggaccacctcgccgcttcgccggacctgccacgccatcccgcgctccgctccctccttcgcctcgtcaacgccgagctgcgcttcctctcctcgctccgcctcgccccggccacgccgctctcctccaacctgccccacctcgtggcgctccacctcgtcctcacccaccctgccatacggagcccgtcccggctctcgccgctccccggcgtagatttctcctgcgccttccgcggccggcccgcgtgggtgctcgtgtccgcgagcaaccccgccaggctcgcctgggccccgcccgggggtctccgtgcccgcttcgcggcggcgctagaagccgcgcgcggtgccccgcccgctacgcggcccgagaagctgcttgtagtcttctcccgcggtgtcggcgtggatatcgcgcgggggctaaccgaggggttcgaggccgtggaggctgacttgctcgaggagttcattggcgactccgaggaggagaatgagcacgggtgggttgtcatcagcttggactcgagtgaggagctcaggaatttcagggcgttcgagattgatgtcgtggagggtgctagtgaggttttgcttccatcagacgtcgcggtggacgaggtaagtgctgatgaggaagagcttttgggtttctggggatcctttgctgcctttatggagaagatgtggaaagtatcgagggagctggtgaatctggacaccacggcactggtcgctatagtgtcagggatcagcaatggcggggtagggaagctgatggctgcacctgaggcagagaccagagcaaggttcaagtgcaactacaagttcgtcatggatcaggcacaatacgaactgcagtttccaatactcatagagttacggaaagcagtggaggggaagcaatgtatcatatgtgaaactgtcaacttggaattcaaagaaattgtttctatgtgtggtgggcctgaggagaacaccagagcaagacatttgttgaaacaacttaccattgtcccagacaatccttcagcacgaatgatggatcttccaaccacaaggaagctcgcgatgaaaaataaaattgtttttggcacaggtgaccattggcgggcccctactttgactgctaacatgggttttgtaagagctgtttcccagtctggtatgtccttgctaaccatcgagcaccgacctcgggcgctgattggtctgtgacagttagtatgccataactattctataggtgttttgagatcctaacgtttgtaattctgccccttctgaacattaaacaatatgaagttctggtaattgtagttgtcctactcctagaactatggtgtagtgtaggatgtcctagtttactccagtgtctagtactgcgagctttgtccatgactgtgtaactggtccagatccactggagtttattcgagcgagaatgcttactatctgtacttgtatccttgacgtcaaagtcaagcaaagcatatgtac

SEQ ID NO: 34256 - DNA, 3195 bp, Zea mays
  Clone ID: UC-ZMFLMO17238B04_FLI
gatcatcagaggatcgcctccagtcgaagcgaaaagcgaaaaggaggagaaggggcgggggattgcgagcctgtgctgatggcggcggcggcggtggccgcggcggggagcagcaatgtcgagttcatccgcgcgcgcagcgacaagcgggagtaccgccgcgtggtgctcgccaacgcgctcgagatcctactaatcagcgaccccgacaccgacaaggcggcggcgtgcatggaggtcgaggtgggctcgttcagcgatccggagggacttgagggcctcgcgcacttcctcgagcacatgctattttatgccagcgagaagtatcctggagaacatgaatatacgaaatatatcatagagcatggtggctcttacaatgcatatacaagctccgagacaacgaatttctttttcgatgtcaatgtggacaattttgaagaagccttagatagatttgctcagttcttcattaagccattgatgtcacaggatgctgttcttagagagataaaagctgtggattctgaacacaagaaaaatttgttgtctgatggctggaggatgtatcagcttcaaaagcattttgcttcaaaggatcacccttaccacaaattcagtacaggaagttgggaaacactagaaactaaaccaaaagcgaggggcctggatatcagacttgaacttctgaagttttacaagaattattcagcaaacgttatgcaccttgttgtttatggaaaggagaacctcgattgcattcagggcttggttgagcgtatgtttagtgacataaaaaacactgatcagagaagcttgaaatgtccaagtcatcctctttcagaggaacatttacagcttcttgtcaaagcactgccaatagtagaaggggactatctaagaattatatggccaataacacctagcatccagttttacaaagaagctccttgccattatctgagtcacctcattggacatgaaggcgaggggtccatcttccatattataaaggaactaggatgggccatgaacttaatggctggagagtgcagtgacagtaatgagtattcctttttctcagtaagcatgaggctcactgatgctggtcatgaacgcatggaggatattgttgggttgatcttcaaatatcttcatctattaaaagaagacggagtccatgagtggatatttaatgagcttgcggcgataaatgaaatggagttccattatcaagacaaagtccgcccaatcaactatgtgatgcgcactgtctcaactatgcggttgttcccaccagaagaatggctggttggagcagcattaccatcaaagtatgcatcacagagaataaatatgatactcaatcaactaatacctgaaacagtaagaatattctgggagtccaaaaaatttgaaggatctacgagttctgctgagccctggtataacacaccattttcagttgaaaatgtcactccttcagtgatacaggaatggattgaaaaagctcctactgaaaaactccatcttccaaaacctaatattttcataccaaaggatttatctcttaaagaagtgcatgaaaaggttacttttccaacagtgttaaggaagagcccactttcacagttgtggtataagcctgatatgctgttctccacaccaaaggttcacattatcattgatttccactgtccattatccagccactcccctgaagcagttgttgctactgagctctttgttgatttgttagtagattatttgaatgcttatgcttatgatgctcaaattgctggtttattctattcaatatatgttacttcagctggattccaggtttctttaggtggttacaatgacaagatgagagttctcttaaatgccatactagtgcaaattgtgaaatttgaagttaagccaaacagattttctgcactgaaggaaacttctgtcaaggactaccagaatttcaatttccgacaaccttattctcaagcgtcatactatgtctctttgatattgggagataaaaaatggcctgtagctgagaaacttgaagctctttctaagcttgaatcagattattttgcaaagttcgtaccacacctactgtcaaaaacatttttggaatgttatgttcaagggaacattgaaccaagtgaagcaaaatctatcgtagaagaaatcgaaaacactatatttactacgcccaattctttgttcaaatccatgtctccatcagaatatcttattaaaagggtcatcatgcttgaaaatgacttgaaatgctactaccaaactgagggattaaaccagaagaatgagaattcatcagttatccaatatattcaggtgcatcaagatgacgccattttgaatatcaaacttgagctgttctctctaatagcaaaacagccagccttcaaccagctacgaactgttgaacaacttgggtatataacaagtctttctctgagatccgactatggagtcctggcactccaggttgttatccagtccacagtaaaggatccttcatacctcgatgttagagttgatgagttctttaagatgtttgaaagcaaaatctatgaactctccgacaaggatttcaagagaaatgtgaaatcattaattgattctaaactggagaagtttaaaaacttatgggaggaatctcatttctactggggagagattgaggcaggaactctgaagtttgatagggtcgagtctgaggtcgctatgctaagagagctcaagaaagaagaattcatcgagtacttcaaccagtatataaaagtggacgcgcctcaaaggaggacactaagcgtgcaagtcttcggcggcaaccatttggtagagttcaagaaggcaatcaacgaagccgacccgcccaaaatgtacagaattacagacatattcggcttcaaacgatcgaggccgctgtacagctcactcaagggaggtccgggcaggatcaccatggactgacagccggcaatagcatgccttgtttttcatgtatgtagtgtaatggccagtgcatacgaatgatgaattcgattctgaatcctgctcctgcatcagattcggttgcatgattgatctatacttcactgttggtttcacgaccagcgtgtcactttctgggcaaaatctagggagctgtataaagtcatgtatgtt

SEQ ID NO: 34257 - DNA, 1665 bp, Zea mays
  Clone ID: UC-ZMFLMO17238B10_FLI
agaaacagtagagacatctgattttagtgccttggaggctcctgcaagtgtcccagatgaaagccctaagatggaaatgaaacatgatcctgaatcggagttgatcgaaactactaatgcagatgctgatcatgtaactgaccaaaaggctgaaaatgatgtggacgagccttttatgtccttggatcaacaatatgcccaagctgatgatgcatcaaggaatccctgtccactccctggaaaatttgaaccgtccaatgaggacagtggtgacgcatacaattctgagcagacactggagatggaaggtaaaaggtttgtggcaagaaagccatgcaatccagcctttgctgctgcccaattgaaatttgaagagctgagtacaaattcgacagtcagcaggtccagcagcccaccgcatctggatggggtgagcaagtcaaggatgcacactgctagttcgcaagaagattacacgccaaagcaagatggcacaggcatacaagaaagctcagttggtcatgatactaaaatgagaattgctgcatcagaatgtgggactgaaatatcaatttcatctacactggactcaccagacagatcagaaggtgatggtggggagatcgtgttggagattggagctctggaaaacagaaactatgtcactggcaaagctgataaagactccagtattgtcgtccatcctggggtaaaaaatgctcctgaagcagaagcccagccgcagaaggaagtagaagagaatgggcatgttcctgcccttgaaacggagccacatactgaaccggaagtggcagatttgcatggacaattggaaaaatcggtcacatcttatgccacacctgaagggactccaatgagccgaacgaccaccattccggagtctcatgggacaccgtcaagtgaggtctctgttaacaccaaaaggagcaggagcaagaagcccaagtcccacgcgagcaagaggtcgctggctagtccaggcagcgactcagttggacggagcagcaccgagaacttttcgaaggaatcaaggcatgccaagagagagagctcctcaagcaaggctgctaaatccgaccagggcgatcaagaacctcgtgtaagcaacagcaacagcaacccgttgcctagctacatgcagttcacagagtccgcaagagccaaggcgtcgtccccgaagatgagcccagacgtgcaggacagcaacgccgcgaggaagaggcactcgttgcccatgaccaacggcaagcacgactcgtcgcctcgcatgcagcggtcgtcgtcatcgcaagctccgcaaggcgtgaaaagcagtggcccttctcctcacagcgcgtctggtggcgcagacaagaggtggcatatctgactgatgatgagtaggccgagcacagcagcatatttcgccgtctaatccgttgattcgtcgttgggaaactgagtatggtttggaagacgggcagcttttgccgcttgatacgtgtacatttgtcgcttctcattggttgtgttatgtgactgatagtggtttgtgtgtgccccctttgacttgtaatgcaacagtggcatcaggagtgtgtggattggtctgttgtatttggcgacattgaagtttctgttggtgtggatgctactacgcctctc

SEQ ID NO: 34258 - DNA, 3679 bp, Zea mays
  Clone ID: UC-ZMFLMO17238D06_FLI
gttcgcgtcggtgttgcttttcaagcgcctcgcctgtccctgtcttgccctttgcgccttcgtcaccgcgacgcgcttgcgttttccaatccttccttgtcttatactccgtttcgactttgagctgggtcgatttcttcttcggctgatctgttccgctgctgctgggcttccttgttctcgcagatctccatcgggcgttccgctttcgtgcgacgcggggagcgggcctgtgttcggtggcggggttattgagtttgccgtttatttttttcctgcaattcatctagttatcgtgtgcaattcgtctagtcatcgtgtcgatcttgtttcgtctcgcctcctcagcgtgtgggttgcaggattggatccgatctggtgtggggagttcgtcatgtttgcctggactcggaggcaggtcagtattctgtcagatccaacggttcattggttgtcacttggacatggattcggtggtttcaggcccaatcttccggtggggtaccaccagaaattgtcacttggacatggatttgaagatttcaggcttaatcgtctcccggtgcggtagcatcagaaaccgataatgcagttatagcctgcacacctggtggatttggagaaccttcggtccgttcttatgttaacggctgatctcgcttctggtcttttggttgtttgtcctccttaaacttcagatgcatgaagggtccttgctggttatggagagatcatttgaagggtggaggtttgctattatggttcattcgccgtttctcattcctattcatcatattgtcggaagattagcaccgaacttactctaagcttcgttggaaatgctgcctctagatctgcagaggcaacctaatattggaaatagattggggcgttgattggactgcaattcgtagtattggcgagaagatcgtttggatatatttacctatcgcccatcatattattaaatttctatccgttgcagttttaatttcttacattggggtgatggttttctccagcaactcgattaaatggatggattggtggaggcgagtttgatcctgcttctgtttgtgtaatcagtagttcggaattgttcagagttccttgtgtttgttcactaaccatccttctgtcatgttcttcgaaaactaacttcacacataggctccctttaatgtttcgttagtgtatctgcagttttgggagacatcactacagagttcatccccctaaatgcataatggaagtccttgctggtattgtcctcctagatgcaaaaggaaagatcccttggttatgaatagatcggttgaagggtggaggtttgcttatgttccttggttttgatctgctatatggctatttttatgttagcaagtttgatccagcttctgcttgtgcaatcagaacttctgaattgtttagagttccttgtgtttgttcactaaccatcctcctgtcgatgttctttgaaaattaacttcacacataggctcccttaatgcttcgttagtgtctgcagttttgggagatgccactccagagttggtccccctagatgcaaaatggaaggtccttgctggtttgtcctagatgcaaaaggaagatcccttggttatggatagatcggttgaagggtggaggtttgcttacgttccttggttttggtctgatatatggctatttttatgtcaatcacggtggcgtgaagatcgccaccggactaattagaagcttggttgtccttaattggaataatgtagaggcaactgaggtgatgttttggacgtagattgaagctttgaccggactaagttcatgtcatgcagataacatcgttgggatatatgtatctctcactcttctattggcactcttaaatttcttatttcttatatttcggctgatgtttttctccagcaactggattacaacatctggattgtatatggatggattggagcctgagtttggttctgcttctgcatgagcaataataagttctgaactattcaggggtccctttttgttcaaagaacaattctatcctgtcaaatgttagttcactcaggctacctaatgatcggactttatcctatcccacattatttgatgaacgttcatgctgtttgagtgttctaagttctcactaccaaatagatagttaccagagggtggtcctgctgattgcagatctctaggtgggatatttgcatgggcacagaaggaaccagatctattcaaacctacaacgaactttaactctcattgtgtttgttcagtggttctaccttgaagtagataaacttatccaatttacaaaatgctagtatatgaaccatgatgaaaatttggatacttctattttaatctgcacttctgcagtggtagaaggcactggatatgtttgggacgtaggagattcaagctgatatgggtagaactacaacttcgatttaatcgaacttgtttctgctttatcatgctatatgcattaactgaagctttaattcttgtgctgctgtcatttctgtgttctgcagatcatttagctcaagtaattggtagtccaacggtcatgatacttgttttggtttgggattagctttatctacatttttgtcctcgcttttacatgtgtttgcagggtaagtttggcaattggaaatccctgtagcgaagaactgatatttaaaactggggcaggttagaaatcattccggttgtgttggttccatcacttgttttcagtgatttcagatctgaatgattggctaacattctgactctccaatgatatcgctggaacagtagtagtagtattagcagcaaggttcgagatgcggacattggaggtggattttccttgcactctggtttttcttctcttcgtgtcggtgttgctattcaagcaccttgcctgtcccgtcttgccctttgtcacttcgtcactggcgtgtttgcgttttccatttcttccttctctgtactctctgtttcgacttcgagctgggatggtttcttctccggctgatctgttctgctgctgttgcggttacgtgctcttgcagatccccttggggcattctgctttcgtgccacgcgggagtgggcatgtgtttggtggcgggattgttggatttgcggtttatttttaaggcaaatcgtctagttatcgtcgatcttgtttcgtcttcgccttctcagcatgtcggttgcaggattggatctgatctgagttcgtcatgacgttgtgtggcgatctgtttgtctgagttcggagataggttagtattctgtcagatccaatggttcattggttttgtcacttggacatggattcggtggtttcaggctcaattgttcatctcctgttgtggtaccatcagaaaccgatagtgcagttgtagcctgcataccagatgcaaggagggtccttgctggttatggaaagatcagttgaagggtggaggtttgcttatggttcattcgtcgtttctcattctgatatcatcatattggtgcaaagattagcaccagacttgctctaagcttgattggaaatgctgctggctagatctgcagaggcaacataattttggaggtagattgaggcgttgactggagtggagtttgtagcatcggcgaggatatcagttggatatatttacct

SEQ ID NO: 34259 - DNA, 1711 bp, Zea mays
  Clone ID: UC-ZMFLMO17238E01_FLI
gccgtgtgactacacctatgctggtgctattgctgcatgtggcgagctcggggcactgaagcatggaaagcagcttcatgggcatattgtgcagcttggttttgaggggagcaattctgcaggaaacgcactcattaccatgtatgctagatgtggtgctgtgaaagaagctcatcttatgtttcttgtgatgcccaatattgactctgtttcgtggaatgctatgatttcagcccttgggcagcatggacatggaagagaggcactagaactctttgatcgcatggttgctgaaggcatatatcctgataggatctctttcctcacagtattgacagcttgcaatcactctggtctcgtagatgaaggctttcgatatttcgagtccatgaagagggactttggcattatacctggagaagatcactatacgcgactgattgatttgctcggtcgagctggacggattggagaagctagagacttgatcaagacgatgccttttgagcctaccccatccatttgggaggcaattctttctggttgccggactagtggagatatggaacttggtgctcatgctgctgaccagctctttaagatgacaccacagcatgatggtacatatatccttttgtctaacacttactcagctgcgggatgttgggtagatgctgccagagtaaggaagctaatgcgtgatcgaggggttaagaaggaacctgggtgcagctggatagaagctggaaacaaagttcatgtgtttctcgttggtgatacaaaacatccagaagcacatgaagtttacaaattccttgaaatggttggcgccaagatgagaaagcttggatatgttcctgatacaaaggttgtattgcatgacatggagcctcatcagaaggaacatatattatttgcgcatagtgagcgactggcggttggttttggactcctaaacttgcctcctggagctacggttacagttcttaagaacttgagaatatgtgatgattgtcatgctgcaataatgttcatgtcaaaggctgtcggaagagagattgttgttagagatgttagacggtttcaccatttcaaggatggagaatgttcgtgtggtaactattggtgaatacttttgtcatagcatatgttcttcaggtcctggcctgaacttcaattttgagccagcttgggttccaactaaacaaggagacttgaattggaatttaacgagtggacccacttcaatctgagagactcgggttggtatggtggctcagtcaactcatgtcttattgtcaatcatttactcatgttttgtcaatggcttaagattggcgtgctacatgctacccttgatgctggggttgacgctttaccagtgttcatttgccaaaatatccttccaaatccataatgtcatggaatggtctactgaatgccacaatggtgatccacggtactacctcgtcagcacagataggtgacagcaaatgcgcgagggacagagaccaaatcacattggccctctatcagattatggatgagtttttttcagtagttttctaacgttgagttggactcatcttggagtatgtatgaataccatctccttcccaatttcatattctcttacagattagatgtcacggggaaattgatttccgaacagagatggccaacatgctggaactgcccgacaaggtacttc

SEQ ID NO: 34260 - DNA, 481 bp, Zea mays
  Clone ID: UC-ZMFLMO17238E11_FLI
ctgagcagggagttcctgtgcgacgagaaccgcgtcgcgggaagcggcaccccgtcgctcggccacttcgtcatccgcggggctggggccggggccggcgatgccttctgctccgcccaggaggacggctcgtcgggtgagaagacgcgccgccgccgcagccgcaagtaaattttacttgtccgctgtccgtctatcttgccacggagacggagacggagacggcattagccgccagcgacctcgcccttcttcctggcgagtggatctttaccgctctcctcacccacctgttaattaattttttttctcttgcatatacatatgtttgttattttgtttctgggggcaagaactgtaagacctaccctggtaatatgattgtctgcatcacaaaaaaaaatgaaaaagagaaagaaaaggagaagtgatgtagcaacaaccctgaaagtatatatactagctaggagctttacacatc

SEQ ID NO: 34261 - DNA, 2373 bp, Zea mays
  Clone ID: UC-ZMFLMO17238F01_FLI
gtgaccgttcttatcccaagaaacttgcattccagtatctcgaagatctcaaaaatgaatttgagaaagtcaatggcagccaaattgaaactgctgcaaggccatatgcatttattaaatttgatgcattcatacagaagaccaagaaactgtatttggataccagaacacagaggaaccttgctaagctgaacgatgagctctatgaggtgcaccagatcatgactcgcaatgttcaagaagttctcggtgttggtgaaaaactagaccgtgagtttgtcgctgtcatcttatctggcttatgtttccctcattatatatgtattttttttctggcatgatagatagacctgttcggttacgttccgtagactggctatatggttcacaattcagtttgttttgagcaaattttgctacagagcaattttgtgctggacagtatcttgttgtgttcctttgataactctatttcttttttagattttatcataaaaaggatagactcagtgtcggaggctcccgcatgagtggggtctgggaagggataagccgagacaagtcttcctcctgcaaatgcagagagactgcttcgaaaaccacggcctagtgacacaataaaacctttgctctgtgatgggcaaggttttcaagtcgataagtcgagtcgagtcgacaaggtactgacttggtgactagtcgataagtcagtcgactagtcgtcggcttgccaatatagtggctgttttgcctatataatggcttcatatagacaatatagcatttatatatgaagaaagagcatgttttacctcatttgaagcctggaattgaacgaaactaaaataaacagcaagtcttacctcatttgaagcctcaaactgaactaaatcagccacaagtgataagtcataaactcataagtcataacagccatatagttcaaattggaaaacagatagcaagaaaatatagttcaaacttgaaaggaaataagctccattagatagctaagctgctgctacagctagatagatactaaatagtagataccctaaatatctcctaaatcaagatcatccattgctttttctcccaaatcaagaaaatatgttgtgtaatgggcctttgggctgtctgggctgaactggggcacaagtcggccgacttgcgagaccaagtcgacgactagtcgactgagaatttccagtcgttgacaagtcgcccgacttgccagaaaagtcgagccggctccccaagtcgagctcccaggaccgactgaacgactagtcgacgacttgaaaacaggggtgatgggtctacagcagagaaacaattggagatgctgaattatttttaaatatgtatggagaaagtttatgccttcatggtggagcgtatgctctaaacagattgttcttgtagtcatgggcttagtcgcttagagtggagggtaaactttaataaacctctacaagtttgtggtgaggtttatacttgaaaccattaataaaactagtggagccttttgaacaaggggaaacatgtgagatgttgtgctctgcctgtgtgctttcttttgcagttatctgcaatgactttttgtaacagtttccgcaatatgacttagatgtgttatcctgtgcatttttgtggaatatgtaatctcctttatatggaagtctgtttgaacgcattagacctcttgtattaaggatagatggttatgctttagttcaaactgaaatcttgtagagcaaatagaataaaatatgccaactcatgcagacaacaaccaaaaaaaggttaatgtccaggttatgattgtttcagtccgcctcacatgtacttttgatgacacaacagttgtttaacaaaaggtttctttttttgcagaggtgagtgagatgtcaagtaggttgacttcggatactagaatctatgcagagaaggcgaaagatctcaatcgccaggcattgattcgtaaatatgcccccgttgctattgtgattgggatagtagtgatgctcttctgggtgaagaacaagatatggtgactggtgccatcttgcgttcacagttatcatgctggaaccagctgagttgtcttgtcttccctcgtgcaaccatatgtttgatcgtggttccaaaaagaaaagaaagatggctcgatggtttatcccgcatctgccgattcaagcgactactttagctatcaaaagcaaaaccacggtagtagagatagccttggaactgcacatttctattaactggacatgtataatagttctcgtgagcgcacaccatgtaatcgtcgaaattcatccatgtgttgtgacattttttgagcacagttgaacatgtggtggagcc

SEQ ID NO: 34262 - DNA, 256 bp, Zea mays
  Clone ID: UC-ZMFLMO17238G04_FLI
ggaactaaggacgacggtgcctggtttaggcgtttagctatagacgaaagcacgtacggccgcgtgcctggtctagctacgcggccggttgatcttgagcagttaagcgtgtacgaaacgacagcgctgtgtacgtgtactgtctgctgaagtgtgagatgtactgtctgtgtgtatttggtatggatccgatcggcctgatgtatgaaaaggatgtttacgtactatataaagatggaaaatcgtatttgcctcc

SEQ ID NO: 34263 - DNA, 1036 bp, Zea mays
  Clone ID: UC-ZMFLMO17238G08_FLI
atggggtgcaaattactgaggtgccaggcagttcttccaagcaaaacaaaacacatcatacatcaacagttggtcacggtgttgaagcacaggtagaactgcatgtcgctgttcaagcttgtcagccttcaaatgagatgaaagatggcggtgaagccccaccaaatgcaacaggtccatcaaatgcacaactggtggaagcaaggatgggtgtcaacggcaacaacaatggctcaaagaggaaaccgacaggagctggccgtggtcgaaagaagctgagagtgtctcaagccccacagcaaaggcggcctgagcgagtaagggagcaaccgctagtctgcaccatttgcaacgcgatttgtgatacaagagctgtatttgacatccatctggttggtaaaaagcatcaatcacgactcaagcgttctcaaggcccagacgtgttgttcggtcctttggttgggcatattcctccaaaccagtccgcagctcacatgacaggagcccctgagccactgtattttggctttaagagtatgggagcttctttggttgagcaggaggcatatctggctggcgcgatgcagcacgtgttgcccgttcttccacaagctggtccaaccatcatggctgctgattatcctgcacaaccggtggctagcaatcggtgctgctagcaatggaagacctgtaactgcatcactgtgcacagccgttggggaagctgaagtgagaatgtgacaggcatgcctgtatgtgccccgcatgatgtctactgcctcacaggtttcattgcttttcggtgggggcgactggagagcaaccgaattcgtagtagaagtagtactgaacaatctgaatatcagatgaaaccatagaactcgtctcccagtctgcaaaatgcacaaggcttccgtcgaattgctagtagtactatgatggaacaatttggttgacataggcctgggtgtatgtctgcaaaacgcttttttaaagtcggtctcaacagcgactttttatgatacattgtgttaat

SEQ ID NO: 34264 - DNA, 1294 bp, Zea mays
  Clone ID: UC-ZMFLMO17238G12_FLI
gtcaatttagacgacaaaaagtatgagaatgaaagtatgcacccaaaaaatacttcagatcctgaacagattgttcgagcaatttatgacgttgaggaagctacatctcatgcattgcagataattttggagcacaagatgatcaaaccagacactcgtgactcgcttattagctttttacaaattttggtggctcatcatccatcaaagaggtgtcgaagaggatctgctgagctacttattgactttgatgatcactggcatacaaacctctcattaagtttggaagacagtactacactgttgaaaggtgcaggagagaaagtatgtggaaatggagtgccacgtggatactggattttctgccgaggaagtaaaaaggaaacaagaggatttagctgtggcctatgggttttgctgcattcactaactgtccgaatcggagatggagagagccaaacaacatttacatcaatttgtgatttcatccacaatttcttcatatgtgaggaatgccgcacacacttctatgaaatgtgttcaagtgtatcagtccccttcaaatctgcccgtgaccttgccctctggctatggaccgcgcataacaaagttaacgagaggttgatgaaagaagaaaaggagttagacaatgctgatccttcatttcctaagatcatctggcctccaaagcaactctgtccattgtgctaccgttcttctagtaggacggctgatggagccatgcaggttgagtggaatgaagatgaagtattcaatttcttggttaactactacgggaagatgcttgtatcatcctacagggagacctccatgcagtcctttcaagtaggctcaatttctgacgattcttccgcatccagtgccgcaacagtacctattggagctgccctgggtatcgcccttgctagctgtacatttggggcgctagcatgcttctggaggacccaacagaagaacagaaagcaaagaaagaactggaactgaatatcttgcaccacttgcaaaccctaaactgcatgtctgcatcagaaggagcctccgtgagtgtaaattttctggaccggttatcttgacgatgggcccaaaagagtcgaaaacagatgaaaaacatacagagtagatttagtagtgccgagtcacgtggtagtgttgcgcgacggcgcgaactttgttgcaacaggtaatacagattgaacgtgtaaactctgtccttaacatgtttctcggatacctttacctggttatcgatgtaatattatcaatttaatgagtg

SEQ ID NO: 34265 - DNA, 879 bp, Zea mays
  Clone ID: UC-ZMFLMO17239F10_FLI
aaaaactgcaacagcagtccttcctactgaattggagcagaagaacggggaggtcgatgaagagtatatcaagcgactaaagtcatttgtagaaaaacagtgcaatgagatgcaggacttgctggcacggaatgcaatgttagcagaagagttactgagaactggtggtggtacgaccacagatacttcacagaaaccgagcagtggccgagaaagggtccagattgaagctctcagacaagaactggagggggcaaaacgacagataggggcactcaaaagtgagaagtcccagattgaagctgaagctaacaaccaaagaaacctttcagtaaaactggagtctgatctcaagagcttgtcagaagcttacaacagcatagagcaggccaactaccgcttggatgccgaggtaaaagccttgcggcagggaggcagcgtgccatatcctgacgtggaagcaataaaagcgcaagctaaggaagaggctgagaaggacagtgaggcagaactgaatgatctactcgtctgccttgggcaggagcaaacgaaggtcgagaagctgagcacaaggctggcagagctcggggaagatgtggatacccttctgcagggtattggcgatgacactgccattccggatgatgacgatgaagatgatgaagagtgattggtttatgtaacctgcaggtctgctggtgtaatctaccttcatgttgggtcatgatattgcgatggtaactggaaaatgtacagtggatgacaaatgcaccgttccaagtttaagttatttctagagaatgtgactaaatagcctcttgttaaatttgattgtctgaataactttttatattacctttgataaatagccccttgttg

SEQ ID NO: 34266 - DNA, 819 bp, Zea mays
  Clone ID: UC-ZMFLMO17239F11_FLI
cgcaagaggagctcatccaaagccactgatggagaagccaccaattctggaagggatcctgcccctgaaaaagcaccatcaatttcaaactctaacttagtgtttggctacctcaaccttttctcagatggtgttcataacttcactgatgggatggctctcgggagtgcctttctgctgcatggttctgttggtggctggtctaggactttatttctgcttgcacatgaacttccccaagaggtaggagattttggtatccttgtgcggtcaggcttcacggtatctaaggccctattcttcaatttcctctctgcgttggttgctcttgctggaacagcactagcattgtctttgggtaaagatccgggacattcctccctgattgagggtttcaccgccggtggtttcatttacattgctgtcgcgggagtcctaccacagatgaacgaccagaaaacaaccatcaagagctcagtagctcagctgatctccctggcaatggggatgctggtcgctctaggcatttctctggtagaataatctgaatccccatttcaccacttgcagctttaggtccaaccgagttaccccaagtcgatataatgctctagcagctccagactagaagcagggttttctgatcctctcgatatatagtaccaaaaagttttttttttttgaaattttggcatctggttatagattgcctcgcatcggtgttatttgaaggcaacccgtcgcactaactgaatactgtacaactttatggccggctggctgatgtcggctcatgacaggatcaacagcatatagtgg

SEQ ID NO: 34267 - DNA, 1239 bp, Zea mays
  Clone ID: UC-ZMFLMO17240A04_FLI
ccaaagcaagttgctaggtcctttgaaccagcaactgaagcttcctcgtctcatcatcgagaccagtaagcaacatggcggctaatctcaagtgggctcctgttctagccctcctcgtcgtcgttgctgccatggttggcaccaccagcgccggcaacatcgcagtgtactggggccagaacggcaacgaaggcagcctggcggacgcctgcaactccgggctctacgcctacgtcaacatcgcgttcctcacaaccttcggcaacggacagaccccagttctcaacctcgccggacactgcgaccccggctccggcagctgcaccggccagagcagcgacatccagacctgccagtcgctgggcatcaaggtgctcctctccatcggcggcgccagcggcagctacggcctctcctccaccgacgacgccaacagcgtggccgactacctgtgggacaacttcctgggcggcagcggctcgtcccgccctctcggcgccgccgtgctcgacggcatcgacttcgacatcgagaacggccagtcggcgcactacgacgacctggcgaacgcgctcaagggcaaggggagcgtgctgctgacggcggcgccgcagtgcccctacccggacgcgtcgctggggccggcgctgcagacgggccagttcgacaacgtgtggatacagttctacaacaaccccgggtgcgcgtacgccaacggggacgacaccaacctggtgaacgcatggaacacgtggaccagcagcatcaccgcggggagcttctacctcggcgtcccagcgtctccccaggccgcgggcagcgggtacatcgaccccggcaccctgacgggcacggtgatccccgccatccgaggcattggcaactacggcggcatcatggtgtgggaccgctttaacgacgtgcagaacaactacagcagccaggtgaagggcagcgtctgatgggcatatgaagcttcaagctacagcacctagccatgcatatatatatagtggctattcgtcaagttatcggactagatatacaaatataataagagcggatcatcgggagacaaagacgcatgtcagctattgtctcgttttctaagcaacgagcgagagctgcatgcgctggttagatttaatatggatattgcccatacattatgtaattaaatcaaataaatgttaagttcatactgaatgtgtctcttcagggtttctataaaattaattt

SEQ ID NO: 34268 - DNA, 1698 bp, Zea mays
  Clone ID: UC-ZMFLMO17240B04_FLI
gaaaagaccctgacagtccgacacccgcaagccacaaagtgcagcctcgttgctacaggaatgctgagaaatgtctgaccttgccggaaagcgcaacctgcgcagtggccgcaactgccaccgcaagcacgtcgaggacgggtaggttcatcggtctcgtcgccgggttttcaggtaaagtcaggtcaggccaactctgtcgaagaaggaacatcgaagaaaggaaggaggtgggcggcaatggaggatgcgatggcggcggacgggaagagcgtgctgcaggggcggtacgagctggggcgggtgctggggcacggcaacttcgggcgggtgcacgcggcgcgggacctgcgcacgggccgcagcgtcgcggtcaaggtggtggccaaggacaagctggagcgcgcgggcatggcggagcagatcaagcgggagatcgccgtcatgaagatggtgtcccaccccaacatcgtggagctgcacgaggtgatggccacccgctccaagatctacctcgcgctcgagctcgtccgcggcggggagctcttctcccgcatcgcgcgcgcggggcgggtccgggaggacgtggcgcgctgttacttccggcagctcgtcgccgcggtcgacttctgccacggccgcgggtgttccaccgagacctgaagctcgagaacctgctcctcgacgaggtaggcaacctcaaagtggcggactttgggctcagcgcgctcgccgggcacgcgcgctccgacgggctgctccataccgcctgtggcacgccgtcatacgtcgcccccgaggtgctcggcgggaagggctacgacggcgccaaggcggacctctggtcctgtggcgtcatcctctacgtgctcctcgttggcagcttgccattccacgaggacaacctcatggtcatgtaccggaagatgcagcgcggcgagttcctctgcccgccgtgggtctcagcggacgcccggaagctcatcggcgagctgctcgaccccgacccgagcacgcgcatcaccgtcgctcgcctcgtcgagacgccgtggtaccggaagccgttgcccgtcctgccgccgctcaacctcaaggagccaaccccggacgcgcgccgcgccacctctgacaaggaagagcccgaggtgctgaacgcgttccacctcatctctttctcggagggcttcgacctgtccccgctcttcgaccagggccgtggcggcggcgtagggaggtctagcgcgggcggcatccgtttcgtgacgcgcgaggccgccagcagcgtggtctcccgtctggagtcgctggtcaccggccgcggagccaacatgcgcgtgacaaagagcggctcgcggggcgttcgtttggaggccgtgtcgcgcgggcgctcgggggcgcggctggcagtggccgcggagatcttcagcgtggcgccgtcggtgctcctggtggacgtgaagaaggacggcggcgacacgatggagtaccggtcgttctgtagcgaggagctccggccggcgctcaaggacatcgtctgggcctccagccaggacacaccgggcgccgcttgatgtcgtcgctgtcgctcctgcccccattattgtccttgcccatcaattgctgttggtgtccgtgtagggggggtcgtgctcgtgcattattgtttggtgacgaagtgatgtttgtttgtcgtttgcc

SEQ ID NO: 34269 - DNA, 418 bp, Zea mays
  Clone ID: UC-ZMFLMO17240B05_FLI
gcctcgtgctcgggatgctggccgccgtcggcaccgccgtcctctccgccgcctccgcgcgcaacgtcttccgccactactactgctcgtcgcactcgccgccggcgccggagacctgcgccgcgcactagacctctcggcccagggcgtcagctgggccgccacgaagcgcaggtgcaggcccagatgaaggatgggctaggctgtaatgcaggagattgagttgtgctctagagtgtactcctcctacctgtgtttccctctctctctctctcttttgtctttgtctctctaaggtgtgtacttctattttcatttaattttgttgcatttggtacgttagttgtgacgtgagtatgtatgttcgtcagtgtattccgtacataataataataataataataataataataataat

SEQ ID NO: 34270 - DNA, 998 bp, Zea mays
  Clone ID: UC-ZMFLMO17240B07_FLI
tgaacgaaacgtccaggaagcggagctcagatggtggacctggcgcagaaaccaccacaggtggaaacacggaatgtgttttagctcctaaccatacgctggggaatgctaccattttgccacaacactgcttttcagctccagtaattaagcccagtgctacaaatgtcgcgaactcgagggcgataggcacggcattatctccaccacctggtgtgatggttccagttcataatgcagtaccatctgacttatcagttaaggatgagagggaattgaagcgcgaaaagaggaagcagtcaaatagggagtccgctagacgatcaaggctgagaaaacaggctgagacagaggagttggctacacaagtggagtctcttgcagcagagaacacgtcccttagatctgaaatcggccggctaacagagagctcagagaagctcagactagagaactcagctctaatggtgaagctgaaggacaccgcagaaccgtctcccagcaaagcagccgcatccccatcctctccccgtgcctcggcggagaacttcctttccatgatcgacagcgccaacgcgccgagcgtcagcaggcacacggagcacggcggtcccaggctccggcagctcctggactccagtccggcgacagacgtcgccgccgtaagctgatgatgaagccggtccggcaaatacgccacagcacatgcatgtggcctggggattccgcaggctcatgcggctcgagtgctcgccgtaaacgtcagcgttacggactcggactctgtactccagtttaggcactgattccaccgagggtaccggtaattttatctgctctcgcgccagagtgccgggctgcctgcgaccactcctgtgtacccagagttgtaacgtagtagggtgttgtgctgcatgccgaccttttgaaacttttcgagaccgtcatttggaccatttttttcgtcgcaataacacaatacagatcggagtttgtac

SEQ ID NO: 34271 - DNA, 1052 bp, Zea mays
  Clone ID: UC-ZMFLMO17240D03_FLI
gggactacatcttcagctacgtcaagacgttccgcgcccacccggaccgcctcctccccgaccgcgccctcgtcggcatggcccagcacttcatgcgctcctactcccacctcctcatccacacctgccaccgtcgcggagtccacgccatgggcggcatggcggctcagatcccgatcaaggacgatgcggcggcgaacgaggcggcactggagctggtgcgcaaggacaagctgagggaggtgcgcgcgggccacgacggcacgtgggcggcgcacccggggctcatcccggcgatacgggaggtcttcgagggccacctcggcgggaggccgaaccagatcggcgacgccgcagggcacgagggtgccagcgtgaaggaggaggacctcatccagccgccgcggggcgcgcgcactgtggacggtctgcggctcaacgtccgcgtgggcgtgcagtacctcgcggcgtggctggccggctccggctccgtcccgctgtacaacctgatggaggacgcggctacggcggagatcagccgcgtccagaactggcagtggctgcgccacggagcggcgctggacgccggcggcgtggaggtgcgcgcgacgccagagctactcgcacgcgtcgtcgaggaggagatggcgagggtcgaggctgaggtcggccccgacaggttccgaaaggggcggtacgcggaggcgggcaggatcttcagccggcagtgcaccgcgccggagctggacgacttcctcacgctggacgcgtacaacctcatcgtggcgcaccatccagccatcgaaataaggacggatgaccaacaaacatgatagacatgaacagccttgtaaagcgcactgcatattctctgctctgggacttttagtcgtgcttatgatagtacagggtggtctatgtaataaactgagcttctgttgaactctcgggaaggacaactgcacaaccctgtatgagtgtaccgagactatcttttcaccctcagaactaccgctctacaacgtgtatctttctaattttataaatcaaac

SEQ ID NO: 34272 - DNA, 625 bp, Zea mays
  Clone ID: UC-ZMFLMO17240D06_FLI
cacggcttcgaaaccacagctttaaggaatttcacctatctactgaatgagcaccgctccatcggtggctaccagtgcctgttcgctgtggatggattctccagagtaaaacttacgccccgaatccccccgctctctctggtgaaagaacccaaggtgtttgcacatgggaatacgagagaccctgacattctttcactgagttggcccggttgtccttgagggcatggggacaccggacacccagattcctgtggcaggaccactaactgccagcagtgaagatgtgttgagtcagtccgcgtgacacatatatggtatatatctctgggtcttgccatgaagctaccttacctgcaaatctagaatgtgggccctcctcccctagatcccacggcttcgaaaccacagctttaaggaacactgccactttcaggtgcaaatttgtgtaacattttagagccggaagaaagacagaaagcacacggggggtggggggaatcatagcaattagcaaccttgtatttacaagttgctcgatatatttgtttcccttttgaggcagctttcatactccatcttatataacaagagcttccagactttatttatcggcaggaggcat

SEQ ID NO: 34273 - DNA, 1684 bp, Zea mays
  Clone ID: UC-ZMFLMO17240D07_FLI
tgacagtcacattagaggatgcacagaagatacttggactcaatgttggtggcagagcagtgacaggccaatgtgactctgacggatggagggctagagttgaggcctttcttggtagggagcttcctgctgagggcgttgaacggactgctggagtaggcatcacatggctccgtcagtcttttggtgtgtgccctgctgatgctgatgaggctacagtccagttctattgtcgagcttggatcttgcacatgtttggttgtgtcctcttcccagacgccacaggagactgcgcgtcctggatgtacatcccatgtctaaccgactgggatacagctggacagtacagttggggctccgctgtgctttcttttttgtaccggcagctttgtgaagcttgccgtcgtacgtcctcctcttcgtctataggcggttgcgtctacctcctgcagatatggatgtggtttcgcataccagttggtcgaccacgtgttttccagcctagaccctggccatggatgattcatggaaatgatcgtcttcgaccgacgtatgcttatatttgggaccaagtggcagctccttttgcgagagctaagagggcatacatggagtatgttaacgagtttgacaccctttctgcctctagcgtcacatggcagccatacaacgcacctgagtatgctgggatgatctttagtgtagtatgcagcagtgaagatgaactctatatgatgcaatgtcctttggtctgtttctggtgtgttgagtggcacctacctcacagggttcagagacagtttggtaggaaccagctatggccggttgaagatgttcctacttcaaaggagctacacaaatttgaccggcggaagcaaaagaagataacggactttcgtcaacatcatctgatattagtaaatgattgggaatcgggtgctgagaatgtatattccaacgatgagttgcacaacaatagtgattacaggcggtaccaagcttggtaccagggtgcgactcgttgtaagcttcgccagcagtggacagcggaagactacgccgacattgattcttcagacgatgaagaaacggagtatgacctgaccactagactgggaacccaagtggaggcggcacccatattagatcgagtgggtaacacattgcgacggtcggtagaggacattgatcgccaacttttgactacgggcgacagcagcatgcgcagcttcttgcagcgtttatctaggcgcctacgtggagctgctgctcgctgtggctgcaggactactgttgcacatgacgtccatgtaccatcgtgtaccgacacagcaacgccctccacaggtcttggtgctggcttcgactacgatcacgacgagataggaccttcacagcttgagggggctccttcgacacagccattacaaccacaggatcgtaggcgacaccgctctccacaacgttacactccaggcaccgacgctttaggcaagggtaagactaggagacgttgaattggtttggactctatggacttgttatgtaacgtatgaattatatagacttgtaatggactcatttggcctctacgggcttgtatgacattttaatggacttgtatgaattctatggacttgtaatgaacttgtttagacttttatgagcttgcttggaattgttt

SEQ ID NO: 34274 - DNA, 1477 bp, Zea mays
  Clone ID: UC-ZMFLMO17240D09_FLI
agatttgtcagtgtcagtccaaaaggggtcaagtttctctctactgctgataaaatagatggagcaccactggtatttcagctgactgcagagatgattgaactagaggagcacggtagttcacatcataaagaaggtggtttgaatcttgtgccaacattagaatctgaaaaattttctgaggatgaatcaaaactctatcaaaggctcctgaatgttaggatgaagattgctcaagatattggcactgctccgtatgctgtatgtggcgatcagacaataagaaactttgcaaagatgagaccttctactggagctagacttgctaatatcgatggtgtcaaccagcattttatttcacgtttcagtaacattttcatccaaaatattgcggaattgtcgaaggagttaaacctcccgttggataattcaccatttccaccaccaccaccaacaaatccagctgcagaaaatattgctggtataccaaaacctgtacaaaacaatcttcctgggatcttgggtgatgcaaagctgactgcatgggaattgtggcataagcaggagtactcattcctgaaaattgcttatttccgcagagcagtgccaataaaagagcaaacagttattgcgtacattcttgatgctgctcgagaaggatgtgagatggactggagtaggttttgcagggaagtagggctgacacctgatatagccaccgcaattcgtcttgcaatctcaaaggttggatcacgtgagaaaatgaagccaatcaaagaggagctcccagagaatgtaacttatgacatgatcaagacattcctgactattgaggggtgtggattgtcagagcaagtctttggtaacggtaccgctgacggtgtctctagtagaatagcagagtcaccaatatcttcctgccatgcaagtgaagcaggcggaaatggtgtcccagcagcggcagaggccagtgatgcaaacccttcagcaaagagaggtcaaactgtttgtgctgaggagccagcaacaaaactgcaaaggacatacgagcatggagctgagttaactggcacggcgactgctactgtagattctgtgctagatctggttgcgagctgcaatggggtatcgctggaggatgttgccaagcacttcaagggatccaagagagaatcggtcctggagatattggagggccttgaatctgaattcacaatttacaagaaaaacgggaactacatggtcctgtgacaaacttgcccgcgtagtctgggaaggggatatgcctcagctgtgtgtgtatatatatatatctatacgatggtgggtgacttactgactttggactatggtagcaaggttgttggctggtgtgcatgtgctcattttggggattgggcagaactagcagatgtacgaacgtgtgtgtttggagctgggatcctttctgtcatctcgcatatgagtatcttggact

SEQ ID NO: 34275 - DNA, 1950 bp, Zea mays
  Clone ID: UC-ZMFLMO17240E04_FLI
aaggccgacactccaccatcctccatggccgttaagcccacatccatcatcgccgcctccgccacagcacgccatggagaccagcaagtcgccaccgctctactcggcgccgcgggagccctctgccacgacagtgatgctgtgtccgtgcctggcgttcttcctcctcgctctcatcatcacctccatcgcactcactgtccactttcgcctctactgccacactcctcttgcccacctcatctccccgcaccgctgcccccaccacatctgacctccgtctccgcccgcatcgctggcgtggtcctgcttcccagaggcgtgttccctctgctgccgccgagatcccgatacgttatgggttcccctctcctcgcgacgccggcatgcggggcttacgacgtgctctggggcttcgcagccggaaggttcctctccatcttggctgcctccgacgaagatcagggctcgtcggagcaggaggcggctgcgagcaacccggagggcgtggaccgcgtctgcgcggccatcgcggacgtcgtcgcctccggtgccgacgcgaacctggaggcggcgctatccgcgctctcgccaccgctctgcgaagcggtcgtgctcgctgtgctccaccgcttcaagcacgcacataggccgtcctaccgcttcttcaggtgggccacagtgtccggtggctttacccacaccaccattacctactgcaagatgttacacatcttaggcaagacgaggcagttcgagtcgatggttgcgatgatccaagagatggggaaggcgggggccctgtccatggacgccttcaaggttgccattaagtccttcgctgcggctggtgagatcaagaatgcggttggcgtgttcgagttgatgagaaagaacggtttcgatgatggggtggaatcattcaattgcttgctcgttgctttagccaaagagggattaggtagggaggccaggcaggtgtttgacaaaatgcatggccagtactctccagacctgcgctcttatactgcactgatgctggcatggtgcaatgcgaggaatctggttgaggcggggcgggtttggaatgagatgctggagaagggaatggatccagatgttgttgtccacaacacaatgattgaggggttgctgcgtgggcagaggcgacccgaggccgtgaagatgtttgagctgatgaaggcaaaggggcctccaccaaatgtgtggacttacacaatgttaatccgtgaccattgtaagcaggggaagatggacatggcaatggagtgctttgaggagatgcaggaggctaaatgccaaccagatgttgctacctatacatgtttgctggttggatatgggaatgcaaaacaaatggacagagtgactgctgtgttggaggagatgacacagaagggatgcccccctgatgctcggacttacaatgcactgattaagttgctaacaaataggaatatgccagacgatgctgcaaggatatacaagaagatgatcaagaagggacttgagcccacaatccatacttacaacatgatgatgaagtcatatttcgttggtgatagcaactatgcaatgggttgtgcagtgtgggaggagatgcaccagaggggtatttgccctgatgtgaactcttacacagtgttcattaatgggcatatacgacatggcaggccagaggaggcatataaatatatcgaggagatgattaataaagggatgaaagctccacaaatagactataataagtttgctgcagatttctcaaaggctgggaaaccagatatattgtttgagttggctcagaaagtgaaatttgctgggaaattagatgtatctaatgtgttctatcagtgggcagatagaatgaagagtcgggtgaagagaaatgtaccttcagattggtaatagaatgttctaagattaaaa

SEQ ID NO: 34276 - DNA, 1451 bp, Zea mays
  Clone ID: UC-ZMFLMO17240E09_FLI
cgataaccggcattcagctctagaagatagctgttgcaagataagttttggatccatgtattgcagcttcctttcaaactaaatggcactcctgcagaacattttgtttgcaacatttttttgctcctagagttcaattttaggccaactcaaatgtaagtgcagttccagcccgagtacaactatggaatagtgcagtgcaggcacctacggattggaaatttgtgtttgcgcatgacctgttctatcatgtacatggttttctagatacgccactggagggtgacaagtctggcttgctcctcgacgtcatcatgctctgcacctgaagtttgtggctacgatctgcatacaactccagcgaggcacatccccgtcgagatggatcgatgccgtgctcactgggacgacaccaccacaagaatattcctggacctctgcatcgccgagaaggaaaagcagaactacaacagcaaggggttgaccaagatagggtggcacaatctgtaccgcaacttcaaggaagagacacgcaggtcttatgataccaagcagctgcagaacaagttcaacggcctgaagaggatgtacagcctgtggaggctgcagaacgacaaggctggacctggaggaggaggcgggtgggacaagagttcgagcactgttacacaggatgctgacggatgggacaaccagatcacggagaccagtgcagcagaagacttccgtggcaaggcgctcgcgcacgaggacgcgctcgccgttattttcggccccaaagacggcacaaattcgccgtccgtcggtggtggcgccggtgacagaacaccaggcgggggcgggggaggcgaggaagagaaccatgctcgagcgtcaggggacaatgccgcttgtccggaggagagcctggggtgttacaggtctggccgtgcgtccccatggtcaagccaggaccaccacatccacatggtcggcagccgcccagccaagaagcctaagaacacggggtactatgccgaaggcgtgtccgagagcatgctcggaagcaggaacgagagcagcagtgccatcaggcgtgagcaagaggaggtggtagagttgctgcagctcgtagaaaaggacggcgtgtctcagggatctgagctgttcttcatagctactgagctgtttaggtcgccgatccgacgcgcggcatttaggtgcatcaccactccgaagaacagagttgcatggctccggtggacttgggacaatgttaagatgtgatgatgggggcgttcttgcttagttttcagttgcctgtactgagaattcttcctcgggcagttcgtgagaaactagttgtattgtattatactctgtccattcttttttatttgtcgtgttttagttgcgacaaatattcgagatcggatttagtattattgtaaatatatacagatttccagcac

SEQ ID NO: 34277 - DNA, 1927 bp, Zea mays
  Clone ID: UC-ZMFLMO17240F05_FLI
agggaaggaggtagaagcaagtgcaggcagagcagagagggtccgcagctttccggtcgcgccggcccacgccaagcggagcggccaacaaaaagggcgaggcgggccacgtcgcacggctagcaccgcatcgcagtccgcggcggcagcagcagcagcagctcctcctgctcctgctcgacgctgtagtcgcctcgcatttaccactcactcactcgctctgcccttcaccccctcgccttcctcctccttccatctcgatctcgtactctccttcgctcgcatcgcatcgcatcgcaccgacggacgcagagcagggtcgcccgccgccccaccacccgcgcgcggctcttggcgccgcatgccgctctcgccctcccgcgccgccggcggcttgcttcgccgctgcccgcgcgctgccgtcctccccgccgccgccgccgacgcggcaacggctcgactcgaggcgatgcagatcggaggatatagcgggaaggagatgagaggtggggagcacagggcagcgctgagacagaagagactcaagaaggccaagtgcttcaagtggagaccaagcaagggcgacatggatagcaaagtggaggcggggggagcggggtctggtcaggtctgcgatgacgcagtgctctgctcgctgtctacggccagcttcagtggcctggttagctggcagagagtgaggacccttgggaaggtggctgaggggtgtgatgctgccgatcctccggttccaagaaaattaagatcagccataaacaagcgagctggtcgatttgcttctgcgccatcacgccatgtcaaaaagaggcgtcatctttcggctatcagtgctcaaatttcttctgtaggccaggaaacaagatccaatgggagctcgttatttacagaacaagaggaagcaattgctgatgttctgctgtccctgtcccaagtaccctctcacagcgaggtcacagccgacaaggctgtagcagatagttcaaacacgaatgacgcttcaacttctttttcaaaaggacctactatggaggatgaccaaacagccgtgctgccaagcgctgctaacgaactggctagccaatgcgcctgcataaataaagcggtggaacaaagcaacatcgttccaaatgcagatcaagtggctgctgctgcaaatcaatccagcaacagtatcccacttctgtcagcgaatgagcaaatgcaggacctttctatggaaactgctgtgaatttgccaagcccatctaaagacacctccattaacagcgtgcaaaagcaccatgaactgcagtttgatgatagcaaatgtcaccctgcacagaagccagagactcctctttggctggtaaattctgatcaatctgagggtgtgctgctacatgagagggagaaggccaagaacaacagtgcacaagaaattgtgcctctggtccagactctgttgccttgtaccccagctgggtacttagtaaaaccctcttcaagcaaactggcagctcccgccaatacaatttctgaatccgctaacttcaccacgcctggaaatcagaacaagcaccctgtgctcagaaacgtcggcgcgccgaaggcatggaagaggagcatcacccacgtgtacgtgagccacgtgatccagatgcacgtgaacaaggagaaggccgccgcgtcgtcgtcgttacaaagccaagcgaggcctgaggagaggctcctcgcccgctgccccaggcctccgaacggctcgtccaccacctcgcacaaggccgccgccgctcgggacgagagattgtacacggtgcacttcgacgtgcgcgtcccggctcaccagccgcccgctggcatctgcgatgcgggcgccggccggcagaagattgtcagcggtagttcctggcaaaacctgccggccaca

SEQ ID NO: 34278 - DNA, 896 bp, Zea mays
  Clone ID: UC-ZMFLMO17240G10_FLI
agccgaccccgccgacgtacactccaagccccaaacctccgacgcccaagccgaccccaccgacgtacaccccttcccccaagcctccgacacctaagccgaccccgcctacgtacactccaagccctaagccaccggctaccaagcctcccacgcccaagccgaccccgccaacgtacaccccttcgccaaagcctccgacacccaagccgaccccgccgacgtacaccccttctcccaagcctccgacgcccaagccgaccccgccgacgtacactccaagccccaagcctcccacacacccgacgcccaagccgaccccaccgacgtacaccccttccccaaagcctccgacgcccaagccgaccccaccgacgtacaccccttccccaaagcctccgacacccaagccgaccccaccgacgtacactcccacaccgaagccgccggccaccaagccgcccacctacactccgacgccgccggtgtctcacacccccagcccgccgccaccatactactagaaagcgatgcctaccataccacactgctgtcagtctctggagcatttaggtggtctggatcaatggaagggttgtgtcctagccagccggcaaagatgagctgctgatggtaatgatgatgataagaggccactgctaccctactacgtaccctcctctttgtgtgctgccatccgtccccgttagacgatcgaggagagaataacgcagagctctctgctcccggcctgtcttctgccgtcccggccgtttaatttactagtgtgttcgtcctatatgtttagcagcagcaggtgtattgtgcgggtatgtaatggtattgcaactatattgggtgtaaaaccataataaatgtgggcaaatatgcaaggg

SEQ ID NO: 34279 - DNA, 1518 bp, Zea mays
  Clone ID: UC-ZMFLMO17240H02_FLI
tgagaccagacaactggagacaacttctgggaattaatggaggagacttgatgcaagtagtcatagcatgtggtaaggctgttgcagagaatgatgtctttgcaacagaactgttaatatctgagcttggtcacctggtatctgtatctggagatccaatgcaacgacttggagcctatatgcttgaaggaattgttgctagactttcttcctccggcagtatgctatataaatctttgaaatgtaaagaacctacaagctctgagctcatgtcatatatgcatctcctttacgagatctgcccattctacaagtttggttacatgtcagcaaatggtgccattgccgaggctattaagggcgagaactttgttcacataattgatttccaaattgctcaggggagccagtgggttactctgctacaggcccttgctgcaagacctggggggccaccatacattagaatcactggtatagatgactcaaattctgcttatgccagaggaggcgggcttgatatagttgggaggacgttgtgtgatgttgctaattcatgtggtcttccttttgagttcaatgccgttccagctgctagccatgaggttgagcttcagcatcttgctataagacatggggagattattgctgtgaattttgcctatcagctacatcatgttcctgacgaaagtgtaagtacagaaaatcatcgggataggattataagaatgatcaagagcatcaatcctagggttgttactctcgttgaacaggagtcaaatacaaacacagctccattcttcccaaggtacatggaaactctcaactactatacagccatgtttgagtcgatagatgttgctctcccaagggatgataggaggcggatgagcgcagaacaacactgtgttgcaagggatattgttaatttaatcgcatgcgagggtgctgaaagggttgagaggcacgagctgtttggaaaatggaagtcaagatttgcaatggctggatttagaccgtacccactgagttcagttgtgaacaacactatcaacacattgttgcatacctacaacagctactacaggcttgaggagagagatggtgtcctttaccttggatggaaaaacagagtattggttgtatcttcggcatggtgttgacatttcctctgcaggttccatcgcactttggcctccatctgacgtttctaaggcaccattatgcttgtctggtatactcagtatatgcttgtatgtaatttgcaaccataccttacccaatggttatcttaccaactagatcttcatggcaaggtgaagtgtcacttaaaatctagaagttgtaactgtcgtgttgacgctagatatagatagttctgctttggtttgacatatgcagatgtgctgtaatgctcaggggttatgctaggcaggcccaagagggtgcctgtttgttatctatcaggctactgtgttgccgcctgctttgtgtgtgcatatatatttggaatgctac

SEQ ID NO: 34280 - DNA, 2587 bp, Zea mays
  Clone ID: UC-ZMFLMO17241A02_FLI
ctcagtctctctcctgccctgtccgtcccactccccgtccagcggagagagaccctgtgggctgtggccgggcagccgtttcccctccccttccctctccgctccctccagagtctactgtagcgcagtgccgtagggtttcgcgtcctatccttcctcgcatcctccatggccgatcctgacgacctcggccgccgcctcgccgcggtcgccgtatccgagtctcctaccgccgccgcggctgcgctggagagcagcaacaacaacctgttccaggtgatgcgcgccgtggaggacgcggaggccaccatccgccagcagctggaggagaacagccggttgaaggacgagctgatgctcaagacgcgggagctccacagaattaggtcagaagccacagaccaagcttcctctcatgggatccgtatccatcaggatcgcgctcttggtgcccacacagacacctcctccactgctcccatcaggactaccgctacagcagcagaggccttcgaatggggagctggggatgccggcatcaaccacaagtaccttgaggccaaccaggctaatggaattccccgtaaatcaccgagcgctcctgatagcgctttcccatctcagctatctaccccgtcttcgcgatccctttcaccaactaggcaccacaaagaaacagactatgattctaggctcaacttatccggacaaggcgcactgcctgtttcagacctcaactcaaacgtcgtcatctggaagcaggatctccttgttaaggtcaaagaacaaggggaggagattgcacagctgagaaggcatctttctgactactctgtcaaggaggcccaaatacttaatgagaaacatgtcctggaaaaacgcattgcatatatgcgcatggcatttgatcagcagcagcaagatctggttgatgctgcatcgaaagctttgtcctacagacaggatattatcgaagaaaacatccgtcttacatatgcattgcaggcagcacatcaagagagatctacattcgtatcttctttattgcctcttctatcagaatataaccttcagcctcctgttcttgatgctcagtctattgttagcaatctgaaggttctgtttaagcatttgcaagaaaaacttattattactgaggagaagctgaaggaatcacaataccagattactccttggcatgctgaatcttcaaataatacaagtgctgctgcacagtcgccttctcatcctcctggaaatgcattgatcaaagccaaccttgacattgtgccccagcaagcatattctcatgtacattctccagtttcttctcctgttcaaactaggcgtgactgggatttgttagggaatgaaaatcgtcaggtcattcgaagtgaggttgccacaacaagtgcagagcatgataatgttgggaggacctctccttcaaccagcagccataatatgaaggatgcccctcaaagaaccgatcatgattcccgtgctgttcgatttaacattgaatccaaggatcaaaacccatcattcaaggaccttattaagagtgatgcctcagaaagtctggagggagctgaggcccaaattccacaagaactttctgcgcagcaggattctggaggctcacctaatttgacatctggtcttgatgacgcaaatccaccatacccttatcttcctactgtccttgaggagcctagttcttctttttccgaagttgcagaggatgatccgcttccagccatagaaggactgcgaatcacaggtgaagcctttcctggaagagaacttcaagcaagtgggtactctatccatggaaccacaagttgtaattttgagtgggtacgccatttggacgatggatcaataaattttatagaaggtgcacggcagcccacctatttagtaactgctgatgatgtggactttgtactagcgattgaagtccagcctctggatgacaaaaaaaggaagggcgagattgtgaaggtttatgctaatgatcaaagaaaaattacatgtgaccctgaaaccaaggagcatattaagaaaattctctctctggggcatgtctcttatgaagttctattacctgttagatttttagatatgtgggaaccagctattttggcaataaagagggaaggttacagcgttaagtgtaatggacagcgcggtgtcgttgtcatggagaaatttcagcaagcgatgaccatcaatatcccatttgggcgtcctactgagttttcaattttgtctgctgatggtgctgagtacaatttaaagcctgcagagaatgccccatcacgagatgccattgttctaatactaaggctattcaggatgaaggctgttgagaagagcaagggaaaaagaaagggcatcttcttcaagtagtttgtagttgtagcagtattactacgtagtgtcatggcaggttgactgtatctgttacctatgttttcgcggttcatgtatgtagaaggaaagagcaagttgtctgcgtgcttatgtaaagttccgattcaattcgattagattcaattggcaccgtacccagttttttgtt

SEQ ID NO: 34281 - DNA, 685 bp, Zea mays
  Clone ID: UC-ZMFLMO17241C04_FLI
aatcgaaccaccagtccaccacctgattgactagagcaaaagcacaagccgcccacgcatctcgattgcagcagcagcagcagcagcagaagcggcgcgcagagctcgtgacgagagcaaccttccttccgttcctcgatcgccatggacaaggtgctggccttctcgatcctgagcgcgtcgccggccgacctctcctccacgggcgccggcttcggcgggagctgggcgcggctgtcgtggcggcggggcgcggacgaccagcgtgcgccgcggcgggagcagcagaagcagcagcaggaggaggacagggagaagcgagacttgcgctcccgcgacggcggagcgcacgcgagcggagggggagcggcggcggcgccgccgccaccgcggttcgcgccggagtttgacgggatcgactggttcggaaccatcgtgtcgcgctgatcaacaatccgggctcggccgacgcgccccccgagttaaccacgtgaccaatcctgtctactggagtatgttttttacctgatggtggattaattgtcccaacacagataattgggactccgcgtgttgtacatacagggaactgctcacttatcagggggggatggggaacatttatttgttcctgtcctctgcattttttttcctgtaccgaaatggatggatggtctccaattcg

SEQ ID NO: 34282 - DNA, 1401 bp, Zea mays
  Clone ID: UC-ZMFLMO17241C08_FLI
gcaatcagttgttacgttcctcccagtttatgggttcctctcacaaggagaacagaattatcccgtatcttctacgtgcaccgcttcaaccagaaagtccgcagatattctagcagcatcagcagatatatctctgctgctaaaaccaagctcagtgaaaagacttggtccaacgtgcttttcttctgtgtagttgctctatttggtgccataaatgtctgcattgccgtgcatttcttatgtggcggcaatggcgctgaagaggcgtacacatatcaagggcaacactcccagtttacgatgatcacaatgacatatgaagcccgtctctggaatttgaaagtgttcatcgaacactactctagatgtgaatcggttagggagatagttgttgtttggaacaaaggtaaccctccaagcagtgacgcgtttgactccactgtgcctgtgaggatacgggtcgaggagaccaattctcttaacaacagatttagggtggatcctctgataaagaccagagctgttcttgaactggacgatgatatcatgatgacttgcaccgacttagagaaaggatttagggtctggagagaacaccctgagcggatggtgggcttctacccccggatgatagatggcaaccctatgcagtacaggaatgagaggtacgctaggggtaagaatggatacaatctgatactcacaggtgctgccttcatggacaaagagtttgctttcaagacttactggagtgagaaggctcgtgaggggagggactatgtgcacaagaacttcaactgcgaggacttgctcatgaattttctgtatgcgaatgcaagctccaccacaaggaccgtggagtacgtccaccccgcatgggctatcgatacgtccaagctttcttctgttgccattagccgggacacccagaagcactatgacatcagaacggattgcttggcaaagttttcctccatatatggccccctccctcagaaatgggagttcggcatgcgtgaagaccgttgggacaaataggatggcgacggtggtacacgacggacaaacacatgatggtgaaaccttcttttttttttgtcagtcccctggaaagttttgtagcttcgggcgaaggtataggtccttcgggcagaagtgcccctggtttgtgatgtgcctattagatctggctagaagcttagacctgatcaggatagaccattgttcaaaagttgaggatagaccaaaggcagtgcagtgtatgtgtatgtgaattgtggaaggcaaagagggaatttgagaattgcatagtgggtggaaagtttagactgttgggttcccttctctgtagtttgtgtacatctcttcctttctaagattcagctagcatgttgtgtgatt

SEQ ID NO: 34283 - DNA, 1888 bp, Zea mays
  Clone ID: UC-ZMFLMO17241D01_FLI
gagccattagtacaggaggccacttgggatttcaagaaatacatcggttttgacgagcctgacgaagcgaaggatgattccagggttggtgcagatgatgctggttcttttgaacattatggggacaatgattctgggcctttggccggggagaatgttatgaacgtgatcgtggtggctgctgaatgttctccatggtgcaaaacaggtggtcttggagatgttgtgggagctttacccaaggctttagcgagaagaggacatcgtgttatggttgtggtaccaaggtatggggactatgtggaagcctttgatatgggaatccggaaatactacaaagctgcaggacaggacctagaagtgaactatttccatgcatttattgatggagtcgactttgtgttcattgatgcccctcttttccggcaccgtcaagatgacatatatgggggaagtaggcaggaaatcatgaagcgcatgattttgttttgcaaggttgctgttgaggttccttggcacgttccatgcggtggtgtgtgctacggagatggaaatttggtgttcattgccaatgattggcacactgcactcctgcctgtttatctgaaggcatattacagagaccatgggttaatgcagtacactcgctccgtcctcgtcatacataacatcgcccaccagggccgtggtcctgtagatgaattcccgtacatggacttgcctgaacactaccgccaacatctttgccgcgggtctgaagatggcagaccgggtggtgactgtcagccgcggctacctgtgggagctgaagacagtggaaggcggctggggcctccacgacatcatccgttctaacgactggaagatcaatggcatcgtgaacggcatcgaccaccaggagtggaaccccaaggtggacgtgcacctgcggtcggacggctacaccaactactccctcgagacactcgacgctggaaagcggcagtgcaaggcggccctgcagcgggagctgggcctggaagtgcgcgacgacgtgccgctgctcggcttcatcgggcgtctggatggacagaagggcgtggacatcatcggggacgcgatgccgtggatcgcggggcaggacgtgcagctggtgatgctgggcaccgggcgcgccgacctggaacgaatgctgcagcacttggagcgggagcatcccaacaaggtgcgcgggtgggtcgggttctcggtgcctatggcgcatcgcatcacggcgggcgccgacgtgctggtgatgccttcccgcttcgagccctgcgggctgaaccagctctacgcgatggcgtacggcaccgtccctgtggtgcacgccgtgggcgggctcagggacaccgtggcgccgttcgacccgttcggcgacgccgggctcgggtggacttttgaccgcgccgaggccaacaagctgatcgaggcgctcaggcactgcctcgacacgtaccggaagtacggggagagctggaagagtctccaggcgcgcggcatgtcgcaggacctcagctgggaccacgcggctgagctctacgaggacgtccttgtcaaggccaagtaccagtggtgaaccctccgccctccgcatcaatatcttcggtttgatcccattgtacatcgcgcgtttgacggtctcggtgaagaacttcatatgcagtgacgcgccgctggggttggtagcagtactatgggattgcattgagctatgtcactgtgtgctttcgacaggacagtagtgaaggttgtatgcaagtttagtttttttttttcattactgatatttggaatgtcaacacaataaatgaagctactatgtgtttcgtaagtataatcttacttatttttaggtgatacttcatcc

SEQ ID NO: 34284 - DNA, 989 bp, Zea mays
  Clone ID: UC-ZMFLMO17241D08_FLI
gtttagccgccgccgctgctcatctcacatccctcgagaagacgcctgctcctcgccgatcgatacgatggccgtcttctccgacctccacaccgccgacggcctcaagtccctcgaggctcacctcgccggcaaaacctatgtgtctggtgactccattactaaggatgacattaaggtcttcgccgcggtgccgtcgaagcctggcgctgagtttcctaatgccgcccgctggtacgagaccgtctctgcggctgtagcctcaagattccctggtaaggctgttggtgtaaatctgcctgcgggatcagctcctgcggcagctgctcctgcggatgaggctgaggacgatgatgaccttgatctttttggtgatgaaactgaggaggacaagaaggcagctgatgagcgtgccgccgctgccaaggcctcttctaaaaagaaagaaagtggtaaatcctccgtccttatggatgtcaaaccatgggacgatgagactgatatgaagaagctggaggaggctgtccgcagtgtccagatggagggtctgacttggggagcatcaaagcttgtgcctgttggatacggcatcaagaagatgactatcatgttgacaattgtcgacgatcttgtgtccatcgacactctaattgaggaccaccttacgcaagagcccatcaatgagtacgtccagagttgcgacattgtggctttcaacaagatctagagttcagtttctgagtttgggcaacggcagcggctcagctcgtcaagtttgtgctgggatgccagtttatcccttctagtctattacagaaatgttgttcggagctgagtctattataaacatcttggtctgagtttattgttgagtggtgccagtttttttcaatatacatttatcttaaaaacagcggtactgatgtttttttgtctaaagttaatgagtttgcaatggttctgagtctaaagttcgagtcttcaaatct

SEQ ID NO: 34285 - DNA, 840 bp, Zea mays
  Clone ID: UC-ZMFLMO17242A02_FLI
ataattgtagcagttgctacattaccactcgtctgtttggttcatccagccattggccttggtctgctacttctctctcatgctttccatgctcattcaaatctatgcagttttttagcagcttcttttcgtagcatcactcagaaaaaggacctgtacaagtccaagatgggcgatggttcagttctgctatccaaaagtaaatccgatgggctgcagcaacttctgccaatggatgatagcccaacagcttcaaaaagttttaccgacagccaactagaactgtttgattatcggcatggcgtcatgatcttgcatcttctaagcacactcatgtttgtgccttcacttgttgcctggctacagagaattggtatgggacaaaattttccctggttcattgattctgctatttgcgttggtgttatactgcatggactttttggatcccaaccaaatgtcagctgctgcatatttttcaagttacctggcaggagaggccgtgaaattggtctgagtttcctctacctcgtgggtggctattattcctttgtcagctccatggcgttggcaccttatagggccttgtatgccatggcgaccattggttatatatgtttcatttccagaattctcgagagaagaaatatggtaaggggtgacattaactctaggaggactcggaagcactcacacagacactgacacaccacagaaagtgtgatttctttaaaattatttgtaagagatagagaatagggttgaggaacctttcctccaacctaagttatctccttttttgtttttttccaaatcttgcttatgtgcatgtgattgtgt

SEQ ID NO: 34286 - DNA, 2927 bp, Zea mays
  Clone ID: UC-ZMFLMO17242A03_FLI
gttttcaaaaacacttatttgactgtgcatggtcttcgaaacaagttttagtttttaagtttgaccaaatcttgtcataaacaacaagttttttttaaacaacggaagtcgattagtatttaaaatcagcaagtatcatccattagtgttttaggtctttagatttaaaaattgtggacttgtcaaaactctatgttatttgataaggctctacttgttaaattaagtggtgtggtgcttgatttagtcgatgtgctatgcccgataatctagattagtaactctaaaatctagttaaagtatttctattcgtcactttaagttataggtatccatggttgttgtgtctaagtatctgatttctgagctctgcccctgctgtttaggatagcatatggagttctttatgttccacaagcacaattgatcttatggaatggaaatagtagaacattccttggtgagagcacacaaataccttatacaaagcaggtattgagtcaaattgttgtgtacccatttgtggtctggatacactggtttggtgaaaatgaaatatgcccaaagcaacaaaacccagttcacatgaactgctatcctgtatttacgaatcttgactagtctagtaatatatgtatgtggaaatatgaaggtttccttatttctcttcttaaacagcaagagaagaaggaagacaagtcagacaaaacagaagacgagaagaggttcctaccataacacttaagcaaggaatcctgtacacttctctcctggggttgtgacttgtatattgtcaaggatcacttggatgtggtaaatgctatactggacactgatgatagctgcataaggattgtgcgaaaaaacgggaagacatccctacatactgctgcaaggattggataccatcgtattgtcaaggcactcatagagagggatccaggaattgttccgatcaaggataggaagggacaaactgcacttcacatggctgtgaaaggcaagaacacagatgtagtggaagagttactgatggctgatgtttccattctcaatgtgcgggacaagaagggaaatactgctttgcacatagctacatggaaatgggagaattttgggattatgaaacaccgcagacgtggcttcgacgaaacggaggcgtaggcgagggattcgacattatgaaaaaccagagaagatactacactctaaaatggacatgaatcctctattaccagggaaggatgatgtttattacactgaaacagacgctgtctcacatccgttacccgcactagacgcacccagtctttgtacagagagaatcgcgccgttcttgaatctgccattcgctgaatctgccattcgctgctgttgtttctggacagtgaagcagtattccggacagtgaacaaaaatctgggaacacatttcattttcactgtcattggctaccagagtccgggaacaaaatctgggaacaaaatctgggaacacaaaaatctgggaacaaaatctgcctttggctaccagagtttattgctcccatatcattcgctgtccatttcactgtccattcgctgaacacaaaaatctgggaacaaactcattttcccagtgaacaggtagcacaatttagttcacaaaatctgggagcacaatttagttcacaaaatctgggagcaataaacaggttgaacaggtagaacaaaatctgggagcaataaactgccatcccagaacaaaattcgcagctcacatttcagttcacaagctagttcacaatttagttcccaggtaccacaatttagttcacaagctagttcacaagctcacatttcaatggagcaatacacaggtagcagtttgacaagctattacacaagctcacatttctgggagcaatacacaggtagcagtttcacaagctatcacacaagctcacatttctgggagcaaaaaacaggtggcgtagtagcagtcgtgtgttcatcttcatttgcagcaacgacaagttcacggcttggtgcttcatcttcatttccagctacaacaacgacaagccacctgctttggcgcggactagggttgtggtcgcagcgccgccgccacctgctttggcgcggggccgcgagcagcaagggagaagacgcggagtttggagagaaggaggtgcagcgccgccgccacctgctttggcgcgggaccacgggcagcagatctccgggcagcaggggaggagactagcaggggagggaaatggagattgaagaaaatgagatggaaggaagaggcttgacgggagagagaagaaccttgaagagagaagaacggctctggacggcagaagaaaacggcgcgtgggctgatagcgacggaagatcattattcgttctcctgaacgactaataacgatgggatctggaataacaggagcctgatggttgcatcagtagagttgaccacttctcagtattgcgagatgcatcttacatggtcaagaagataattcctattctgaactacttgctcgtgttgatcagttttgcctagtcccagtaccatacaaagatgttcagctggatataaacatttctccacgtctctcttctgaatacataagttatctggaaaatcctgttgagttgctcaatgaagcggcaaaagctgcagagaaagatctatggaaaatcctgttgagttgctcaatgaaggcttttgcgaatcacttgaagcgttagtacttttgtgaatgattttgtaaagtgtttgtaaatatgtgcaaaacataataacatgtgtaggttttgtgaatgattttgttgtggtgcttgttgatggtttatgtgatgtggatctatcattgtgcaatactaattaaatttgtatatctatgtgattatgtgtataaaaattggtgatttgtg

SEQ ID NO: 34287 - DNA, 714 bp, Zea mays
  Clone ID: UC-ZMFLMO17242A04_FLI
ctcttcctgccggccgctagagagattggcatcgcactgctctctgtgtttggccgctctatgtttggcggagtccctttcgtttctgtcggcttcgtctgtttctgtacgccgccagtgagctttctttggccgccgttctactttccctcttctccctctctgttttttttttaatttcacctgccgcactactactcggccgccagggagaacctgacaaccggtcattggtttctcaatgtcctctctttgctataattatttttttctttcagccgtacaagaacagcttcctgtttatcgatctgtctctctgcactgaaaacacgggccccgcagacctcgccgccaacgagcacatccctttgggcgggcgagctgctgtctgctgggagctgacggtggtccgagcacgacaggtcgggtgtgtgtaagatcagtcggtctcttgaccgtcttcgacttttaaaactcgtatctagtcctcatttacccgaatccctcgttgtgtaatgaatgtatggatctaatgtaatattcgggatcgagttatgagttgatagaacgtagatttttctgtgataattttctgtacctttactaatctgttctgtcatcaaggccgtggatgcaaaagatcccgagccactgtgatctctgttgacatatatttaaaactcattttgggttaggttattaaaccctaaccct

SEQ ID NO: 34288 - DNA, 1719 bp, Zea mays
  Clone ID: UC-ZMFLMO17242B08_FLI
gcttccccgtgcgctctcgtcgtcttcgcgaggtcgaaatccccaaggcgaggcgttgaaacccttaaccctcttccacctcgaagcggcgcgaggagggagagtgtgagtggactcaggaggcggcgggcgaaatgaagcttaacgtcaagaccctcaagggcaccaacttcgagatcgaggcgagccccgatgcgtcggttgctgaggtgaagaggatcatcgaaactactcagggtcagagtacctacccagcagaccagcaaatgctcatataccaagggaaaattctgaaggatgagaccactttggaaagcaacggagttgctgagaacagcttccttgttataatgctgtccaaggctaaggcatcgtcaagtggagcttccactgctactgctgcaaaagctcctgcaactccagcccaacctgctgcccctgccacatcagttgcaagaacacctacacaagctcctgttgccacagctgaaacggcacctccaagtgcacagactcaggctgctccagctgctacggctgctgcatcggatgatgctgatgtgtacagtcaggcagcttcgaaccttgtatcaggcaacaacctagaacagactattcaacaaattcttgacatgggtggtggtacttgggagcgtggtacagttgttcgtgctctacgtgctgcatataataaccctgagagagctatagactacctgtattctggaattcctgagaatgtggaggctccgcctgttgcccgagcacctgctgctggccaacaaacaaatcagcaggctccatcaccagctcagccagcagctgcaccaccagtgcagtcatctgccgcctctgcaaggcctaacgcaaatcctctgaacctttttcctcagggtgtcccaagtggtggggccaatccaggtgttgttccagctgcaggatctggtgcccttgatgccttgcgacagcttccacagtttcaagcactgcttcagttggtccaggctaatcctcaaatcttgcagccaatgcttcaagaactaggcaaacaaaacccacaaatcctgcgtttgattcaggaaaatcaagctgagtttgtccgcttggtgaacgaaactccggagggtggtcctggaggaaacatattaggtcaactggcagctgctatgccgcaatcggtgacagttaccccagaggaacgagaggccatccagcggcttgagggaatgggcttcaaccgtgagcttgtgctagaagttttctttgcatgcaacaaggacgaagagcttgcagccaactacctccttgatcatggccacgagtttgacgagcagcagcaatagtgggtgatatggtgtggtggatgcaggaaaccgaggcagtagcagaacagcatagtgtcgttctgatgacctccgcctgatgagagatacttggttgtttatgctatgctgctgaccatcttttattttcatgtgttcggaatgctttctaagtacatattaattcaatatctgttacaccgtgtcaaatcgaggcctttgatttggtgggaagaggtagattgctgatttgtttagtttgctccttttctgttatgaattgtaaggcgtcttggcttttctagctaaatagttttttaaaaaagcatctaaatgtaacacatataggtgcgttgtaaaaactattgaatctacaaaagctaaaatgatttacaat

SEQ ID NO: 34289 - DNA, 1274 bp, Zea mays
  Clone ID: UC-ZMFLMO17242C01_FLI
gatagactaaacacggcggccgggccgcgctaccatgcttgccgccggcggcctccgccgtcatcaatcttgctcatgctcggcaggcagatccacataagaagggaaggagaaggagggacatggcggagaaggaagcaccacggtcctttctcgctcgccttcctcctctagatcgttcagcggacattggaaatgaagagaagcagcgctgcgtcgtcatcacgcatcatgcagatccagtcctcacagcccccctgctgatccagctttgatcctttttctaccagtgcgtcaagccggaactgttcatcaccaggagtcaggctcagggtttctaagatcctcttcattcggcattgccgtggtttcgctcttctcgacaagcatatcgatcacctattccctcctgcccacagcctactacttcctgcctcgatcttgcattgatcccatcactcctttttggcggcttccacttcctctattatcgcgaggacgacactggttttaatttgcaggtaattaacggggagatcagtgatccagagcagagcaaagttcggaagaaggaactgaagtgtgcagcccaactcaccttgtcgctggtctctacgtcgttctcggggttcggcggcgttctgcttgctatctaccacaaggcagatagcctcggcgcagcacttccgcacgtcaaagtcacggtgtgcctcttgctcggaggaagcgtcaccggaatgtttgcattgcttctgtgcaggctgttgtccagcaacgacaagaagctgggaacgacatggcagagggcagtactcgctgcagcaaacatcgtcatggctgccgtgctttgtgtcggctgccctcgtgctcgctgaaactatcttgcaagacctcctcgtcgtcggcgccatgttcccggtcatcgcgccggcgttgcgcacagcgtgggtgctcgtcgaattctgctccgtgcgtgacgctcgcggcgggcgcacggaggaggaaggcaaggtcacgcttggcacgatgtacgccggcatagcagtgacggtcgcgtcgatgtcctttggcgccattctagcaatctttgcggggctgcttggcggcaccgtgagcaaggagcagctgaaggtgttgagtttgtgatccaaattctgaagaaggcggccacctctataaatatctttgtaagccgcaggagatatctatctcaattgtaaatctcctgcgatctgtaaccacctgaaaatagtgagaagttcccggccggcgcc

SEQ ID NO: 34290 - DNA, 1331 bp, Zea mays
  Clone ID: UC-ZMFLMO17242C05_FLI
aaaaagaacagataaaattggtgattattctggttcatcgaagtggggaaagaaacctgttagtctagatgacgaccgcaggagtacatatgatcagcactattcacgtaatagctctctgtttgctgccctggatgatgagaggaaactactggtgccagtaggggttcagcagccacatgcatatgctaggagcttggcacgatttgcatcaaaattgggcccagttggctgggatgtggcagcaaatcgtatcagaagggcactcccccctgggacaagtttcggcccaggatgggttgtagatggtgaaccacctcaaaactctcagtgggctcctgcagcatcgactaatccctcctctgagcccactgctccacccaatatgccatccaagaatgatgtactcgatcacaagtctggaccgtcttctaatggggatgttactggtgaggagcatttaactagaactcaaacagtggcttctacatcagcaagctttgataagagctctgacatttccagtaaagtaaccaagcttgagaacggagttaccgagtcatgtggtggtacggacaatacgggatcagcagcgcctccaatgcagcaacacagccacagtcgagaaatccactctaacatcaatggctttactgctatgtcaaacgccatgagtcagtacgcggggcaagggttatttggatcaggcattcatatgacgcacgcccaagtgcttgggatgttttctggcatgaatggcaaagtcaatggctatatccataggcacccagtaactgctgatagtcttaaaacagcaggacagaacggagatgttggaaaggcaactgtgaaccccgtgcaaagcgcaggccaggatccaaagaccgcgaccgaaaatagctctgctcacccaggcttgaattccagagcccagtcatcaggttcctcgcctaggggaaagctggcaaatccgaagcaccctgatctggctttgcagctatgagcgcggtagtaggcattgacatagtttggtttagtactgtgatctgtgacagaggcatgagctcctcgacactgctcctccgggcctaattctcaagcttccggcacgctgatagacatttgtagcttgccaagccgttgaagaggtaacagatggttggattgttgtcagagaataataacgcaaagcagcggttgcaggaggcggcggcggaacaccatgtaagccccccattttaatcatttgacccccagtgagtttgttgtaaaagggtagggtagcttctgtacaggttctaatcttattggagatgacagtgtttcggatg

SEQ ID NO: 34291 - DNA, 1001 bp, Zea mays
  Clone ID: UC-ZMFLMO17242C08_FLI
tatcaagccaccgcccttgagctcctacaaatttctctgtcggcgctctgctctgttctccccactcgacgcccagcccctctgctcgctcgtcgtcgttgcagccgagctccactttggctgctgcccggccgagcttctccccgagctccctgccctggtgccgcgccccttcctgttcggccgctatttcctctctgctactcgcagattccttttctcccatgctgcagcacatctccatggctgccgtcgaccatctccccaagttgagcaccgcagtccactcctatggcgagatcgccttccctgccccaagcttgcctccatcgtgtccctgaccctctgctcgagctcgcccttgcgcgcaagttctcctgtgtcccaccctggtgcgcgctgctctctgtctctcttctagccacgctcgcccagcccagcgtcgcgcctagctccgtgcgccgaggagcttgttcctgtgcgcgccggccaccggatcatcttcaaactccggccgtggagctctcacggctatctcccaccctcagccgcgtctttcagctcggagccctgcttttctgtctcccgttcgccggccgtgcgcatctccctctgctcggccgtccgcgttgctgttccctgcacgtgcgcaactccctgcgcgccgcggctttctcctccccagttgcgtctgtggtcgttaagcatgtcagcaagaaatctcaagagtcgggtgaagacggagccaacaacatggtgttcaccaagtgcacgacaggaagctcgagccaggatttatcagtattcgtacgagtattgggtcgcgtttgatgatggtgagccgatttataatttttgtcagtttatctaatgataggattaactagaattattagtcgtaataatcctcgtatttagtgcaggcgcgttgtggtagtgttaaaaaaaataagtgaagtacgatgggtttagtaatgcgaaaggtagattaatttagggat

SEQ ID NO: 34292 - DNA, 1175 bp, Zea mays
  Clone ID: UC-ZMFLMO17242D09_FLI
agtgtcacattgatgagtattctgaggcaggtctccggaccctggcacttgcatattgtgaacttactgaagaacaatatgttgtatggaatcaggattactcgtctgccaagaattctgtacatactgatcatgttgcagctgttgagaaggtgtcagaagacattgagaaggatttggttcttttgggtgctactgctgtagaggatagattgcaaaatggggtccctgagtgtatttataaacttgcacaagctggaattaagatctggattttaactggagacaagttggagacagctgtaaacataggttacgcttgtaacctactgaggaaagagatggaggaaatttttatcacactggagaactcaagtacaagtgcttcagaggggtccagtggagaaggaaacaaaattgccacatttgaggaaattgatagaaaattaaaagatgctagaggaaagatttcccaaaaaggaacttcaacttcatttgctcttatcattgacggcaatgctctgacacatgctctcacgggcagccttaagaactcatttctggatctagcagtcaactgtgcatctgttttatgttgtcgggtttcaccaaaacaaaaggcactggtcaccagattggttaaaattaggacaagtaaaactactttagctattggtgatggagcaaatgatgttggtatgctacaagaggctgacattggggttggaataagtggtgctgaaggaatgcaggctgttatggcgagtgactttgcaatagcacagtttcgttttttagagcgattacttcttgtgcatggtcattggtgttatcgtcggattgcagctatgatatgctattttttcttcaagaacatcacatttggctttacgcttttctggtttgaggctcatgctatgttctcagcacaacctgcgtacaatgattggttcatatctttctataatgttgccttcacatctcttcctgtcatcgccctcggtgtttttgacaaggatgtctcttcccatgtttgtcttgaggtttgtaatctatcagattcatacgtgatgttgtgatatagatgtaaagtttggtcttcaagtcagtgtttgtagcattgcattggttgatttgttttttctttttataaatcacagcttttgttccctttc

SEQ ID NO: 34293 - DNA, 437 bp, Zea mays
  Clone ID: UC-ZMFLMO17242E06_FLI
gctaacgcgtggaagctagttcctccagtttttcggccttgacagaataatgcaccagccgtccagcccccaccccaggacacgggctgctaatgttaatttgtctgcttggttcccttgtactgcatcacttctccctgctagagagctggaatccccacaaaattttaggctaccagttctgtttcttccatttgtcatagtacgatctacaaagtatcaaccaaagaacatgtgaaaaataagatggaatccctttaatcagattgtttgtccgaagtggcatggcgatgaaaaggaaaacatcagtataaagaactagttactcataattctttgttctgtaaagagtcctttctaaataatgctgtgtgcatgatgatgatgatgtgatgtgatttctaccatgacttcaaagaactcaatatttgcacctt

SEQ ID NO: 34294 - DNA, 887 bp, Zea mays
  Clone ID: UC-ZMFLMO17242E10_FLI
atcgcgagcggccgccatgtcatgggagagccgtctaagcatcgcggttgagactgcgtcggcacttgcatacttgcacttagctgcaaagatgccaattattcacagagatgtcaagtcgtccaacatactcctagatgacaacttcactgccaaggtgtccgatttcggtgcctcaaggccaataccgcacaaccagacccatgtgacaacattggtgcaagggacactagggtacatggaccctgagtacttccagacaagccaactgactgagaagagtgatgtgtacagctttggcgtcgtactcatcgagctactgacaagaaagaagcctatcatggatgatatcgcggaagacattagaagcctagcgctgcaatttagtatgctattccatggaaataagctgttggaaatcgttgatcctgtagtagctgaagaagctggagtcagacatgttgaaacggtttcgaagttggcgttacgatgcttaaggttgaaaggggaagaacgcccaaggatgatagatgttgcgattgaacttgaagcactgagaaggctgatgaaacaacacttcatcttgaagaacgagtctttgcttcaggagtcatgttgcaatgaagaaatgagcatcgacgcaccatcaagtttgttccttggcgttgatggcatttctgacgatgaaggcatggagatcattccacttacatgtccatccaaaattctcacatcctatccctaactcgcaactatcacaaataaaaaggattttagctgacttctaccttctcaattgccaattccgtcttagtaatctcttcgtcttatgattagcttccaacgtaactacccggttaatggaatatgactgagttatttggcct

SEQ ID NO: 34295 - DNA, 767 bp, Zea mays
  Clone ID: UC-ZMFLMO17242G01_FLI
cgcggagggcatgtacgggaccatggccgagatccccaccgggtatccgccggcgctgtttgtgcatatgcccaaggacaccgaaagggcgcggttggttgcggaaagcatgtacaaactcagggagaagcacgtcgacgtgcgggagatccagtgcgatgacttcgccgtgagcgcggagttcctggcggagagggtgccggggctgacctgggccttcgccaacgcgctggtggacatgcttcggcggaagggattcgtggatgagaaggggatgctgaagaaggacgggaggagaacgccgtggaaggaggcggctgaggaggccaaggtgctgcctgagcggttcggtctggagaggcatgtcaccgaggagctcaatgttgcctatgcgtaccatgagttcaccagcctgaagaatactgaagtcttccaatggtttgagtcccatatgaatcattaggactgatgcccaactagcttgcataccacagtgaaccgagtaatcttctgattgtttgaagatccacttttgaccatgatctacaatagcagaaaagttagagcaagaccttgtgtaagacttctgcccacagcttatagtttacaacttccactcatagtttctggtatgtttgtatctctatttactacttgttagtgcaaattttgggaagcatgaaaaatgtgctgattacacccattattgttgtacatgtactatttttcttttagaaagcaataaaagtgtgcaaatctgggattct

SEQ ID NO: 34296 - DNA, 1528 bp, Zea mays
  Clone ID: UC-ZMFLMO17242G04_FLI
ctcacgcccgccagtgctcgatcccagctccttgccgcgccttccagtccctctgccggccatggagctcggccctagctcagattcttgcgccgcgcccggctgtttctcccctgcgtgccgtggctgtgccgttcctgtgtgcgcggctcactgctcggcgtccattcccctgtgctcaccatggtcgtcgttgctccctggtgtaagttgccgcacacgttgtatcccagctcggagctccctctgcacagctcagattcagcccagccgtgctgagttcggcctttgcttgtccctgtgcttgagctccgtcctcccagccatggcgcacacactggttgcctctgctcgagctcgcccggccagagttcccggtcgccgtgtcctgtcgagcttggctccgtgcgtgcgctttttctcccttagctcgccccgatgccgcaccttgaagccctctgcccggtgctcgagaccccttccatgcctgcgcatcctgttgcctgctcgcaccctgctctctctgacgcgcgtctgttccagctcgcctagccgtcgaagctccctgccatcgtcgttttcggccctgccgttggtacaacatcgtttgctgttgctagttgatgtaacgttgccgtccttcgacgccgcgccgtgagcagcgacttcgtcgatccgtcattttgacagggtacttgcgctgctctcctgtgtatgtgatgattggaaaaggagtcccagctgatgaaggattaaggaacgaaagctctagtacaccccgcctgccagctgattgtcgtacatcctgaaccagggtttaatcattttctttgtgaagttcgagcggattataattttgaaaggagatttggtgctgaagtcgaagctagcagcccctttattcttcgtcgtcaagccacgccgcgtcgcgacatgctcgtcgatcccgacgatctatctgccagatacgtgccacttgtgttgagctccaaagcccctgtcgagctcttctcctgaaagccgccttcgagcacaatccctgtcatgtgttcggtgggaagtctgaaccaatgctcatcgtcgatctacgattatcaaatcattctggtcatggtaagtcgatgagttattcagaatagttcaattgttgaaaaaattaatgtgctagtgtgatgctcactagttgctcgataaattacgcgagtcacggaactctcgtcgacttcgcggttcttgcgattatcgagccaggttctattatagcgagttatttcgctattccggtcaattagctgaattagtgtaccgagtagaatattagtaggccaatattttaatcccttgtaaagatgtagtataatttataaagcaagagataaggttagcatttaattaattagctggtgagttgtgtaggttaattgtatttcatgtgtatagtttgttgttcgtgatgtttgtgttagattcgagaagcgtaattattgcgcttagtcgtacgtctgtaactagtgtttccgtagtatag

SEQ ID NO: 34297 - DNA, 1800 bp, Zea mays
  Clone ID: UC-ZMFLMO17242G07_FLI
ctacggtctccgtttcgcggacgtttctacggaggaaggtccatccttctccctcctaggctccgtcggtctctctctttccttatccccggcccgtggcccgtgctaacggcgattagggttccgaatcgtgtttaagcgctgcgaaatcaccgctggggcttcgtcctcgagtcgtcgtcctgctggatgtcacctcgtgtcccgcgccgacgccagtgcccgtcctcggagccgcctctctccgacgatcgccggagacggatacggtcgaagccgtcactgcaggccgcgctcgtgcgccgtagcagatgtctagtagctccaacggccattatcctgctaatggtgcaaagattcttcatagaaaagaaaagaataaagagaaagtacagctcgacaaaaattcagccacttgggtgtgccagaaggacaggcattatgttgaaaaattagaaacagaattgatgaactgctatcaggaaattgactatttgcaggatcagttaaatatacggagcgttgaagcaaacttcatgggagagcacattcacagtcttgaactgaagctgactgaacttgaaaagttcccagaaagagtgagagcgatggacaatgagctgatacgatctgattcccagtgctggcttctgatggaagaagtcagatgtaaagaagaggagttgcagaaggcagcctcacagatagagaagcttgaaagtacagctttagattcacaatgcgaaattgagagcttgaaacttgatttgactaatcttgagcagagactatttgacgctgagagattttcccaacatgctggtgagcacaaagctcaatttgacaaactactgggagaacatgagctccagctacatgaagcacagaaaactattcatcaacttgtatgggagaataagcaactgaaggagttgttgcctgtaagagctcctaaacaatctcctcctggatctggatggaaagttaacaaaacattggagaacggtgtgcatgcagaatgcgaaagtggcgatgtaattcttgaaaatatggcaaaacgaaatgaagaatctgaacttctaattgagcagctcaaggaagagcttcgagaacaaaagttaaaggcaaaagaggatgcggaagatctcacccaagaaatggctgaactaagataccagataacaggcatgcttgaggaagaatacaagcgtcgatcttgcattgagcaggcagctattaaacatattcaggagctggaaactcaggtttccaaagagaagacaaaactgagtggggcacttaagcgattgcaggaatcacatgaactagctcgcacacaagctatggagattaagaagttgaaggctgctttagagagattgaattcggtgacgaacctgggtacagtttgcaaatcttgctcttgtgggttctctgcaatgttggtagagctgtctaattgctcgatcgaaggaccttcaggcagcgccagatctctcaattccaaccacattgatgagaagtcacagaatcaggctctaatagagtggcgtccccgtgaagcctcagatgatgaaggtgggtaggaaggtagatgcctgtacattcatgtgtgcaattggccaactgttgtagataattctttgtattcaccattgttgcctgtaagactgtaaatgcatatgcatttgttgccttagctaacaatgggagttaagctccccaggaagtgaaaatgtcgccttaagatttcacgcatgtcatgaaatttaccagcaaggatctgtcatcacggttttt

SEQ ID NO: 34298 - DNA, 1265 bp, Zea mays
  Clone ID: UC-ZMFLMO17242H08_FLI
cactggtgacgacagtgtatgcccagtgtctaattgcagagtccgactaaacacatcctcactcttctccagaggcactcttgaatgctctctgagtaaattagcctctgatttcaagtctgatgatacatgtatggaaatgatacatgctgaaaagcgccctgggatggattcatcctacgcatcttcaaaattgagagctgcattagatattcttctctcattgcctaaaatagatcccactattgatagcaaatgttcaatcgggattgaatctgagaagtttgatggaaagggtatttcagaacaaactgacaccaagttgacagagaaggccattgttttctctcaatggactagaatgctagacttgcttgaagtccatttgaaagcttctcatgtgacatatcgaaggcttgatggaacaatgtctgttgctgcacgggataaagctgtgaacgacttcaatatggttccagaggttactgttatgatcatgtcactcaaagctgcaagtcttggcttgaatatggttgctgcctgccacgtacttatgctagatctttggtggaacccaaccaccgaggaccaagctgtggatagggcacaccgtattggtcaaaaacggcctgtcacggtatcaagattaactataaaagacaccgtggaagatcgtattcttgctctccaggagaaaaagcgggagatggttgcttctgcgtttggagaagacaaatctggttcccgacagactcgattgaccgttgaagacctgaattatctgtttatggtgtagaatcgctcctgagagtgaacagttttgctcattggattggtgttagacgtggtagataaaaatgttctctgaaaaaataacaaaatgctttcatttagggattattagttcttgtagcttgtacagttgcagagatttaggggttgctagcgacgtgtcttccaattctttttgcacgggaagcagtaagatgctgaactaggtgaattcttcagatagctgctatagtgcctgttaacttggggggtgttttctatgtactaatttctagttcctccattttattttcttttacttcctaaattgtcaaacacagatactaaaatagagataatctctcttttagtctatgtgtttagcaatttaggggctaaaagggactaaaatagagagactaaagacaccccttaatgtaatgaagataacgacaatgaagctcagatgatatatatgtacatattcttctcgt

SEQ ID NO: 34299 - DNA, 824 bp, Zea mays
  Clone ID: UC-ZMFLMO17243A06_FLI
gtccccactttctatcacgcaattcctatctcgcagtcgtcgccgctccccggccgggacccagcagagcagagcagagcaggcagtgtcggcgcagcatggggaactgccaggcggcggaggcggcgacggtgctgctccagcacccgggcgggcgggtggagcggctctactggtcaaccagcgccgccgaggtcatgcgcgccaacccaggccactacgtcgcgctcgtcacgctccgcgtcgccgaggagcggcaggacgcccccggcggcgagcggcgcaccgtgcgcctcacgcgcgtcaagctgctcaagcccaaggaggcgctgctcctcggccacgtctaccgcctcatcaccacccaggaggtggcgagggcggtgcgggcgaggaaggaggagaagcagaggaaagcgcagcagctgcttgagtcgaggcagggtgtcgcgaggggcgcggccgagggggaggacgacgacgacgaggcagccctggacgccagccttgatcagttggcgcgtcaggacaacagcagccggagctccagtgcagggcaacggcagtggcggccgtcgctgcagagcatcgaagaggccacgacctgatgtcagctcagtacactcataccacgcaaccgtaggggtagggccgtaatcactgacggctggacctgtatcttctcggcgattcacctggcctcgattagttcatcgcagggggttgctattggcttactcctacatttgcacgctgtgagtttgacaccctgggacggaggactgcttcagatgcagtgcagtatgtagcctctggatccgtgt

SEQ ID NO: 34300 - DNA, 1304 bp, Zea mays
  Clone ID: UC-ZMFLMO17243F02_FLI
gagggccacatcatggtctgcaagatcgccgaggtcgcgcccgattccgccctatgaaagttggatcgaattgtagacagcagagctgggcgagcgctccttcctggaattctgatggatgcctctttgcgcggcgtgcagaagtacctgtcggagaaggcggcggcggcggtgaaggcgctgctgccggagtcggcgggcggggagctgtcgacggtgtgcccgtgggcggaccaggtgcgctggcactaccactgggccagcccgctccactacgccaacaccccccaagtctgcaacttcaagtattctcgggactgccacaattctcgtggccagcaagggatgtgcgtcgtcggggctatcaacaactacacggaccagctctacagctacggccagaagacttcgtataacctgacggagagcctgatgttcctggcacacttcgtcggcgacgtccaccagccgctgcacgtaggcttcgaagatgacgagggcggtaacaccatcaccgtccactggtaccggaggaaagcgaacctccatcacgtctgtgcctgctgcacctcttcgatgctaaatttcagatgtgtactcaccaggtagccagtcttgagtctctgagagtcagaatcctgtgtttttgctaggtgtgggatgtcagcattattgatacggcaatcaaggacttctacaacaagagcatggataccatggtagaggctctcaagatgaatcttacagtaagtatgatattcccttcgttcttttttatttgtcgtgttttagtttaaaaatgaactagcggacaacaaatattcgagaacggagatagtacaagattgacatgttactccaagaccaatgatgcttttctagtttctaacactgtaagctgtaggatggatggtctgacgacatcgtccactgggaaaattgcaagaacaaacacgcgacctgcgcgaacgactatgcgattgagagcatccattattcctgcaactacgcctacaaagatgtggagcaagacatcactctaggagatgattattttttcagtaggtacccgattgtggagaagaggttagcgcaggctggaatcagattggcgttggtacttaatcggatatttggtggaggtgaagcggatgatataccactacaagtacagtaacagctgtaataaaaaggaagcatggctattacaaggatttgtccattacatcgtctatacatcaataaattggcatgaatttgtaactccattgctatacatcaataaattggcatgaatttgtaac

SEQ ID NO: 34301 - DNA, 1174 bp, Zea mays
  Clone ID: UC-ZMFLMO17244F03_FLI
attggatcctgagttcagactgagagacagttttgtccttgaaattgttttttggagataacctagtgatgccactgagtaggatgaatgatcaatatgtagtttcatgaagagaggctgctctgagatgtcttgcagtatgcagaaacacattttgtgtgcttattaatgtacttgagggccattatttgttacttatgtgttataataattattggagtaggacttcatgagggaaattgatgatggtattagatctagtagaactgttgattgccaattgtgcacagaagtaatgctatatgcaatgacaccaatgagtttggttactgggagccagtatatgtgggaatcagcacctggtggtgcccatttgaaaaaacaagttgaaggggattatttttcttttgcgtggcaacgatgatagatctgaaagcagaaataatttcttgaaaaacagtaggcatagaattaagtacaagaatgctctattcaaattctgagttgaaggctgttgaatttttctccccagttgctggagcaaactcaaggatctagcacatttaagtttaactatctagtcaagtattcaacataaagatacttcagaatcacagtaagctgacaaatacatcttgtttcggaactgtaaggctgcaccattagtccatatcaatttgatcatcattagtgcatgatttccattttttggtcttttattcatatgtttttagtaatgttattatcaaagcagtcgttgatccttaccttttgtatccgccctaacatgatagcgttgctgttttgatgctgttacttggttttcatgctaacatggcttcaatactatcgttgtttttgagcactttgagaattgtagccaccagcatgcctctccaaagacgtgcatggagattcaaaccggtatcttgcttgctgtcaaaagcaaccagatttgtgaactcgtcatgtgtgaattgtgatgttgtattgctctctagtttaccaatttgagcttgtaaagaacactgtagggatgaaaggaaccaaatgtacaaaaacagagtatgctgacgtttgtcacgcgcgtctgaatctgttccccgtttgagcttgtaaagcacactgcaggcgtggaagtgcttatatggaatatcatatggagacgttagac

SEQ ID NO: 34302 - DNA, 1154 bp, Zea mays
  Clone ID: UC-ZMFLMO17244F06_FLI
gcgaaacccaaagcgcgaaaaccctcctcgctcaaggatccctcccgcggcgcgcggaagcaaacccccccgaccggccgccgtcgggggccgcggcagggacagcggaagcagcatcactccggagcggcggggctcagccagccctcgaccggagcgcgggggttccgtaatactctccgaatctgcggaatccgtggcgggatttcgcgggaccttctagtttcgggcgagacaatggtggggttcgcggggaagaggaaggagttggagcaggtgatggacggcctctctgacttctccctctccggccccgctgccaagagccgcagattggacgccgagctcccaccaattatggaagaagaaccacctgctccttcaatgccattccagatgctgggagagaaaatcaataacggcgttgacatacccagtatggaattcatgatggaagatctaacaacacatcatgtgcctagtgaggacatggcacttgttttatacaaaccagtagataattccgcaccatttggtcgtggcatctcaagttcttcattcatagtgagttcagacttgatacgtggtctaaagaaccatgctttcaatcaagcgaactatcatgtggtggaggatgaatctcctgaacgtaggaacagcttggctttagttccttggacaccaccacaagtgtctataagatctgactgggttgccgctgagccagagcgcacacgtatttttgaagtacctatggacgctgatgagaccgaagtaacttctatggatgtcgaggaaacgccagaagcagtttcgggcggattcaatggcgagaaccttggccagtggctacattgtgtgaccccgccgtcgttaccaaatccatccgcccatgttatgtggtcaaggtgacaactgggagtctccctgcgtgctgactactgaatcataccaaggatgaagaaatcctctaataatcctcccctagctgtgtggtagctgtctgtttagttgaaaacaaaaaaactggttatgcttagcatgatgtttcctggtgtagtgctgatcgtccccagtaatatcagtgtgagtaaactccatgttagaacctggttagattggcattcaattaattgaggtgacctgttggattt

SEQ ID NO: 34303 - DNA, 319 bp, Zea mays
  Clone ID: UC-ZMFLMO17244G12_FLI
ccgcatcaacgatcacatgtcactcgctccccgagccagggccggtgatgatctcgcgctggaactgaatccaccagcaatggccgggccgaggatcgatttccgacagcaggaagggtgcagcatgtaaagggggaacagatgagatcatgtttgtttgggttggtcccccgttgtatatgtagttatgtatcagccagtcctttgtttgtaaattaccagtatttagaagtaataagaaaatgggggtttacgtgtacgtttcctgtgctctgtcatctgaagcaataaaactggttagcaagaccggaagagcgac

SEQ ID NO: 34304 - DNA, 1505 bp, Zea mays
  Clone ID: UC-ZMFLMO17245A03_FLI
caattttaaaagattgatggtacttctttgtttgtatagaaatatcataaaagactcggatggatctagaatcttgtcatgttctagaccaagtatactgaattttattatcttttcctttcttatgtttttagattcattcgctctgagaatttttcataaatatatttcaacttatcgattaagatatgcctctaattgccatcttgatcttagatgggttaggttgtcatatgttttagaaatattagctaacatagaaaaaaaaggaatacaaatataattgtcagccaaaaaatgtttcgatagcctgttaatggtctttatttcatacgaatttaaccttccaacagttttgattgatattatgtacctctacagatggcagtagtggaaattctatgtgtgcaactagaaccaagttaccgaccgttgattagtgcctatggagctcaataggatattacattttatttgtgctcaaccaccgatggcgtctttattactgtgcattgcatcttcttggttagtgtaatgtgcaacctggttagtgtttcaagtaggtgcaagaggaggtgaacagataatgaagatttcaagtaaatggcgagttgaatccattgaacagataataagaatagttttaagtgtcattaatagtgcaagctactacactaggattttcaacatgatgaacagatcggccgatggatgctatgtggctgtatccagccaagggaacttctatttgatgtgggagcttgggcaggtctggtagaaccaccaattacctggtccttggtctacatgcctttgttgttatgtttgtatggacctttgtctctgtgtgcagccgttttggcaaccccacatcagggtggtggcatggagattctgaacatggggtggagagcggacagtggactttttgctgttgcgcggtgataactgaagactttgaggaggtgcaggtgcagagctgatggtttgggatccttgacgtggggtaccgctcataggaggaggcttgggctgcttgtggcagcaacgtgttgcacaagaccataaataaagggaagagctggatgcacgacaaggctgtcgccaccaacctctactccgtcaagcaacgacgacgtgttgcttcggggtcttggctgaacgatcagacatcctatgtatatctgtgtacaacaaacgacatctgctactactactaccataaaagattgccgactgtgcttgcgttctctcatctgtaacacaaatgagtgtaaagagacatgtgctatttccttggaacttgaaaactttgtaaactcatgtcttcatacgtcgtgcttcatgtgcgaaaacgcttaggtctcttccactcctccacctctcccttgcttcacctaccaatgagtaatcacaatgcctgatctatcatttaaaattctatattgattctttagaaataatttatacaataatataatgtttgtttgatatcagttcattct

SEQ ID NO: 34305 - DNA, 1457 bp, Zea mays
  Clone ID: UC-ZMFLMO17245A05_FLI
aaatgataccgctcttctctctaaaaatcctcctcaagcacagcacggacgtctggttcttccccccacgcgtcattctctctctccttatcctgtcgtactcagatttttttttgtggccgtcggccttatcttcctgcgcgcgctccttccctgcaagctccatggccatcggcccttcctgctgagctcggttccatggacggcgttcctcttccttcctttgacgcgcgcatctccctcggcgccctcccagtcgcgcctgctccctctgcttcatcttccttgtggtgccttcttcagctcgcggcgctcggtccctgatccagctccccggcgtgcgcccatcttccctgctcgtcgttcctatttccactgccatggatcgtcagtccgagctttcccatccgagctctatacatgaccgagtttttttcccagtgcagcagctccgctccaagccgaacggagctcctccatgggcttcctcgagctccgacctgggcggcccttggatgctgcttccatcaacgccggccatcgttcctcaactccggcagtcgctgtggtctcagaagttagccccttttcagtatctatctctctccctgctcggacctccgcgttcccaactgtgcgcgctgtcgggtggccgtcagccatgccttccctgcttgctcgccagcacttgttcagtcgtctcggctcgctcagcctcaatctccagcgtcttgccctgctccttggttccggccgagctcgcgcccagctccatttcctcctctccggctgctccccatgaccaccaggccgaacttcttcctgctgtccgtgacgcgcgagcgatggacgcgatgaagaccctatgtgtgcttgtgtcgagctccacggcaccagtcatgcctctggtctttggtcgtcgtgctgtgcgccagaactgttcgtagctcgcctgtgtgcccagctgtctcgaaccatgtcgtcgactatcgtcaccacgagctcaccttctctggcgcacatctccgcagacccggtcttatcacgtgtatacgttatcgatctcgtccttgttccgtgcgttttcaggaaattccaaaagttgggtgaagacaaagctagcagcgtgatgttcaccaagtgctctacgcaaaggtcgaactagaatccttgccgtgttcgcggatagcgcgtcaaatttagtcgtcaaatttagtcgtgggtaagccaattcatatttctgttagcttaattattggattgatgaatgaatgcgtctagtattattgaattagttcgatgaatacaatgtgattgttttcataactttggaatagtcgcgttggggtgctattgttaggtttgagatgttaattatgtgacatatggtaaattagtgaataaagtttaaatttagcatttttaaagggtctaaacaataatataaaaaacaactg

SEQ ID NO: 34306 - DNA, 1077 bp, Zea mays
  Clone ID: UC-ZMFLMO17245A06_FLI
attactcatcaaggtcttgttgacagtctgaggtcatttagtatggaagcagatattggtatcaagaaactcagagttgcaaatcgtgtcactgcatcagaagtgcaatatgtagagctgttgtccttgatgaaaatagacaaggagatgccattacacaaacaggagcctcggatctttcatgctgatcgtcttttaccagatcttcatggtggatatgttcctgattctttcgtaccagatcttcatgatgagtatgctcttgatattgagaagtgtcctctttgtccgaactacaagcttgtttatgattgcacatcaaaggaatgcaagaccagcggatctagtatttgcagagggtgtgttgtttgcatctctagatgtttgcgatgtgggagatgtatcgacagtgagtttgaatttgaagagacattttttctggggagcatttgccgtgactgtgtcaagtattcaccccaccacagaaaaatagatgtttgattctgttatccattggatggatacagttgtaacattggatttctgtgattgatgctcccatccatcagacatcttgactgagtatttctaacaaggaaaaaaaagagagaaaggtctaccagtttgctatcggtgtaggtgcagcagctgatatattgtttttgcttgcaagaaaaacgaaaaaaaacagtataacctaggaaatcagaagatcaaagtatggtttccgtatcatggtgtcagcagtgaatggtgacaactgacaattgctggatgtttccttctggaataatgggagtgctctgctcaggagtgttgaagtacaacagcatactttttttttctctccagccggttgcttgatgctgcatgttcctggaacgtcagaagtaatttaattcattggcccaaaaataaaatcagatgtatctatctgtcccttacgttacctatctaattgcgtggctgtgtgctattacttgacaattgacaaatgtaatactagttactttctaggttgtagacactttgtaccacgtgatttattagaataaaataaagacaaacctctaaccc

SEQ ID NO: 34307 - DNA, 2583 bp, Zea mays
  Clone ID: UC-ZMFLMO17245B07_FLI
caacaccgcatcgacagcacgcgcgcagccactgccaagcgcagttgtctctgatgtctggtcacgcctgacgccgccgctatcacgcgccaccctcctgccgacgaacgcggcctcctcctcattgccgagcgcagcccctcacttctctcctggctgcgccaccatgatgccgccacggaatgcgcagagccgccgaagagagcagagtcccagcgagaaacgcaggagctcttccttccacctctggcgaacctccaaggaaactcgacgcccagacctgctcgcgcacagggagcatctttgctccggcggctgctcgccggcctccctgtctcctccccagttcttcctctcacagccgtgcagcgccctcttctctacagtggccgctgctcctctctgaagctatgcgcaggagctctccaggacgccgcgcctcctccctgctacacgccccggtcgacgacgaacttcccgtggtctgggaggccgcgcccgcccagatccgccggaaggagcgaaaggagccccgccgccgctgtcatcacaggccgcacgggcttccggtggcctgctcaggcggcggctagggttttgaggggcgctcgggtcgcccagcgcggggacgaccgagcgccgtctgcttcaaacatttggagctcatcccctcgaaatacagaaggtgcatccacaaaggattaatctcttcgtctaattttcttgggcatacacagattcagagcatatggcgatcaagtagctatgcgttcagctgaggacattgcatatgctgtgttacggttttttgcaaagggtgggtcattggttaactactacatgtatcacggaggaacaaattttggaaggactggggcttcttatgtgctgactgggtactatgatgaagctcccatggatgaatatggtatgtacaaggagcccaaatttgggcatctcagggacttgcacaatgtaataaggtcatatcagaaagcattcctcttggggaagcattcgtctgagatattgggtcatgggtatgaggcacacatctttgagttgcctgaagaaaatctttgcctctctttcctttccaacaataacacgggcgaagatggaacagtaatcttccgaggggagaagcactacgtgcctagccgttcagtctccattcttgcagggtgcaagaacgtggtttacaataccaagagggtgtttgtacaacacaatgaaaggtcataccatacctcagaggtaacaagcaagaataaccaatgggagatgtactcagaaaaaatcccgaagtaccgtgatactaaagtcaggatgaaggaacccctggagcaatttaaccaaaccaaggacgctagtgattacttatggtacaccacaagctttcgcttggagtcagacgatttgccttttagaaatgacatccggcctgtgcttcaggtcaaaagtagtgcacactcaatgatgggatttgccaatgatgctttcgtaggatgcgcacgcggaagcaagcaggtgaagggtttcatgtttgaaaaacccgttgatctgaaagtaggtgtgaaccatgttgtattgttgtcgtcaactatgggaatgaaggacagtggtggtgaacttgctgaagtaaagagtggcattcaggagtgcctaatccagggtctgaacactgggacgttggatttacaagtcaatggctggggccataaggctgcactggaaggtgaggacaaggagatctactcagaaaaaggtgtgggcaaagttcagtggaaacctgccgagaacggccgggcagccacttggtataagagatacttcgatgagccagatggagatgatcccgttgtacttgacatgagctcaatggacaaaggaatgatttttgtgaatggtgaaggcgtgggtagatactgggtctcataccgaactcttgctggaactccttctcaagcactataccatattccgcgtcctttcttgaaatccaaggacaaccttttggttgtcttcgaggaggagatgggcaagccggatggcatcctcgtgcagacggtgacgagagacgacatatgtctgttcatctcggagcacaacccgggacagataaagacgtgggatacggatggtgacaaaatcaaactcattgcagaggatcacagcaggcggggcaccttgatgtgcccccctgagaagacaatccaagaagtcgtctttgccagcttcggcaacccagagggcatgtgcggcaacttcactgtaggcacttgccacactcccaatgcaaagcagatcgttgagaaggaatgcctcggcaagccatcctgcatgctgccggtggatcacacggtgtacggcgcggacatcaactgccaatcaacgactgctacactgggggtgcaggtgagatgcggagggggcaagaagggtgcctgagaataacaagatggatgctgctaattaatggacgtttcagcttgtttgtttgttcatcccttcggtttggcactgatgcttacattgttctgacattgcaattgaaatgtgattggaacattcttgatcggg

SEQ ID NO: 34308 - DNA, 861 bp, Zea mays
  Clone ID: UC-ZMFLMO17245C08_FLI
ctttggaggatactatgatgaacgcatgtactggagacaaaatgatgaaattcgtgatgctgataaggaggcatccgctccatgttcattagcccctgtcgcacatcttggagctcatcagcaagagagttggcagcattcttcatttggaagtcaacatcaacaccacgataaccaaaatttacttgaaatggaagtcagggtaaggggtgaaatgtcccagattcatcaggaaatatatcaactgcggaagttggtggaaagttgcattgcatcccaagtaaagatgcagcactccattaaagaagaggtgtgcagtgcacttcgtgaggcaggcttgatgcgaagccaacccgacacagcagcagcaaaaaggggtaactgctgcatctgccatcgaatgcaagttgactctctactttacaggtgtgggcatgtgtgcgcctgttttgactgcgccgatcagctgaaatcgagcggcatgagctgcccaatctgtcaatctcctattgatgatgttgttctggcgcggttgaatttttgagcttagaatttaggaaaggccaagagaaaaagagccggcactcccagatttagacgtggagtttgcgaagccctggttttgaggcggcttcttacctttttgcttaaccaccactaaagaaatacgagctagttcttggagaaaatgtaaatatgtttttttggcgcaagagcggtgtgcttgtatcgcctaaaggaaaacagagttctaattaaaatgctggttgtattccccgtatgtaccacatcacttgttcacggagagaatgtagtggttctggttctatttacgcagaggattgaactcacggcattgat

SEQ ID NO: 34309 - DNA, 1404 bp, Zea mays
  Clone ID: UC-ZMFLMO17245D06_FLI
catgaagcagggagatctccagggtgcctttgcactcaaggccaagatgattgaaagtggtttgcaacttgatctctattgctacacttgttttatctcgggcttctgtaatatgaatatgatgcaagaagctagaggggttctttcagaaatgattgggactggcattacacctgataagacggcttacaactgtctgataagaaaataccagaaaatgggaaacatggaggaagcgtcaagtcttcagaacgaaatggaaagtgttttgagctcttgcacagaagaggataccgcttctggttctggttgtgaaacctgagtttgcggctgtacaaagagctgaccggccttggagcatgtggcaagcaacatctggagaatggggggcgccatgaagcacaagctgctgaaggatgtttccaaaatgttgttcgtgcctaatgggatttcgactgagagatctactagatcaaattgtaacaaggatcatgctatcaaatcaaaagcaacacttaagggtgctttgtctttaattgcactaaacattgtcagttacaacaggaagatggaaaataggttttaaacactaagagagctgggatccaaaggaaaaagaagcaacccacaggtgcttgaagagttcatgtgggaaaatgaatgggttgaagaaaatgaagatgatggtgacaacaacatatagcatgctgtggatggggcattaggagcaactcaggctcttcgaggcagaaacgttcctaaatgaaggtttttgcgatgaagtggtcaaatgggccagagtcactgtacgttcctgaatcctgatgtcatcccggtcttagacaacgaagaggaattcaagggagagacatatcacatatgcaatagaggcgcgtgtagctaaaaacaagccaataacttgaagaccatgtagtttttttcagggacagcagcaacttgagagagaaccataacagtggatcttctcttgggtattggcaattccataccaagtggttatatacaggatttatgcaaaagaatttgacaatgccaaacatctgccttttggaacttcttccagagaacagaacatttttgcgagagacatctgttgaaaaatcagcctcgaaggtgcctgtctcttctaggagcaaagagctgccgaactgcaagagaaaagtggaggaagaaagtctccttgtttaccaggaagaaacataggaaggaggcgtcaaaaacgcccgctggaaatgagaaaactgagggcacgtcctctgctgtagcaaaacagaaaccggggggggcacacgctctgcttcaaacgtctctaaactacgttatgctatgaatttataatctttttactactatgctcataaatcaatgaagtagtaagagaat

SEQ ID NO: 34310 - DNA, 1874 bp, Zea mays
  Clone ID: UC-ZMFLMO17245G04_FLI
ggggagcagtgggaggatggatctgaacctttacctcggtcccccccgcgccccgcgcccgcgccgctctgacctcggctccgatctcgccctcagcaccccgatgccttcctctccttcgtcctccgcagcgtccgtcgacgcaccgccgccgccgcctgagtccatgcacccgccgtacacccactcccgcgccgacctctcccctccgccgcttccgctggaggtgtacttcccctacaaccccgaagactcgcctgttccggatgcgcatatgtcgtacatgcagcctccggaactgcttatccccgggccgcggaacatgccgcctccggattcgcttatctcggggctccgagagggaattcgggaacttcggtacgccttccatccgccgccaccgcccccgcccccgcccccgctggtgcgggccaacgaactgctgggctgggaagagcgtccttcctcgtcaacggcctcttcatctttcttcccagacaccgctgctcggtgcgggctgctgctcgagcagactggaagccggtggcttcgcacgaggcggttcaggtctgaccttccacccctcagctccgaggctcgcccttctgggcaggacgccaccgagccagtgccccagcatgagcctgcagctgatgctaatgaattaaacaaggtggctcccaatggcttagaattaggtgccccggagaattcctctgaggaacgcagcaagactgccaccgcattcgagtgtaacatatgctttgagatggctagtgagccggtagtcacttcctgtggccatctcttctgctggtcgtgcttgtatcaatggttgaatgtttactccagccacaaggaatgcccagtctgcaaaggcgaggtaactgaggcaaatattactccaatatatggtcgagggaattctgatgcagagaagactgtggaggactggaagtcaccaggtcctacaatcccgccgaggccacatggacatcgccttgaaagcttctggcagcaattccaccatattcgacctatctcaagaaggcttggtgaggcgcatgggatactgtcatcatggaggcgtcttctggatcagcagatcctgggcagcgtgagtaggcttgaagggccatctgaatcagccacgcaagaaataaatgacattcgtcaacatgatcacctaagtggattggcattggcctcaaggatgagggcaaggcggtttcaaatagaagctttgagccgtcctgatggttcttccactagcccccctgataatggtctgacaggaaacaatccatcagaaattctgacaggaaacaatgcattgttggaacgtctggcaggaagcaattcaagacgacttgaattgttggaacgtcttgcttttggcattgcaaacacagctggtgccatgagtgatgactttagaagaatcgcttcaccaaaccaatatagaggatctgcttcatcatcgaatcttcaaaataatgagccagcagtcgatggagctcgcattgcgggtgcaccttctgcagaccaagcgtctaattcaagcactgttgctgtgatacaaggggatggtggtatctctgaaagtgcaggagagcctagcaatgcaggttcttcgggatccctgaggaggagagggaggagcaatgcatcaggttcattggatgtggatggtggaagcctccaacagaacaagagacacaggatgaactgaatcctctttgacatgtgtgtttgtcccaaaccaaacttggcctctttcgctgcattgtagcatgttgtagtttcgtctcttttatgtgttcactgaaacagtttacagttccttcaggttgcttaaatttggatcttcaaac

SEQ ID NO: 34311 - DNA, 2943 bp, Zea mays
  Clone ID: UC-ZMFLMO17245G05_FLI
cttgacactaggtgctatcaccctcagccagtatggtgaaaatcttgagggtctgttaatactgaggtatctatttgggctcccttctgatcctagtggttccttggaatcatctggtgagagtccaagtgagattgagttattcatgaagacatatgaagagaagatatgccagggcattgaaaattcagcgactgctgttggaaagactcttttacgcaagctactgaattcgatcaaattactacgctcaattcttgagaattctggtcaatccgcagatacagttcagatggttcttgaagaaggcactgactcactgtctgaaattgctcgctctgttgttatgacagctcatcttatgccatccctagccaatgtgtcagtaaatgatgaatctccttttctcttctctaatatgtggaaggttattgttgattcagaagagcctcttgactgccaagagggtgaatttgcaaagaggctagtttgggagttgcctgattcttctcttgatagacaactagcacctggccaatctgccaggaggaaattagcactgggagagagtgcaagtaggcgtgtaagggataatcaactgcctgaacccactgggcagttctcacgaggtttaaatacatccaatgcttcttcgggacatacacgcagagacactttccgtcagcggaaacctaacacaagtagaccaccttcaatgcatgtagatgactatgttgcaagagagagaaacatagatggtgcaagtagtgcgtcaaatattgtgaactctaccccacgaggaacacttagtggaaggcctccatccattcatgttgatgaatttatggcaaggcagagagaacgtcaaaatcatgcgccagccccaactggagatgcacctcaagctaaaagtcagacaacaagtttagatgacagtcttcgtactaagccagagaacttgcgtcaacccaagactgatctcgatgatgatcaagaaattgaaattgtctttgatgaggaatcaggttcggatgataaacttcctttccctcaaccagatgatagtctccaatctccacctgtcattattggggaaaattctcctggtcctgttattgacgagacagaaaatcaggagaatgaaagagttccctttttccagagggccacatctatcccgaaggacgatgaaaatcttggcattggcatttcttcccagactgcaatgctctcagaagctaacagttctttggaactgaaacattcagtttctagcccagggaagaattcttttcgtgatcatgctgaagagtctaattatgattctattggtgtatctgggagaccatctttacaagcagatcatcaacaattatctcgtagacatgaaaagagaagtccacgaaaattttctgagacttctctgtcaaatggattccatgggcgtgagcatagacattccaataaccatccacctctgccaccaatgccacctccaatttcatccgtgtccatgcaaaatactgattcagttaataggcagtcatcttcgttcagtgctcgagatcgaccaacacctaatccttctggttatcctacacaatcttttgactctagtatgcctagtgctttcacaggccttcagggtcaaactcaatacatgcttgcaggcgctggcagttcatcagcgaatgagttacccaatgtggaggccaagcttctatggaacacatttccagcaaataggatccctctggagaccttcagctcaggtttacctgctcggccgatgccaccccttacaccttattcagctgttgctactcagcacgctacgatgaactctggctctcctgcaaacctgtatagccagggcagtgttgtccagccttctccaactgcttctattattagtgattcaaatttggccatgaactccgcatctggcagcatgcttgcatcgaatctgctgccatcatttgcatcacaatttctgatgagcaggccttcaatgcctactccgttttttggcacgcctcttcaacaagttcaattctcatccggtcttccacaaaatatttctaaccctcagccacctgtctcaatacaaccacggccacccccacccccaccacccccgcagcagccacatccttctcagacactccaacaacttggtgctatccaattaccacaccaagatcagcagcactcatatccccatagtgctatcttgccacaagttacgttgcagtttcctaaccagctacccattcctcaagtacaattgtatcatcaaagccagcaggaatctgggcaaacactgaggcaagttggtgaacaatcacaacttcagaaccagggtatgcaagcagatagtttctctcaacagcagcaagactcagggatcaacttaaaccagttcttttcatctccagaagccattcagagtctacttagtgatcgtgagaagctctgccaacttttagagcagaatccaaaacttatgcaaatgctccaggatcgcattggccagttgtagtcgcactggaggtgctattgtgaaagtgaaatctgatgctggtcgatcgctaggttcctagagtatggtgttgttttgttttcggctatggctgtagctagatgaaagcaactgccagcttgctagtcgccgaaatgtattcctatgtacattatatgtaactttgttctgtaatgtgaaaatttgtaatgttagtgcgtatctaatttatagttttaagtttaccttagtggttagatcgtgtgacatgcgcagcgacgggaaaacgacgccgccttttgtctgcaaaggcatttgacgctaactacctgtagagttctgaatatcctgttgcactcttgtgtgtatctggttgctttaatgctcgaaaatgaatatcctaaggttttgcattcgtatgc

SEQ ID NO: 34312 - DNA, 1697 bp, Zea mays
  Clone ID: UC-ZMFLMO17246C08_FLI
aaaagaccctgacagtccgacacccgcaagccacaaagtgcagcctcgttgctacaggaatgctgagaaatgtctgaccttgccggaaagcgcaacctgcgcagtggccgcaactgccaccgcaagcacgtcgaggacgggtaggttcatcggtctcgtcgccgggttttcaggtaaagtcaggtcaggccaactctgtcgaagaaggaacatcgaagaaaggaaggaggtgggcggcaatggaggatgcgatggcggcggacgggaagagcgtgctgcaggggcggtacgagctggggcgggtgctggggcacggcaacttcgggcgggtgcacgcggcgcgggacctgcgcacgggccgcagcgtcgcggtcaaggtggtggccaaggacaagctggagcgcgcgggcatggcggagcagatcaagcgggagatcgccgtcatgaagatggtgtcccaccccaacatcgtggagctgcacgaggtgatggccacccgctccaagatctacctcgcgctcgagctcgtccgcggcggggagctcttctcccgcatcgcgcgcgcggggcgggtccgggaggacgtggcgcgctgttacttccggcagctcgtcgccgcggtcgacttctgccacggccgcgggtgttccaccgagacctgaagctcgagaacctgctcctcgacgaggtaggcaacctcaaagtggcggactttgggctcagcgcgctcgccgggcacgcgcgctccgacgggctgctccataccgcctgtggcacgccgtcatacgtcgcccccgaggtgctcggcgggaagggctacgacggcgccaaggcggacctctggtcctgtggcgtcatcctctacgtgctcctcgttggcagcttgccattccacgaggacaacctcatggtcatgtaccggaagatgcagcgcggcgagttcctctgcccgccgtgggtctcagcggacgcccggaagctcatcggcgagctgctcgaccccgacccgagcacgcgcatcaccgtcgctcgcctcgtcgagacgccgtggtaccggaagccgttgcccgtcctgccgccgctcaacctcaaggagccaaccccggacgcgcgccgcgccacctctgacaaggaagagcccgaggtgctgaacgcgttccacctcatctctttctcggagggcttcgacctgtccccgctcttcgaccagggccgtggcggcggcgtagggaggtctagcgcgggcggcatccgtttcgtgacgcgcgaggccgccagcagcgtggtctcccgtctggagtcgctggtcaccggccgcggagccaacatgcgcgtgacaaagagcggctcgcggggcgttcgtttggaggccgtgtcgcgcgggcgctcgggggcgcggctggcagtggccgcggagatcttcagcgtggcgccgtcggtgctcctggtggacgtgaagaaggacggcggcgacacgatggagtaccggtcgttctgtagcgaggagctccggccggcgctcaaggacatcgtctgggcctccagccaggacacaccgggcgccgcttgatgtcgtcgctgtcgctcctgccaccattattgtccttgcccatcaattgctgttggtgtccgtgtagggggggtcgtgctcgtgcattattgtttggtgacgaagtgatgtttgtttgtcgtttgcc

SEQ ID NO: 34313 - DNA, 1811 bp, Zea mays
  Clone ID: UC-ZMFLMO17246D10_FLI
ggctaattctacatcaagcagatctcactgtttgattcgtatttcattgacctcatttgacgcaccagagaggaaaagagcaagaaacaaattatggatgattgatctaggtggaagtgaaaggcttgtaaagacaaaggcaactgggaaaaggctcaaggaaggcaaagccataaatctgtcgctgtcagccctagcggatgtcatagatgcactacagaccaaaaaatcccacatcccttataggaatagcaagctcacacaagttcttaaagattctataggatgtgagtccaaaactctgatgcttgttcatatccgtccaaatgaggatgatttgtgtgagagcatctgtaccttgggttttgcgacaagagtcagaagtattcgcctggaaaatgaagaaccacaagaagtaaaagcaagaaaggaacatttattaatggaattagaaaaggagatcagtgatctagaacaagaatgtgaaggtattgttagaaagattaagaagctcaaggagacaatggagcattttaaagggcatcagccatctgctgaagcaaattttgacatttcacatccatccagtgaagagctgaaaactgtcatgccaaagaatacaaaggattcgaagaatcggagagatgtttcttccaggttacccaggtttatgaagccaacagcgtctagccagcacaggatagacttaaataaacacatacctgttagtaacaagacaaaaccaccagtgccaccaaagagaaggccttcctcagtttatgctgagtctgtaaggctgccagtaaatgctgcaacttggcagtcagaatgtagttctgaatgcagtatctccatgacaagtgacatgaactggataccaagtatacaagatgggacagaatgcagccaggatacatcagaatatgagaccaaacaagtgattttctcagaacatgagaaaccacctcagagtcaagtgatttcatttgaagaatcaggggagatgcaggataaaaccaaggaaatgggcatcatagacattgacagctggattcatcaacagatcattgaaaacactggcatatgtcagtgtcacactgaaaggacgctagatgttattgaagtaaatgaatatgaaacttacaattctaatactgcttcaccagttcagaaggaatttactaatggttccaaaccctcactggatgaagataacaacctgaacctttgtccccccacgcaaaacacagaagatagcaaggaaaccagggctgttaatcaattcagaaaaacagaattatacactcctccattaaaagaactttgcggcagtgccaaaattaaggaacataagaatgaaaagcttgggcgtcatggaagttgcagaagatcactgcaggaagagctcggcaattgcaagccagagcagccagacaaggaaccaaaagctgatccaaacatgcaacctgaaattgaattccatgacaacaaacaccatataggtaagttgacaaaattcattcaagctcttcgaacagcatggattggtgctcttcttggactaggcaccatgaaccttggattagagcaagacttcttcaagagcttaacactctgatttaactagaacttcaccctttcaaaaggatttaacgaagctgtatacagtttcagtaagagtatctacttcaggaatcaatgggcactgtacatataaggctgcaatgaaatgtaagctgccaatatgccagtggcagatgaattgctagtctgaaatagtttctttggttataaatggataatttcaagac

SEQ ID NO: 34314 - DNA, 2474 bp, Zea mays
  Clone ID: UC-ZMFLMO17246E06_FLI
ctccccgcaccctgctccctcgcttcaaatcgattcggcgctaccgagcaccaaacgccaaggcggctgcttaccagagtcatgcggacccaaagaagcctccttcccctgctcctgctttccgccgccgcgctgctcgccgacgcgcaggagcgcaagaactacgtggttcatctcgagccgagggacggcggcagcaccgcttcgttggaggagtggcaccggtccttcttgccggaggcgacgctggactcggcggcggacgacgggccgaggatcatccactcgtacagccacgtgctgacgggcttcgctgcccgcctcaccgacgcggaggcggagacgctgcggcgcaaggaggggtgtctgcggctgtacccagaggagttcctgccgctggcgaccacccactcgccgggcttcctcggcctccacatgggcaaggacggcttctggagccgctccggcttcggccgcggcgtggtgattggcctcctcgacaccggcatcctgcccagccacccgtccttcggcgacgccgggctgccgccgccgcccaagaagtggaagggcgcctgccagttccggtcgatcgccggcggcgggtgcagcaacaaggtcatcggcgcgcgcgcgttcgggagcgcggccatcaacgactcggcgccgcccgtggacgacgcgggccacggcacgcacacggccagcacggcggcgggcaacttcgtgcagaacgccgacgtgcggggcaacgcgcacggcacggcgtccgggatggcgccgcacgcgcacctggccatctacaaggtgtgcacgcggagccggtgctccatcatggacatcgttgccggcctggacgccgccgtcaaggacggcgtcgacgtgctctccttctccatcagcgccacggacggcgcgcagttcaactacgacctcatcgccatcgccacgttcaaggccatggagcacgggatcttcgtcagcgccgcggcgggcaacgacggccccgccgcgggctccatcaccaacggcgcgccatggatgctcacggtcgcggcgggcaccatggaccgcgcgatacgcaccaccgcaacggcgacccggaggcccgcgactgcagcacgctggtggaggccgaggtgaggggcaaggtggtgctgtgcgagagccgcaccatcacggagcacgtcgagcaggggcagatggtgtccgcgtacggcggcgccggcatgatcctcatgaacaaggcggcggaggggttcaccaccttcgccgacgcgcacgtcctgccggcgtcgcacgtgagctacgccgcggggtccaagatcgcggcgtacatcaagtcgacgcccaggcccacggcgaccatcacgttccggggcacggtgatgggctcgtccccggcgccgtccgtggccttcttctcgtcgcgcgggccgaacaaggcgagcccgggcatcctgaagcccgacatcaccgggcccggaatgaacatcctggcggcgtgggcgcccagcgagatgcacccggagttcgcggacgacgtgagcctgcccttcttcatggagtccgggacgtccatgtcgacgccgcacctgagcggcatcgcggccatcatcaagagcctgcacccgagctggtcccccgcggcgatcaagtcggcgatcatgacgtcgtcgggcacggcggaccacgcgggcgtgccgatcaaggacgagcagtacaggcgggcgagcttctacagcatgggcgccggctacgtgaacccgtcccgcgccgtcgacccggggctggtgtacgacctcggcgccggcgagtacatcgcctacctctgcgggctgggcatcggggacgacggcgtgaaggagataactgggcgccgcgtcgcctgcgccaagctgaaggccatcaccgaggcggagctcaactacccgtcgctggtggtgaagctgctgtcccatccgatcaccgtccgtcgcaccgtgaccaacgtcgggaaggccaactcggtgtacaaggccgtggtggacatgcccagggccgtgtccgtggtggtgcggcccccggtgctgcggttcgccagggcgaacgagaagcagagcttcaccgtgacggtgcggtggaacgggccgccggccgtcgccggcgccgaggggaacctgaagtgggtgtcgagcgagcacgtcgtccggagcccgatcgtgataccgccggccaaggccgtcgcgtaggcgtagctcccaatccaatctctgcttgacggtcggcaggaccgttctctgctcgtgtcgtgtctccgaggatgaaggtcatcagtattcagtagctttaggtaatcgtgagtgtgcccggtgtacgtatggcgaaggaagtaggcaggcgactgttgtataggctggaggcagggtacccgatcatctgcgacgcagcaagctcagctgcaatggcaatggcgcccgttcgttccgtatgta

SEQ ID NO: 34315 - DNA, 1520 bp, Zea mays
  Clone ID: UC-ZMFLMO17246G11_FLI
caaccaatgagatcattgatggcagcatggttaatactgttgaagggctcaaggtttatgaaggattactaaatgtaaccgaggcaaataagatcctttccttagtcaatgaaacaagagcctcttaccggcgaggggggcttgaagctagacagaaggttattattgctaaaagaccaatgaagggtcatggacgggaaattgttcagctgggtgttcctattattgatggccctcctgatgatgaaaatctaagagagacaagggtggaggcgattcctgggctgctgaatgatctgtttgatcgcttgtctcagcaggaaattatacccttcaagccagattattgtgtcattgacatcttcaatgagggagactattctcatcctcaccaatccccttcttggtatggtagacctctttgtaccctctgcttaacagattgtgatatggtgtttggccgttatatatcaggagaaaaaggcgatcatagaggtcctctgaagctctcgctcgcaactgggtcacttctactcatgcaagggagaagtattgactgtgcaaagcgagctattcctgctacacgcaagcagagagtcatactgaattttggaaagtccgtagcaagaaagcacatcccagctgaaagtgcctggtctactccattaacacctcctatgccctggggtcagtcatcaaggccagttaacggctcccgccatccccaaagtcctaaacactatgggtatgctccaatcagcggtgtacttccagcaccaccagttggagctcatcacgtcccaccgtctgatgggatgcagccactatttgtagcccctgctcctatttctgctgcagccatacctttcacgccaactgttcccttgcaaaatacatcagctgcttggatacaagaagttactccaaggcctgctccgccacgattccctggtcctggtacgggggtcttccttcctccgggatcaggccaccctctgcctcatcagatgatgccggcttctcatggccatggcgaacccaactctccacaaggttcatccgcttacctgcatagtaaggtcaatggcaaggagacatctaatggcaatctttctcctaagaactcgccgagaaagacatcttgcacagccgaggagaaaccagaatgcaatgggagcttaaatggtggtggcggctctgcggatgagaagtcaactgtaggtatggagcagcagaatggtgttcagaagaatgttgggagtagcaaggtccagccacatggacatgcaactgaatagagtgggacttatagtacatagacaacagaaaactgaagagacgaggagttgaattttgggccgtgaatttgcggtagtgcgcagagctcagcagaggtctttgctggcactctcttgtccctgacaagaatcatcgtgtcaagttctcgagacggaaaacatttgtcctaaactttgtagctgcactgttgcaaatctagattatcgacattgcctcgggtt

SEQ ID NO: 34316 - DNA, 2534 bp, Zea mays
  Clone ID: UC-ZMFLMO17247B06_FLI
ttgaacctggggaatctgtgaccgatgatcgtatattgggtgcccgcatgacaaaggccagccttgttcctccagttactaggaagtatgaagttatcgaggagtaccttattgtagcagatttggaggaagtacagcgaaaaatgagagttgctttacctgatgactattctgagaagttgctgtcacagaagaatggcaccgaaaacttggaacttccagaggttaaggattatcaaccccgaaaagtagcaggagatgaaattcttgagcaagaagtatatggcatagatccatacacacacaatctactgagtgacattatgcctgctgatcttgagttgtcacctaccgacaagcatatctttattgaggagttgcttctgaatacattgaataagcaagttaggcatttcactggttcgggaaatacccctatgacttacaaccttaggcctgtcattgaagagatccaaaggtctgcagaggataatggtgataaacgaacttcaaagatgtgcttggggatgctaaagaccatgagaaatcgctctgaacagaacttcgttgcttatagaaagggtctcggtgttgtttgcaacaaaaaaggtggatttggtgtcgatgactttgttgtagagttctttggggaggtttacccttcttggagatggtatgaaaagcaagatggtattaaacatatacaaaacaacagtgaagatcaagctcctgagttttacaacattatgttagaaaggccaaagggagacggagatggatatgacttggtttttgttgatgcgatgcacaaggccaactacgctagtagaatctgccactcctgcaacccaaactgcgaagcaaaagtgacagcagtgaatggtaaataccagattggagtttacacacttcgaccaattgcagaaggcgaggaaatcacttttgattacaattctgtaactgagagcaaagaagagcatgaagcatcagtctgcctctgtggaagtcaagtatgccgtggcagctatttgaatttttctggtgaaggagcctttgagaaggtattaatggaattccatggtgtgctcgataggcatagcctgctgctacaggcttgtgaaacagactctgtctctcaacaagacttaattgacttgggtagagctggtcttggtacctgtttgcttgctggtttgcctggatggcttgttgcttacacagctcacctggtgcggtttatataccttgagagacagaaactccctgatgagatcttaaggcacaatgtggatgagaagcgccagttccttatagaaataaacatggattctgagaagaatgatgctgaggttcaggcagagggagtattaaattcaagattacagcaaatagtgcatacacttgacaaggtgagatatgttatgagatgcatatttggagacccaaagaatgctcctcctcctcttgtaaggttgtctgggaaaagtctggtatctgccatctggaaaggggacagttcaatagttgctgaactcattcagtcgatggaacctcatgttgaagaagaggtacttagtgatctgaaggccaaaatccgtgctcatgatccgtcagagtctgaagatattgagggaggcatccggaattctctcttgtggctgcgtgatgaattgcgaactctttcatgcacttacaagtgccgtcatgatgctgctgcagatttgattcatttgtatgcttatacaaagtgcttcttccgagtccgggattataagacagtaaaatctccaccagttcatatcagtccgcttgacttaggcccaaaatatgctgataaactgggaccaggctttcaggagtactgcaagacatacccagaaaattattgcttagcccagcttatctattggtatagccagaattcagaacctgaatctagattaacaagagctagaaaaggttgcatgtcgttgccagatgtctcatccttctatgtgaagtctgcaaagccatcacaagagcgagcttatggaaacagaactgtgagattcatgttatcgcgcatggaaaaacaggcacaaagaccatggccaaaggataggatatgggtgttcaagagtgatccgagattctttggtagtccaatgatggacaccgtgttgaataattccccgcttgacaaggagatggtgcactggctcaagactagaccaaatgttttcctaggctagtaaaaaaggtttgtaggcagataaggtggtatttggttctttctcctttttggagattttagtctacatgattctttttccgactcacaccttggctacctgatcatggggagtttagcttttagatagcagggtagtctcaccacccccatctgtacattcctctctccctactttccttgtagagatgtatctggttaataactgatagattcgtcattgatttgatgtagtgaattttccccataggaacgctccctcttctgtttcatgtaaatgcagaacaatttcaatcttgaattc

SEQ ID NO: 34317 - DNA, 1401 bp, Zea mays
  Clone ID: UC-ZMFLMO17247D08_FLI
atgatcctgaacatataaagttgagtttaaacaatatataaatttgaagatcattgcccgccatgttcagcttcatttgaagaggcactcaataggaattgacatgtgtcattcacacctcaaatatcttcaatctcgatgtaacattagaatgcaggcaaggtagaaatggccagatgcattcctgtaactatacctggtgtagtggtgagagttgtctcactgagtcaccaagttgtgggttcgaagcaatatctttgcatttacattttatagagggaagacttgcctcggtttatcccttctccagatcctactcatgtgggagcctctggcctagttaggagtcttgtttgcataaagtaaagaggaatcgcaccgagggataggcattgtgagtatgacgtgtgctttgcatgggccagcacctgactcagttcctgtgaaatcatgaatccaccaacggaggtcaaatacctgactgcagccagccagaatgtttacagccacacatgatgatcctatagctggctagaagaagaagaaatatttacagccatccagcataaccttagagctggtttgaagaggatgcaaccggtgcagctgcacaaatgcacaaggacatggagtacccaagaaggacactgctgcacacccctttctccgggcatccctctggtccaagccagccaatagatggagccacggccacagacggaagcaacttcgacgcgaacgtggtcatgatcctggctgtcctcctgtgcgcgctgatctgcgctctcgggctcaactccatcgtccggtgcgcgctgcggtgctcgagccgggtggtggtgggtcctgaaccgaaccaggtgacgcggcttgtccagagcgggctgaggaggaaggcgctccgagccatgccggtcctggtctactcgcctgggctgaggatcaatgctgccaacccgacatgcgcgatctgcctctcggacttcgaggcaggggagcatgtcagggtcctccccaaatgcaaccacggcttccatgtcaggtgcatcgaccggtggctgctggcgcggtcgacgtgcccgacgtgccggcagtccctgttcggagtgccgcagaaggcctccggctgctccgaggcgagccgggctgccgagccagagcctgcgcctgcgcctgcgcctgctcgctctgtccttgtgccgctcagacctgaaggtttggtcactcattatgatttttagaatgttcggttgcttcttagtcgttgcataaatgatgagagggaggctgagaaaaagtagaaacaaaaactgtgagcattagatcttactgccaatctggtttgtacattgttggttgctagagaaaaaaaagatgtgaaggttttctagtttttttttt

SEQ ID NO: 34318 - DNA, 1345 bp, Zea mays
  Clone ID: UC-ZMFLMO17247G08_FLI
cacgtcctggacttcccgacgtccgaggccaccgccaccgttgccatccgcatgcaccactccctcggcgacggcgtctcgctgctgtcgctgctcatcgcgtgcacccgcagcgccgcggacccggcgcggctgccggagctgccgcccgcgccgcgccgcgcgagccctgtctacgccaggcagcgccccccgctttccgcgggcctcgtggcgttcgcgctgtggctgtggtcctacgtcttgctcgcgtggcacacactggtggacgtcgcgtgcttcgtggccacggcgtggttcctgcgcgaccagcgcacacccttcatggccgcgtccgagggcgtcgagttccgccgcaagcgcttcgtgcaccgcacgctcagcctcgacgacgtcaagttcgtcaagaatgtcatgaagtgtactgtcaacgatgtcctgattggagtgactaacgcagggttgtcgcggtattattttcgaaaaaccagtgataccaacaacgagaggaaaaaatcgcagaatattcgtgtccgatcagctctccttgttaacattaggagaacacctggtttacatgcattggcggaaatgatggattctatcaagaacaatagggcaaaatgggggaacctgattggttacatgatactgcctttccacatagccatgcacgatgatcctcttgaatacatccgccaagggaaaaggacagctcaaaggaagaaggcttcattagaagcggttttcacgtactggagtgggaacctaatagtcaaactatttggcatgaaggctgcagcagctctctgctatggtatgttcacaaatacgaccatgtcattctcaagcatggtcggacctgctgagaaggtggagttctacggccatccaatcatctacatcgctccctctgtctacgggcatccacatgctctgactatacattaccaaagctatacgaactccatcaagcttgtcctcgcagtggatgatgctcagtttccagactctcatcagcttttggacgacttcgccgagtccctcaggctcatccgtcaggcagcttcaacaagatgacagacacaaacaagagcattttttttcagtagaatgtagactgttggcgagaactcgcatacaaatgctggacaataacttatcaggaaattgatggcctggttacctgactggggactcttgaactttcaagaaatcattagaggcaaattgtaaagtgtaaagactagtatgtaatatcaatattgttcaaccaattgcggtggaattacaaaatggatgttatgaaggaattcagcatcgactatgggtagctgtttgggct

SEQ ID NO: 34319 - DNA, 2135 bp, Zea mays
  Clone ID: UC-ZMFLMO17247G10_FLI
acccgccgaaggccagagagaaatatctcatcttctctccaccggatcggttcaatcgagagcgagggagaaagggaggtggtgcgtcgaggggggccgagattttgccggtttggagccagataggggtatgagctgcttcgcgcaccgccgccgcttcgacgtcgcccgccgccaggacggcctcctcgtcttcgtcttcttcctctcgattcccatacgtaccagtagttttaatttaagtagtagtaattgtagtagcaatctcttgtaaactgcgctcgcctttgcgtgttcgtggtccttttgcgctttctcgtccctctttctctcaatctctccttattcttctccttccacggcgaagccggcggctggtatggatcccaatggcctcaaaactggaggccttttgctcccgaccatcgagaggcggtgcacgtcgcctccatccgtcattgtcatcggcggtggcatctcgggcgttgcagctgcccgtgccctctccaattcttcatttaaggtgactgttttggaatcgagagatcgtattggcgggcgcattcatactgataactcgtttggatgcccaattgatatgggagcctcatggctacacggcgtgtgcaatgagaatccactggcaccattgataagctatcttgggctgaggttataccgcacaagcgatgataactcagttctgtatgatcatgatttagaaagctatgctctctttgataaggatggtaatcaggtcccaaaggagacagtcgataaagttggagaaacattcgagagaattcttgaagagacggtgaaagtgcgcgatgagcaggaacacgacatgccactgctacaggcaatttctattgtgtttgagaggcacccccatctaaagcttgaagggctagatgatcaggtcttacaatggtgtgtctgccggcttgaggcatggtttgctgcagatgcagatgaaatatctctgaagaactgggatcaggagcgtgttcttactggtggacatggactgatggtaaatgggtactatcctgttattgaagctcttgctcaaggtcttgacatcaggcttaaccaaagggtcaccgaaattacccgccagcacaatggagtcaaggtcactactgaagatggcacaagctacttggccgacgcctgcataatctcagtgccactcggcgtgctcaaggcgaacgtaataaagttcgagcctgagctgccccagtggaagagctccgccatcgccgacctcggcgtgggcaccgagaacaagatcgccatgcacttcgacagggtcttttggcccaacgtcgaggtgctgggaatggtcgggccgacgcccaaagcctgtgggtacttcctgaacctgcacaaagccaccggcaatccggtcctcgtgtacatggccgccggaaggttcgcccaggaggtggagaagctgtcggacaaggaagccgtcggcctggtcgtttctcacctgaagaagatgctcccggatgccactgaaccgacgcagtacctggtgtcgcgatggggctccgaccccaactccctggggtcctactcgtgcgacctggtcgcgaagccggccgacgtgtgcgcgaggttcgccgcccccgtcgagaacctgcacttcgccggcgaggcggccagtgccgagcactcggggtccgtgcacggcgcctactcgtcgggcatcgccgctgccgaggaatgcaggaagcggctcctggcgctgaagggcatcccggacctggtccaggtcgcggcgtgggaggagatggccggagctgtggctcctctgcagatttgcaggacctgagtgagattggatcactggctgcctttggacattggagtggatcgtggatcgcttcgctgctccctgatggttgccgagtcttttttttatatttaccttgaaggccgttgtgtcttgtctggaataaatcaagattgactggcactgaaagtgtcatcgcgtcactctttcatacttattaaatatcacaagtctgtcctgagatctcagcctggtgcctgcgtgctgcctttgccttgtatatgacgttttactttcttttagtctcaattattcaaattttttttttact

SEQ ID NO: 34320 - DNA, 1750 bp, Zea mays
  Clone ID: UC-ZMFLMO17248B10_FLI
tgttgctccccccaccttctcctcctgctcctgccctcggtttctgatcagcgaacatgggaacccgcggcgtcgccctgctgctcctcgcggcggtgctgctcctccaggcgctcctcctcgcgtcgtcggagggcctggtgcgggtcgcgctgaagaagctgcccgtcgaccagaacggccgcgtcgccgcgcgcctctccgccgaggagaggcagcgcctcctcctccgcggcgccaacgccctgggctcaggcggcgacgacgactccgacgtcatcgcgctcaagaactacatgaacgcgcagtactttggggagatcggcgtcggctcgccgcagcagaagttcaccgtcatcttcgacaccggcagctccaacctctgggtgccgtcctccaagtgctacttctcgatcgcttgctacttccactcgcgctacaagtcagggcagtcaagcacttacaagaagaacggaaaacctgctgccattcgttatggaactggttccattgctggttttttcagtgaggatagcgttacattaggtgatctggttgtgaaggatcaggaatttattgaagctacaaaggagccagggcttaccttcatggttgcaaaatttgatggcattcttgggctaggctttcaagaaatctctgttgggaatgcaacaccagtgtggtataacatggtgaaacaaggtctcatcagcgaccctgttttctcgttctggtttaaccgacatgctgatgaaggagaaggtggtgaaattgtgtttggtggaatggattctagccactacaagggtgatcacacgtttgtcccagtcactcggaagggatactggcagttcaacatgggtgatgtcctggttgatggaaagtccactgggttttgtgctggtggctgtgcagccatcgcagattctggaacttccttgcttgctggccccacagccataattactgaaatcaatgaaaaaattggtgctgctggtgtagtcagccaggagtgcaagactgttgtttctcaatatggacagcagatcctagatcttttgctagctgagacacaaccagcgaagatctgttctcaggttggtctgtgcacttttgatggcactcatggtgtcagcgctggaattcggagcgtagtggatgatgaagctgggaaatcaaatggtggtctcaagagtgatccaatgtgcaatgcctgtgagatggctgtggtatggatgcagaaccaacttgcccagaacaagacacaggagctcatcctgaactacattaatcagctttgcgagcgtcttccgagtccaatgggagaatcagccgtggactgtggcagtcttgcgtccatgcctgacattgcgttcaccattggaggcaataagttcaagctgaaaccagagcagtacattctgaaggttggtgaaggacaggctgcccagtgcatcagcggattcacagctatggatatcccaccaccccgtggccctctctggatcttgggtgatgttttcatgggagtctaccacaccgtcttcgactatggcaagctgagggttggcttcgcagagtcggcctagggatatggtttggcagcaacccgtccagaggcaaacgcgtaatttgtgtgtttatgcggccggcgatgtgtgtatatatgctactacatgtttagtgatgctttccgagacctgagacaacgcccgtctgttttaacgtggcgcaagaataattctggttc

SEQ ID NO: 34321 - DNA, 1417 bp, Zea mays
  Clone ID: UC-ZMFLMO17248D12_FLI
gctctacttcgcgctggccatcataccggcgctcccaagcccgctccgctacgcggcctggccgctgtactggatcgcgcaggggtgcgtgtgcaccggcgtgtgggtcatcgcgcacgagtgcggccaccacgccttctcggactactcgctcctggacgacgtggtcggcctggtgctgcactcgtcgctcatggtgccctacttctcgtggaagtacagccaccggcgccaccactccaacacggggtccctggagcgcgacgaggtgttcgtgcccaagaagaaggaggcgctgccgtggtacaccccgtacgtgtacaacaacccggtcggccggctggtgcacatcgtggtgcagctcaccctcgggtggccgctgtacctggcgaccaacgcgtcggggcggccgtacccgcgcttcgcctgccacttcgacccctacggccccatctacaacgaccgggagcgcgcccagatcttcgtctcggacgccggcgtcgtggccgtggcgttcgggctgtacaagctggcggcggcgttcggggtctggtgggtggtgcgcgtgtacgccgtgccgctgctgatcgtgaacgcgtggctggtgctcatcacctacctgcagcacacccacccgtcgctcccccactacgactcgagcgagtgggactggctgcgcggcgcgctggccaccatggaccgcgactacggcatcctcaaccgcgtgttccacaacatcacggacacgcacgtcgcgcaccacctcttctccaccatgccgcactaccacgccatggaggccaccaaggcgatcaggcccatcctcggcgactactaccacttcgacccgacccctgttgccaaggcgacctggcgcgaggccagggagtgcatctacgtcgagcccgaggaccgcaagggcgtcttctggtacaacaagaagttctagccgccgccgctcgcagagctgagaggacgctaccataggaatgggagcaggaaccaggaggaggagacggtactcgccccaaagtctccgtctacctatctaatcgttagtcgtcagtcttttagacgggaagagagatcatttgggcacagagacgaaggcttactgcagtgccatcgctagagctgccatcaagtacaagtaggcaaattcgtcaacttagtgtgtcccatgttgtttttcttagtcgtcgctgctgtaggctttccggcggcggtcgtttgtgtggttggcatccgtggccatgcctgtgcgtgcgtggccgcgcttgtcgtgtgcgtctgtcgtcgcgttggcgtcgtctcttcgtgctccccgtgtgttgttgacttgttgtaaaacaagaagatgttttctggtgtctttggcggaataacagatcgtccgaacgacaacctttttttgggt

SEQ ID NO: 34322 - DNA, 1114 bp, Zea mays
  Clone ID: UC-ZMFLMO17248E05_FLI
tggatattggtgatactagtacagagggcacggagcactacggtgagggaggtgtttctactgccgtctcggtggtgaccgtggacgatgttgcagagacagtttccagtaggagtccagcagtctcagtcatcggcgatgacatgactagtgtcaagagtaggccagatgctgacagctccgatcaaacaactggctacgacgcgctaaggagcaaggaatttcgggagaaagagtgtgtgaaaacagaggagagcaaaaccgtggacgacaaggtgcctacagagagcacgccaccaccacggatcattcaagtttctagatcgccagcgccagacggtcagagcagggtagaagacgaagcagccgtggggacggtgctggaaggagcgaggagtgacaccgacgatcttgccacacgcgcggtggtggttgctttgcaatcgagcatttctgctggtgaaagcgagccgccgtcagcgagtgaccgtgttgagtacacgccggcgaacgaaggatttaggagggatgcgatagctgaggacacggacaactacacggaggaacagatgagggagcagcttgatgccctaagaacaataaccgggtaccgtcccacgccgtctttgactctggaagccgagctcgtgggtctctatgtattcgtgggcgtggaaccccctgtcggctccggctccagggaagactccgacctgagtgatctcagcgcaaaactcaggctcctgaaatcgatcataggcgtggagtaaagatctgaagcgggaactgatttaccaggagttctgtgcttgtgtataatgcataaggttcagcggtccagggttcatcccgcacgtgagctttgttacgctctgctggttttaatctcaaaatccatccatgtggactagagtggattgaggatgtttaaattcctagcaactcaaaaatctctcctgctccctctcaatcccctttgaccttcatggtgggacgacaggtagctgtgaactacgtatcctactctatatttttgtgtggaaaagacgttaacgaacgtgctgtatatggcctacttcgcactagtgatgcgaacaagggatggccatttgtg

SEQ ID NO: 34323 - DNA, 2796 bp, Zea mays
  Clone ID: UC-ZMFLMO17248E10_FLI
tcggcaaaaagcatacaccacggtatatctccttgtatgttccttgtgacctcatctatcaccaaagcgaaaagataagggctcaaagccgacccttgatgtagtcctatgttaattggaaagtcatcggtgtccccatcacttgttcggacacttgtcacaacattagtgtacatatctttacaatgactatagaaataaaacatttattaaatttggggagcccagttattattgcatacatagttaacgttcgcttttgtgggaatatgcaagagctatgtacttccgttagtggctactggacaatgttgattgccacttcacataatatcgagtcgtgtaactggtcaactggaccctaaacatttcagtaaaagacatacaatatcaaccttcagtgttttttacccctgttgaactgctactttgtatccatgtttgttgtttacatggcttggtatttttgtaggcaattccgatgctatattgtgggcaggaactaattaatggtaatttcacgactgcatttcttccaccaccatcaatttattacacctggccgccacggaatatttcgcctccttggagaccagatgacaaggatggacactatgtttttgcggttggagagaatctcacaccaagatataggatacttaacaagatgggtgaagggacatttggacaagttttggagtgctgggacttggaaaaccaagaagcagtggctatcaagattgtacgctcccttcagaaataccgagaggctgctatgatagaaattgatgtgctccagagacttgggaagcatgactttactggcagccgttgtgtgcaaatacggaactggtttgactatcgtaatcatatttgtatagtatttgagaagcttgggccaagcctatatgactttctgcgaaagaatagctaccgttcatttcctattgaccttgtccgagaatttgccagacaaatattagagtctgttgcatgtgagtactcagtttactctggctacacttaaatgcaaccatctagtcttttgaattttgagcaacatcattagacttgcgataaagtcttctgaattttgaacaatataattagattactaaactgctatggtttggcatggtcttggtaagttggatttgcaagttctgatgtgcttccctagtcctctttaaatgaagctgatggttgtttttcctctatagttatgcatgacttgcgacttattcacacggatctgaagccagagaacattctccttgtttcatcagagtctatcagggtgcctgattataaggttgttactggattcctaaactttgacacacttctgtattgtatttactgattaaggttctttttaggacatatacacattattaatgttctttagcaatcctttatttgccattaacgtgtcactgtcatgtggggaccacctgtgcgacagtgacaaataagggattatggaaaactgcaacggcaggcattcctctgattcttatgtggacaggaatttgattacttaatttaataacagattatgcagaattgcaactgcataaatgcacctttttctctaaactttattttaatttgcaatgaaggtttctatacgaccaccaaaggatggttctttctttaagaaccttccaaaatctagtgctatcaagctgattgattttgggagtacaactttcgagagccaagaccacaattatgtggtgtcgacaagacattatcgtgcaccagaagttatccttggtataattgacatccgctgacccacacacaaagtggccaatttacctttattttctatttttttcttaatgacaccagtttctttgttttgtatttgttttttaaatctttgataaatgacaattcttgtttaggtcttgggtggaactatccatgcgacttgtggagtgtgggttgcattttagttgagctttgttcggttagtttactaagactctgcattggagtactggattaatcttgaccatatctgtcgcaactctgtggtgcttgtcttgataagtctctcttgcatttttttgttttttcatgataatattagggggaagctctctttcaaacacatgaaaacttggagcatttggctatgatggagaaggtcttagggcctctcccaaagcatatgattgtcagagctgagtatgtgtacaagtcttttgttatcttcttatcatactttttgtcatttttatttatgtatacatccaagatgaggtatctgatcagttctgttttcgcttatcttattaacctatttattaatgctgtttttacagtcggcgtgctgaaaagtacttcaagcgcggagtaaggttggactggccagagggagcggcctcacgagagagcatgaaggcagtctggaaattgcctcgtctgcagaaccttgtgatgcaacatgttgatcattctgctggagatctaattgatcttcttcaaggacttcttcggtatgatcctaatgagcgcctgaaagcacatgaagctctacaacaccctttctttaccagatgcatcagaagatgtggtttctgaggctacactgagattgaaaatgtcaatgctgtatttcttcattttgatgtgtaagaactacaaaaaagtggagatgttctacgaaaaatgaaatatgctaacttgcattctgttcaatgatttgaaaggtaattggtgtatataagcagagttctctgacactcgatccattttaactggatgtcattttccaattgatac

SEQ ID NO: 34324 - DNA, 1686 bp, Zea mays
  Clone ID: UC-ZMFLMO17248F03_FLI
cgaggagaggggaaccccggcccagggagagttgtggggaggggatcggcggcggaggagatggaggagcgggagaagctcgtgtgcctggccaagcttgccgagcaggcggagcggtacgacgataatgattatgaagagcaagcaaacctgtacagtgaggaaactgggaatcggtacaacgaggacccagcagattcttaccaggaagagcaggagaatgcattcagtgggggcataaaccaacaggacaacttgcaggtcaacaatgttgacgataacaaatggcctggatggcctggagagagtgttttccgcatactcgttccagctcagaaggttggagctatcattggccgcaaaggggagtttatcaagaagatgtgcgaggagactaaagcgcgcatcaaaatacttgatggcccacctggtgtaccagaaagagcagtaatgatttcagcaaaggatgaaccagatgcacctctctctccagctatggatggcttacttagagttcataaaagaataactgatagttcagatggtgaatctagtcaacctcaacgaagtgctggtaatataggaccaacacgacttctagtgccatcttcgcaagctggcagccttattggcaagcagggagcaactattaaatcaatacaagattcttcaaaatctattgtccgtattgttgagaatgtgcctcctgttgcactaaatgatgatagagttgtggagatacaaggcgagcctcttggtgtccaggaagcagtggaattaatatcgagtcacctgagaaaatttcttgttgaccgcagtgttctaccattgtttgaagcgcatatgaaaatgcatggtatgccgagggagcaaccagtgccacctccccagcattggggccctcctcaaacctggatccgccctccaaacattcctccaggtggtcctggttttggaggaaatccacagttcatgcatccaaggccgcaagacagttactatcctttctcctgatgtcccccatatggaaaagcagccgcactacggtatttctgcatacggccgggaggccccaccaagtggtgcttctgctacagggaatcaaccaccctctcatgcaggttctcaggtggctcatgacatgcacattccccttgcctacgctgatgctgtgattggggcagctggtgctagtatcagttatatccgtagacacagcggcgcaacagtaactattcaagagagcagaggtgcacccggagagatgaccgtggagataactgggactgcagcccaagttcaaactgcgcagcagctgatccagaatttcatggcagaagctgccccaccaccaccaggcccggcgccagcttccaaccctcccgcaccaccagttgatccaagctatggctcttacccaccaccatatggagcagctccttcttatggttcttccgcagctgctgggcctccgcagtacaatggtgggaactacggtggcccgacctaccctcccagctatggctattagtagacaagtgtagcataccaaggatttgcccccccccccccctctttttttccgaataacgacagtgttgggcttgacatccccctgcccctggttgggagtgcagtttttaaaaccacaatttttcaataccagtctgataattgctatgatat

SEQ ID NO: 34325 - DNA, 384 bp, Zea mays
  Clone ID: UC-ZMFLMO17249D02_FLI
aatggaaaaaggaagactcgggttgtgagttgctatgtttgttgggttgagtgatcgaatttttttgtgtgtgctctcaaggagacctctgtgaacttgaataaactccacacggagttgtgccaaattagaccgaggcgtccgtgaacttgaatcagttcctcgggatgttgtgcctgagaataaatcccaccgaggcgtctgtgaacttaattcaattcgtcaggaagctgtgccttagaataaattcgacgggtgtccaattttcttgtcattctagcgagatgcctcatgccctcatgattggaacgaagtgaggcccttgtgtggtcggttgagaaactgggacatgggttgtgagcgctattttcaagtcgtctgatt

SEQ ID NO: 34326 - DNA, 1384 bp, Zea mays
  Clone ID: UC-ZMFLMO17249E03_FLI
gtttattcccttctgcatgcttctgcttctagttgatgtggagggtgtctagtggaagtaatctgtttgattcttgtatcataggaattaatactggttgtagagagcaggatttaacacttgacagcaggagcatcaaaggaatcaaatttaagaagctttcgttaacctgagggctgagacataaatgccgtcaatacggacataaatgccgtcaatgagcatattttctttcttcattatctgctccagagttcaggtgaaagaaaataaatagtaaacaaggtattgttaaaccatcacattcagagattaagtgctgacgatagtgacccagcaacacgtgcctttgaaaaggaggtgattctagattgcatgctgtacgaacttaaggtgcccagtgcacttccctgcccgaatttttttttgtattttagccattttttggaaaaaaattcaggtttagaccttaaaaaattttaatgtcagttttggaccctttgctcggcgtcatagcctatggcgccgagttaacacagctcggcgtcataggctggcgccgaggtacgtgctgcgttggcacaacccggacgagtgtcgtcgacgtggcactgagcttggcgccacagatcttggcgccgagctcggttgtgttatcaacatttttgctggagacataagcacaaagtccatctagcttagttggtagagcataaggcttctaaccttgtgggcgtaggttctcaagccccacagtttgcattttgatttgtttttttgtttatgtcgctggtgtatctgtccaaatttatttctcacctagattttttatctttatcactactcatttttttaaatcatcttcattggattctgatgattctcctggcaggtcagtagtccagaatacaggcactttgttatactatcaaggaacgttcttgcggcttctgtagcaatcaactcaactgtgagcagttgtaaggagccaggctattttgcttttcatatcctaactgacgctcagaacttctatgccatgaaacactggtttgccaggaattcgtataaaaatgcagctatctgtgtcataaactacgaagcaattattttggagaaacttccaaagtatactatccggcagctgtatttgccagaggagttccgtgttctcattaggagcattaagcggcctactgaaaacacaagaatgaaatacctgtcactgttcagcccctcacatttcgttattccagaaatattcaagtatctaaaccttgacgcatccacaacgttggaatatatatgtactcatattcggattatagaatacaggcttatctgtagaaaattaatataaaaataacaaatttgatgtttgtgt

SEQ ID NO: 34327 - DNA, 1762 bp, Zea mays
  Clone ID: UC-ZMFLMO17250C02_FLI
caggatttgtagcgcatgccaggcaggaaagcaagttggagcccatcatccacacaagaacgtcatgacaaccgacaggccactcgagctcctacacatggacctattcggcccgattgcttacataagcatcggcgggagtaagtactgtctagttattgtggatgattattctcgcttcacttgggtattctttttgcaggaaaaatctcaaacccaagagaccttaaagggattcttgagacgggctcaaaatgagttcggcttaaggatcaagaaaattagaagcgacaacgggacggagttcaagaattctcaaattgaaggcttccttgaggaggagggcatcaagcatgagttctcttctccctacacaccacaacaaaatggtgtagtggaaaggaagaatcgaactctattggacatggcaagaaccatgcttgatgagtacaagacttcggatcggttttgggccgaagcggtcaacaccgcttgctacgccatcaaccggttatatcttcaccgaatcctcaagaagacatcatatgaactcctaaccggtaaaaagcccaacatttcatattttagagtttttggtagcaaatgctttattcttgttaaaagaggtagaaaatctaaatttgctcctaaaactgtagaaggctttttacttggttatgactcaaacacaagggcatatagggtctttaacaagtccactggactagttgaagtctcatgtgacgttgtgtttgatgaaactaacggctctcaagtagagcaagttgatcttgatgagataggtgatgaagaggctccatgcatagcgctaaggaacatgtccattggggatgtgtgtcctaaggaatccgaagagcctccaagaacacaagatcaaccatcctcctccacgcaagcatctccaccaactcaaaatgaggatgaagctcaagttgatgaagtagaagatcaagcgaatgagccacctcaagatgacggcaatgatcaagggggagatgcaattgaggaagacaaggaggatgaggaacaaagaccgccacatccaagagtccaccaagcaatccaacgagatcaccccatcgacaccatcctcggcgacatacataaggggtttcgccctattcaccccccctctaggcgactatcagttgcgccggttgaggaggactttgaggacgaccaacaggtaggggagggtgatcaagaagttggtgatgacgaagacaaatttggcagatttcattgtggagggaagatgaaattcatgggaatggacaaattgaggaagaaatttaaaaagaagtcaccacgacaagcaacatgtgtatcgtaagctactcatctgctctacaagaggctcaaacatattggcgatgttgacgagctgttaacactaagaaatcaagagcttgagggggaggttgctaactctgatgagttaagagaggcgaggcttgaggatgagtctgagccatttattctagcagaaaagtatatgacaacaaaagacgagcacatgattgggcatgttggatgcgttcgccaagagtccgtcagttattcgtgtgggcaattctactttcatttttttaggaaagcaagcagctatcctgagattaccattcttacttctgcccttatattaatgtaatttagcaactgtagtattatttggtgatttggaatttaaagagccccgttgaattggttttgacagtattccattgaaagcggtgtatac

SEQ ID NO: 34328 - DNA, 2260 bp, Zea mays
  Clone ID: UC-ZMFLMO17251A07_FLI
acaacaacctaacaagttaagaacagcaagagttcgttgattcagcgctccattcactaaacgggcaaagccttgggcgtcaatcaccttgagctctcccgccgctaccgcaatctaaatcgactcgtgcagcaagccaaacccaccctgatcaatttccaccaaggtgtctgccgctaggatagcgggcgcttcgataaacaccagtcgtcgcaagtcttcctgggcttggttttagaagtggaaaaattttgctcgcttatctaaactgtcccatttgcgatgtttgactttacgagtctgcctaacgagaaatcaaggttttcgggtaattaggcggtgaaattgtctcatttatagtcataaatgggacattgagaattcagataagttataaaatttgatgcctggaagcattggtagataaagctttcagccttaacgaccaaaatttttccgttgctaatactaagctacgtccaacaaaaactgctctaacaaaacaatcgaacacgggaaggaatcttccacttctaactccaataagtctttgtcgcctgtgattagataatcagcctgtcctaccagcgccagcaccaaaaaaggtacatcaaagggatcgctgttgcagtgatttcggccgcaattgatatttatcaagcccaacaattgggtaaatttatttttcctaaagatgcagttgctatttttaccgttgtattactgaatggtattttggggtatgtgcaggaacggggagcggaaaaggccctagcagccctcaaagacctatctacgtccagggtgcgagtcattcgagagggcaaaaccaccgaagtggaatccacggagttagtaccgggagacctgattctgctagaagcaggggttaaagttcccgctgacggtcgtattttagaaggggccaatctccaaattcgtgaagccgctttaacgggggaagcagaagcggtaatgaaacagggagatgtgctgttacccgccgatagtgccttgggcgatcgcctaaatttagtttactccggcacagaagttgtccagggccggggcacagtgatcgtgaccgcaacgggcatgaagacagaattaggaaaaattgcctcagccctgcaatctgtagaaccggaacccactcccctccaaaagcgcatgacccaattgggcaatgtgttagtcagtggttctttgatcttggtggcgatcgtcgttgtggggggaacgctcttcaaaccggatttgtttatgcagttggttgaagtatcccttagtatggctgttgctgtggttcccgaaggactacccgctgtaattaccgtcaccttagccttggggacccaacgcatggccaaacgcaatgcgctgattcgtcaactgagtgcggtggaaaccctcggttccgtaacgaccatctgctctgataaaacgggcactttgacccaaaataagatggtggtgcagtctattattagcgatcatcaatgatttcttcataaatatattcccctaaagattttaagaatttttcgggagaacttttatcaagggaacctactgaaatataaattgcagtatagagtgaatgtttttttagcttattttcaatgattttggcaattgatgtttttccaactctcttttgtccaaagatgattgaagattctaattcgtcagagaaaattttattttcaagctgtctaatttgttctgaacgaccaattaaatcgttttctttagaaatagcctctaaactgtagggtttttccttacttaatttttcccagtttagttctgtattttgtggaagcaactcaccactaaattcttcatggcacctggtcttgtcgcagttataccaatcaactctacccaagataatttcttctagtttttctttgtttttctgcacaagaattttggcttcaaatatccgatgtgtagattctaatggctcgagatttccaatatatattttagggtcataaagcatcaataaactatcatctacatcaagagtaacttcaatatcaaaagcttttcctttgcctatattattcacttgaatttctatatttaatagttggtcttttatgtggagaggatattttttctttatgagttctacacgtattattgttggaacaatatcatctctctttgtataatcttcatcaactaaattaagtagcctcttgaaaaaattaccaatacaagtttcaactaattctgattgtttggaaca

SEQ ID NO: 34329 - DNA, 859 bp, Zea mays
  Clone ID: UC-ZMFLMO17251D04_FLI
tgagcaaaatttactccaccttaatgattcaggaatttatgtttttcctgctcaacctatccattggtcttatcaaattaatacctttaaagctgctcaatctgcctattatggtcgttctgttcaatttggtgggaaaggtgcaaccaaaaactatccgattaactatggtcgtgccaaagaattagcagtaggtagtgagtttctgacttatatcgtgagtcaaaaagagctagatctccacctaatgtaacccagcctgagcgctgtgatttttttcgggttttatttaggctgattcttaccgataaattgatgatggcttgacaagggaaaactaatggtcggtggtggggaacttttgcccccaaggactggacgaagggaaaaagccaattatgtaaagttttgttattgtgggaaaagggtgggatgtatttatatccagcaccaacccgttgtcaggatggcatttattcatggttaacgaccttatttctccgcagtctcaacagatggagcgccaacttacaactgtttggcagtccctgacccccaccagttgtccacggttttataattttcatctccacacccgatgttccgacggccagatgaccccggagggtttgatcgaacaggccatacatcaagaattacagggtttggcgatcacagaccaccattgtgtggcgggttattaccgggcccagcgctggctcaccgaacattgccattatcctagtctccggccccaactttggactggcattgaaattaccgccaatttagacggcactgaagtgcacatcctgggctatgactttgaccctacccacccggtcctagacccctatct

SEQ ID NO: 34330 - DNA, 874 bp, Zea mays
  Clone ID: UC-ZMFLMO17251F04_FLI
aaagcgggaatttcgccacaggtgagcacaaaatcccccagggaaacctcccttgtcaccagttggcagactctttcgtccaccccttcgtaatggccacagatcaacaccaattggtcatagttcgtcaattcccgaaacaaagcctggtccatgggctgtccctggggagtcattaaaatcacttcccgtttggacagtactggcaacgattccaccgccgcaaaaataggctctggtttgatcaccatacccaccccaccgccgtagggttcatcatccacccggcgatgtttatccgtggtgaaatccctggggttaatcaaattaacgctggcgatcgccaagggagattgtttacactcgtaacgccacggaagcgattaatttggtggcctatagctgggggatgaataatctcaaagcaggggatgaaatcattaccaccgtgatggaacatcacagcaatttagtgccttggcaaatggtggcggccaaaaccggggctgtactaaaatttgtccaattagacgagcaagaaagctttgatttagaacattttaaaactctactttctgaaaagactaagttggtcactgttgttcacatttctaacaccttgggctgcgttaacccggcggaagaaattgcccaattagcccaccaagctggggctaaagtgttagttgacgcctgccaaagtgcgcctcattaccctctggacgtacaactaattgattgtgattggttagtggccagtggtcacaaaatgtgcgctcccacgggcattgggttcctttacggcaaagaagaaatcttagaagccatgcctcccttttttggcggcggcgaaatgattgctgaagtctttttt

SEQ ID NO: 34331 - DNA, 463 bp, Zea mays
  Clone ID: UC-ZMFLMO17251G04_FLI
aggagtttaagaggtttaagtttctacagactgaaactgaggtagatggtcgagttttagctgaggcaaaggctcacttaaatcgatgtcttgaagaactacgaaccgaattagaccgatatctagcagaagagtatgagctaggtttatcgaaaaaagaaaaagcttttcaagagtggaaagaaagtcatcagccttttcattggtttgtagagttttacggaattattcattctggtggttttgatgtcattattggcaatccgccttatgtggaatatagcaaaattaagaaggaatacactattaagggatatcaaacagaaagttgtggaaatttatatgcttattctatggaacgagcttccagtatattaaaattatcaggtcatataggctttatcattccagttgcttcagtctgtacggatggttatttacctttgcggaatatcttagtaac

SEQ ID NO: 34332 - DNA, 1624 bp, Zea mays
  Clone ID: UC-ZMFLMO17251H09_FLI
tggaatacagaaatgtggccctggccagcgccattcctgggctacaaatcagtaaggataatccagttcagtccattgaactacctggaggcggcatctatgctccgttcctaacgtctgaccagggtaacgggcaagtgaatcacttcttcgccctcattgatgccaatccaggtcaagtggactatgttcgttttgccaatggcacctatagctttgaagatagtgcctttggcgatcgagatttcaatgatctgcgatttgcggtcaatattttgccccagggaggtttcgttcccccagccattggcctcaccgctaacgcgggagttttcaccgccaatgggctcgttgatctcaaaaatggtggagcaacggcgagaagattttcgccggacttatccactcactcaccgaattcaactaggcattgccctatccggccggtttggtgtggactacatcagagatttgtccgagagcgacactaatggggccttaggaatcggattgtgcattgatagcatcctgaaacttgaccccgaaacattccggggccatgacatcatccttgatgaatgcgagcaattgatatgggaattattagatagttcccggggaaacctgggcaaacataaaccagccatcttggcccgcttccaagaaatattgatcgccgccgctgattcggggggcaagattattttgtctgatgctgatttgtccccggtgactatcaagtatgtccaagacttaatcggtggtaaggcagaatgctatattgtcgttaacacgtttaagccagtgcaggataagcgtaatttgattgtttataattccccggaagatttgcttacttccgctattaatactgttgctaatggtaaaaaaatacagatttgcaccggggcacaaaaagcacagtctatctattcaacaactaacctaggggacttattcaaaatgttattccctgataagtcagtaggggtcttagatgcccatacagtaagcgataagactaaccctgcctatggctgtatggataacttagatagatatttagaagacaaggatattgtcatcacgtccccggtaatagagacgggaatcagcattgataagccctattttgatgaagtctatggattcggacagggaacacaaacagtagagcaattctgccaaggattagaaaggtatcgtcccgatgtggatcccaaccggtttaacgataattaccgccgttacattgaaaagcaattccgtaaacaactgggcttttttggctcccccattcgattattctggcggggtaaaaaagtgagggaaatggagggtagtcgcaaccgggctaccaaagtctaaaacttaaaacagttgacaatttacagggatacctaacaattgtcattgttggatcacaggaatctttaagagcgtgtttggaaagttttattccgccccctaaatttcctcactgaagctccgacaatactgggggactttcactcagttttcccttaaatttggggggtcggggggcttttaaaacactctctaatgtcaccgaagaaagtattgacaaaattaggtattgtccccaattagtcctctaaagctc

SEQ ID NO: 34333 - DNA, 580 bp, Zea mays
  Clone ID: UC-ZMFLMO17252C10_FLI
tgtacagggctggatgaccagttttgtcggcgatcgccagcttacgcgggagaagttgctggggaaactgcggaatttcatggaggtgacggaggacaaaatggattacctggccgccttcattgatatgtccaccaattactacgagcatacgggcattcaaaccttggcccaccgtttaattgagcgtgcggtggcagaaatttaaccccaagctcttatagcttgtttgcaaagttgtattttgccccctaaatcccccaatactgggggacttttaatactttccccccaaacttggggggctaggggggcatttaaaacagactctcataagcaaacccatggccaaaaaactattactggtggggggaggccatagcaatgctttggtgctcaaacattggtgtcgccaccccctggctgatgtggaattaacccttgtcagtgacgttagacaaaccccctattccggtatgttgccggggtatttagctggtttttactcctacggcgaaagtcacattgatttagctcccctctgtgcttcagccggagcaatttttgtgcaagataaggc

SEQ ID NO: 34334 - DNA, 1142 bp, Zea mays
  Clone ID: UC-ZMFLMO17252E01_FLI
accaaatgggactataagcaccaagttttagcagctacccatatgcctccctggcgaatttttctgtgggtaaagttgattgaaattttgctacaaactcgaccgaaagcactatggcgtttattgtttcaaccgaataaagcttcgcgacggggaatgtattggtttaccctgatgggtcgtcgcgttttagtacatgagctgattaattttttctttggcgatcgccgagtgaaaaatgggcccacactacaggaattttggggaatgccacaagaacatcaagaaattcccttgagtatcactcgtaaatagctaaaaacggtcagaatattttttgctcaaccccatcacctctgccataggtaaaatcgaaacccccaaggcgatcggcattttactttttccttgtcactagctttttgtagtcattttttcatttgttgtccctggaccggtagacagtaatcaaaccgacggtggaatccgcactttggagtattccccaaactgatgaattcagcttcgctcacccccatcatcaggtcagcaacaaaagtgtagtccctggccattccatcgtggccgcgccatgggcgatcgccgccggggccgattgtttagttaccccctgtcccctatgccatctgcaactggattcccgtcaaccggaaattggtcaggtattggggcaaccattaaatttaccggtgttacatctgccccaattggtaggtttggccctaggcattgatcccaaggagctgggacttgaccgccatgtggtttctactaccccagtgttagctaagcttggtcttacttaacttatctaacaattagttcaggcaaataaggcttaactcgggtttactgcaagcgactggccatggtgatcagcccctgctgaccgataagaatttcccgtaaaaaggtacagatgaagacccagaggataggagctaggtcaacgccgccgatggggggcactagcttacgcaggggaattaataatggctcggtgggtagggcaatgagcttccatggccatttagtcagctctacctggggataccaagtgagaataatccgaaaaataaataacaccgtcatcactgccagcagaattcctaagccctggc

SEQ ID NO: 34335 - DNA, 990 bp, Zea mays
  Clone ID: UC-ZMFLMO17253B08_FLI
tcaaaggatttggtccgtacctttcaggggttggcctactgcaatagcggcgtcgaaattgtccccatcaatcaggtgggagagaaagggcaaccatggttgaattttgcttctgcccggagtagggaatattacctattagctaggtattgggtaacgaattgctgaatttttactcaagacaacgtaaacaaaaattacgaaaagacctaatttattccgattctgtaaagatccatctcaattttttcctcggaactaaatcccctgccaataatgaaggtatctgcaattatttcttgggtaatttttgccccattattccagtttgattgaatgttgttgaattttagttgaattttaaatataactctgtaaaccagagtgaggtgatctttgctgtgggggcaatagtgttactctatggcgttggccaggccatctggggcatttttcaacaacccacccaaccccaaccgttggatgaagtacaggtggaaacgcctgcgacttaattgctctccaatcctaaaaattgtttaaaaagtcccctggctcaccaagttgggggacaattaactcaaaatttcccagtattgcgacagcttttgggaaaaaaattaggttaataattgccaatatggaaaaaaggcgatcgccgtggaaattaattggtcttggcaacggtttaatgatatttctggggaagcaatgcacgaaatgcttgccctacggcaggaagtgtttgtggtagagcagggatgtttatatctagacgctgacgggttggataaacaatcatggcacctgtttggtcgcaccaatgatcaacaattagtggcctacgcacgactgaattttcccaataccagatacccggaaccatctttcggtcgggtgctcacaagtaaagcaataaggggaatgggcgctggcaggaagattgtcgcagcctgcatccagaaaagcttgcgggagtatccaaactta

SEQ ID NO: 34336 - DNA, 809 bp, Zea mays
  Clone ID: UC-ZMFLMO17253C04_FLI
ccgtttatgtccgttaccaaatcgactgtggtgcccaagtggtgcaattattcgattcttgggccggccaattaagcccccaagattacgacacctttgccctgccctaccagcaaaaagtggtcaaactggtcaaagaaatccatcccgatacaccgttaattctttacatcagcggcagtgccggaattttggaacgcatgggtaaatccggggtggacattgtcagtgtggactggacggtggacatggccgacgcccgccaacgcctgggcaaagagatgaaagtccaaggcaatatggaccccggcgtactatttggttcccaggacttcatcaaagaacggattttagacacggtgcggaaagcagggcagggggggcatattttcaacctcggccacggtgttttggtgggcaccccggaagataacgtccgcttcttctttgaaacagctaagcaagtggatcgtaagttttcccaagaatccaagcatattgaatatgcagctgtccgctttaaagatgattacagaatattatgtaattcgaaagaaaatgcaaaaaaattgcttgacattctttcccatcaactctctcaatataatctctcattgaacgaaagtaaaacatcgtttctcaatcttcccgatgggctttatcgagaacataatcgagcatattttcctcatgtattgcgaagaaagaaatatatttcttttagaaaatttgaacataccttgctaattgcattagatattcatcgaaagcaccctggtactagcattattgaaaaatttattgcagag

SEQ ID NO: 34337 - DNA, 1545 bp, Zea mays
  Clone ID: UC-ZMFLMO17253C07_FLI
agaccatttaggtacattagtctaaatgcggccaattcccccgcgccctggccagtcccccagagtaataggtacaggcagagccaacctagggttaattgcaatgaccgacgacttaaacggcgacgttgacggtgatgctgattgtcgccccagttaggttggtctggttggcgtaactgccagagggacggtaatatgcccactacgggaagcaggtataaacaaagttgtaggcgcattagtttcgtgtcggcaaaacgctcttcgttcactctgattttccatcctgcttatgatcccagcttgaccagcgctgattttcccattaaccctaaccttgctgaatttgtccatggcctctacccccaattccgtaactctctacaccgatggtgcctgctccatgaatcctggccctggtggctatggcgcagtgattctctacggtgatggtcgtcgggaggaattgtccgccggttataaaatgaccaccaataatcgcatggaaattatgggggcgatcgccgccttgagtcatttacaagaaccgtcccaagtgttgctctataccgattcccgctatatggtcgatgccatgagcaagggttgggccaagaaatggaaagccaacggatggcaaaggaatgccaaggaaaaggccaaaaaccccgacctgtgggaaacgatgttaacgctgtgcgaaaaacatcaagttacattccagtgggtcaaagcccacgctggcaataaggaaaatgagcggtgcgatcgccgaattgctcaaggaatccggagccaccgatatttggatttgcgactccaagggcattgtgggcaaacatcgcaccgatttaaacagcaaaaaacagagctttgcggtggatgcggaagggactttagccgatgctatggctggagctgatgtgtttttaggggtgagtgcgccgggggtagtgaccaaggaaatggtgcaatccatggccaaggacccgattgtgtttgccatggccaaccctatccccgaaattcagccggaattaatccaagaggatgcggcggttattgccacggggcgcagtgattaccccaaccaaattaacaatgtgcttgcctttccgggggttttccggggagccattgactgtagagctagcattattaccaccaccatgtgcatcgaagcggccaaggcgatcgcctctttggtgcacagcaacaccctagatagtgagcatattattccttcggtttttgacaatcgggtcgccactaccgtagccagtgcagtgcagttggccgcccgcaatgaaggggtggccggtcaatagttaatcgggaattgttaaacctttactggtcaaccattcctgattgtaaagacgggattggtaacgggctcctccgtcacaaagtacggtaacaatggtatgccccggcccaagttttttggccaattggtaagccgctcccacattaatgcccacggaaccgcccataaataggccatcccgccgcagaagttggtacaccacccgcaacgct

SEQ ID NO: 34338 - DNA, 1334 bp, Zea mays
  Clone ID: UC-ZMFLMO17253D11_FLI
aggcatttacgcccgcttgcccttttcctggcattttcttaatccttaaccatttttttgtgggctaaaaccatggcaaatcagaattttccagcccaaaatcatccccaaacggtggtcatagtgggggcatccgggggcattggtttaggctttgtccgttactttttagaacaagtacctttccccgtcaaaatttgggccacctaccgtcaggcgatcgccgagttagaccatttagccaaggaaaatcctgatcgtttaaccctagtgccgttggatatcactgaagagagccagattgcacaatttagccagcaattaggcaaaactgaagtcaattggctaattaattgtgtgggcattctccatgtagaagataacccaccggaaaaaagtctgcgccatttacaaccatcccaattacagcaatattttgccgttaacagcattggcccagtgttgttagccaaacattttttaccccatttgcgccatgcttcccccagtgtttttgccaccatttccgctaaagtgggcagtattggggataaccagttgggaggatggtacggttatcgagcttctaaggcggcgctgaatatgttgctcaaaaatacggcgatcagtattcgaggcatgctcaggggctaaaactaaaggaaaaaaacgattttaaaggggcaacctattataaaggctttcacagtcccagggcctgaaaattagcgccctgtttcccgcggcatttttatagtaattatagacttgcgagcatcatgaccaagaaaaactccatctaaaacatgggtaatcttgtgctgaagctaactatatttttttaaaaatgactaaagtaatgtcatcaaaaacccggctgtcaccaatataagccattaaatcctccaccactgcttgactaatttccaaggctgttgactggtggttggcaatgagcacctcttgaaatcttgccaaaccataaaattgtttttccccgttttctgcttcgggaataccatcggtgtatagcaccaccacatcccctgaatgtaaattaatttgggtgcgggcaataaaggtcgtaatatctttctccaaagcaaggggaaagcctaaatcaatggtatctatttcttctatggcgccatcagcacgaaccacaaaaatggattcatgttggccactaaggattaattcccccgattgataatctaacatcaccagggtcatatttttactcagttccatccgttgggtatttttgtagagaacctgattgagtaaattgtggaattgcactgcttccgtaatttctgccgttagcagagttt

SEQ ID NO: 34339 - DNA, 641 bp, Zea mays
  Clone ID: UC-ZMFLMO17253E04_FLI
cccgaaaaaattagccgggcccgctttgtggtggccattagttcctacggcaaaagtcaactttaccgctggtgtagcttggcagattggcccaaaattcaagtagtccattgtgcattggcggcggattatctccaacaagaaatcaccccggtaccagaggttccgcaactagtctgtgtaggccgactgtgtgaacaaaaagggcaattgcttttagtacaagcagtgcgacaattacgggataacggtattgcggtaaagctggttttagtgggggatggggaactgcgatcgcccattgaagaattaattgagcaatatcaactcgaagaaaacattactattactggctgggccagtagtgccatggtgcagcaacatttattagcttcccgggccatggttttgccgagtttcgccgaaggtttaccggtggtaattatggaagcctttgccctgggtcgtccggtgatcagcacctatgtggccggcataccggaactggtcaaaccgggggtttccggctggcttgtgcccccaggctccattcctgatttagtagaagcaatgcagtctgttttaactatgtcttgtgaacaacttaccgccatggccgcaatgggtcagcaagcggtgca

SEQ ID NO: 34340 - DNA, 767 bp, Zea mays
  Clone ID: UC-ZMFLMO17253F03_FLI
ggtgagcaagttggtggaggtggccatcattgatttccatggcgaccaggagctaccgggggaaaaggtttaccacatcaatatgaccagcaactctggcattaatcccctagtaattaacctcgaccaggaagggggcggccccaatctgcgggccattgagctggccatgctattcgccaaaaccctacggttgggcagtaatcaacagggcaaactactagatgcgttcaaacattgctatttccgtcggggcatctcccaggaatccccccagagttggttgaaagtaccccctaacttttctgacttggaagctttgctggaggaaatggccgaggaagacaaggaagcggaaaagctgagactaaagctatccaccatgtttgagtacggcattttcaacaaaacccagcccccctatgaaaggttaacccgttggaatcttgccaaacttcccccccaattgcaggcgatcgccggggatgctttagcgtcccagttgatgagtcaccaccgtttactaggggaatcgactctcaggacggttttgttcattgatgaagctaaggagttgggccattccaaagcgttggacagaattgcggcggacggcagaaagtatgggctgggcctgtgggtggcttcccagtcttcccgccatatttccaaggatgtgctaaccaatacgttcactaagctgattctgccggttgattcttccgagttacccctaactgcccgcacctttaggttttccgaggagg

SEQ ID NO: 34341 - DNA, 573 bp, Zea mays
  Clone ID: UC-ZMFLMO17253F09_FLI
ccaaagtaccaccagccattaacaaattagctgagtttgggggacagctccagtccgtatttcagcaggggcaacaaatccaagcatcccaagcttcagcttcttctaacatgtctccagagtattatcagcggatgtctgacatctaccgcatgggtcatgaaactagcatgggaattttgaacaatatacgctctgatggtgaatggcattacaactatagtaccggcagagatgaataccagtattactaaaggtggataaaccagtccccagcagtaaatttttgccgagcatcaagttttgatagcgctcaggaaataccttggccatagaactcgttggacgtccttccactagatgaggtcattccatagaaagtgcttgaagagttttaggcaagcctttgaaggatgagatggcgttgccaacatcccacggggttagctagcagagcgtcagagaaaactcactacttcaacaccaaaggaaaaaccctcaaccttgcttgcggggaatttggggaatttaatgatggttgccccttgtgtgccgcttggagtttatctgtca

SEQ ID NO: 34342 - DNA, 894 bp, Zea mays
  Clone ID: UC-ZMFLMO17253F10_FLI
tgacactggtattcagcaccgtgatggtttccctaattggccagggtttgagtttgccttgggtggtgaaaaaattgcaactaagcaaaccttctccattggctcaaaaaattgccatgctccagttgaatttggtcacagctaaggccgcccaaggagagttaaaatatttgttagaagcgggaagtttacctaagtttttatatgaagaactattcgccgattatcaagctcgtattgccaactctgagcaagaattaagagaattttataaccagagaaatttaattttttccgagggcgaagtggaaaagaaatacattgatggcctatatcggcgtctctacatagcagaaaaaagtgccattaatgatgccttagcaaagggtatattagccgatgacatcagtgatgaatatttacaggtgttgaatgaaaaacttttagccctgcaggatgactgacgaacttaacggcagaggtaaccacaatttagttcgcttttaaaatttctcctgactctccaatttttggggaaactaaataaaatttctcccccatgatcggatttctaacggctcggttttagggacaagctaaaactcgaccaacaggctcttaggcactgatgtatagtggaaaaaggtaagtgctatgggagctgaatgttaatgaattttttagtaatttgtcaaaaatttttcacccccaatctattcccatggaaggcgatcgccagggtccagagggaaaagccccagtcccttggccgatggcagttcgtagtccggactggcattctagttgctacttttatcctcgctttggggagcctcgcaagccctagcctagccctagactataaccggggtaacttagtgggggcagattttt

SEQ ID NO: 34343 - DNA, 1581 bp, Zea mays
  Clone ID: UC-ZMFLMO17255A02_FLI
caatagccgcacttactccaccggggccggccacaatgtcacagccaaacaaaggtagaccgtataaaggctcaggaaacattacacagtggagaatatccaaccctttgcccaccttggccaactccaaatgcattttgcgaaactggggcgtttggtagcaccgattttcaatcactaacttttccccttccaggcggccttctacgtagcccaaatcctccggcaattgatagggcttgaggggtaaactttgccaactagcggcgatcgccagggccaactgttgaatcatcgggttcaacgtaggcatcagggaagaattggtcaaacttaaatcagtgacggccatggtaaatactcaaatctagggcaaagcaatgggaataatgggctggaaattaagctaaaacctacgttggactaccgcctccttcttccgttgacagttccaaacaatagcctgccccatacaccgttttaataaagcgaggtcgacggggattcggttccaacttagtgcggaggtgacgaatgtgcacccggatggtttcaatgtcatcatctggttcgtagccccatacttcccgcaaaatatcactgggggaaaccgtttgcccatggcgctgcaacagacagtgaagcaactcaaactccaaatgggtcagcttgatacttttaccaaaccaaatagcttcaaacctttcgggcactagggttaggggtccctggttaagaatttctgaatgttttgccgcctgggggatgcgatctggcagaggctaatttcagtcgggcagatttgagtggggccgattttcgcaaagccaactttgaccatgccaatttgtataaggtgaatctaagtcaagcccaattacgtcatggcacagtggaggaggcttttctgcagggagcagacctcagtcaagctaatttgaaaggagcgaatttaggcagggcattgatgaaggaagttaacctcagtttgattaatctatcggaaattcatcttaaagctctccccaacaaggagcagattaactgtgccggttgcgccctgcggggcactattttccagggagctaatttccagaatgctaattttgagtatgctttgatggaaaaagctttattggccggggccatactccggggcgccaatttaatcgatgcctgtttacggggggcagacctacgtaatgtcaattttcaaaatagtcacattagcggcataaacttggcaaaaacaattatgcccgatgggagtgtacatccctgatgagaatgctatcggtgtttggggcgatcggaggggtgatggtattggccagtggtgctctgatggcgatcggcaatccgggcaagcctgactatgaagactacgcagtggaaaccctcagtacctatctaaaaaccgagatttgtcccaaagcgcctgcggattttggcggcttcgtgcagagttattgcaaaaccttggtggatgcaggacaaccacaaattaaacaaatcatcgcccaaactactaatcagcaaaattttttgttgtttagtatttaccaaaccacattatctctg

SEQ ID NO: 34344 - DNA, 530 bp, Zea mays
  Clone ID: UC-ZMFLMO17255B02_FLI
ataatgtcaggtttaggagggcgcatattagaatcttctgccagagctgctggtgaaaacggacttcagcttctgggtacactgtccaaaccattctcccgtgctgaacttttagagttgttggcaaaggatacccatgaaactctttcaatccagagctccccaatttctcctgtttccgataggcaaatcggcgatgcgctaaaagcagaagcttttgttgctcactttcagcccaaaatttcctgcctgactggtggactggtgggattcgaatgtctagctcgctggcctcaaccggacggtagcatgatacctccagatcagtttatctgtttcgctgagcaaaaagggctaattgatgcgctgacccggcaagtttatgattacgcattggccaacttgcccctatgtaaccttagaaatcaactgaaatacgctttgaacctttcaccaattaacttaaaggatgcaacttttccacactggctacggaataaatgctgtgagcacaatgtcaagccatcaca

SEQ ID NO: 34345 - DNA, 1728 bp, Zea mays
  Clone ID: UC-ZMFLMO17255E11_FLI
ccgggcgggtggggtccgcctttgcggcggaaattggcaccatgcgggtaacagaacaattggatgctctgtatatgctcaggacagatccgattgattatttggtcgttccccgggtgatcgcctgtggattaatgttaccgattttgaccggattgtctctgtttgtgggcatggcgggaggattggtaatttcctccagtctttatgccattaatccaaccatttttttaaactctgtgcaaaatttcacccagctatgggatgtatttgcttgtttgttcaaatctttggtatttggcgtcatcatcgccattattggttgtagttggggcttaaccaccactgggggggccaagggagtaggcgagtccaccaccactgcagtggtcacgtccctattggccattttcatcagcaactttttcctatcttggttaatgtttcaggggacgggggataccgccctaggctagagggctatggcattgaccttggttatgggagccatagcatctccgtgggtttctgtggggacaaagctctgctacagtcggttaaacgaatctttctatccctctaatcccctaacagcacccaatcccatgaatattttcggcattggcttacccgaactaggtttaatctttgttattgccctattggtgtttggccctaaaaaattaccagaagtggggcgcagtttgggcaaagctctgcggggattccaggaagcttccaaggaatttgaaacggaactgaaacgggaagcccaaaatttggaaaagtcagtacaaattaaggcagaactagaagaaagtaaaaccccagagagtagcagtagctcagaaaaggccagctaacccctccttggcgatctcgaggccagggtagtggttatatccgactgcactattgtgaaaaacagacccgctccggcaaaaaatcctacgagcagtactactatcactacgaactggaggtaaaggggaaacgggtaaaacgctctgcctatatcccgaaggataagcttgatgtggtggaggaatgggatagaaagaaagtggatgtagtcctcattctgcaatatcttggcaaggcgacggactaattaaacccaacaacggcgatcgattaatcccgtccggcgagttggtgcggatttgttagttaacccctagtaatttttgttgactcttggtcttatgccgacagctatgtaggcttttaatcaagaatgaacgaaatcaagaaataaagaaaagttggagtaggttaaatcgaaattcctggaaagcttgtttttcggggaaataacctgctcaagactaactaacgaaataacgaaagcaagacttaaagcaaagatagaaacttggcagaaagaacgaattaacgaaaaaaagaaatatattagtgaggtcactctagactttccccatgctcaaaacggcctatattgtctgcggcagtcccggtgccggcaaaaccttctatggcaaagaactagccaaactgaagcaagctattttccttgatattgatacagcaacagaacgccttgtccggttagccctccaactatcaggtcaagatcctaatgatcgtgacagtctctatttcaagagcaattttcggaatccaatctacgagcagttatttgacattgcccaagataatttgctttggaacgatgtggtcataacagggccttttaccaaagaaatc

SEQ ID NO: 34346 - DNA, 590 bp, Zea mays
  Clone ID: UC-ZMFLMO17255F07_FLI
ttgagatagaccccatcaccaaggaagtcttggcaacgccgatcgccgatgccctggggcgaaaatttacccgctttggacatcaagccaaggaagacaggcaggccgccattttccggtctgagaatgggaacgtatggcaggtaaaaatctttggtgaagacaagacgggcaagcggtcagggcagtatctagcaccgacaggcataggggacgtgccctatctgccaacaattccccgccggatcattttggcgatcgccgaaaagcatggggtcaaaccaccggaagatggtcaagatttttggccctggtttgtggatcatcctgagattcccttgattgtgacggaaggggggaagaaagctttagccgccatcagccaaggttacgtggccctgagtctctatggctgtttatgtggcaacgatggtctaaccatcaaaccgtcattattgccctatgtgcaggggcgagaagtagcgatcgcctatgaccaggatgcaaagggtagcaagggacgaaaggcagtctttaagggcacaaaacggctggctcgtaacctgacctatcacgctaaggcaacggtc

SEQ ID NO: 34347 - DNA, 568 bp, Zea mays
  Clone ID: UC-ZMFLMO17255G09_FLI
aggtttttgggcaggttccagcggtttaccccccaggaatagttaagctttaccattgggcagggtctcagcaaagagaagaaaattccccccaaacctaagcattgtgtcagagtggaaagagacatagagcaaaccctatccgttttcctccatgacccccagcctattgcctccccgcctcaatctgccccatgttgaagtgttgcctaatggtttgaccattattgcggagcagatgccggtggaagccatatcttttcagctctggttgagggtgggttctcgctgggagggagatgaaattaacggtactgctcactttttagaacatatggtgtttaaaggtactccccgcctggccatgggggaatttgagcgggccattgaatcaaggggggcgggcaccaatgcggccaccagccaggattacacccagttttacttcacctctgcgccccaggattttgagcatttggcccctttacagctggatgtggtgctcaatcccaccattgccgatggaccctttgaacgggaacggttagtggtgctagaggaaattcgg

SEQ ID NO: 34348 - DNA, 1590 bp, Zea mays
  Clone ID: UC-ZMFLMO17255H06_FLI
gaagtggaaaatttactctaccattgcctgggctatcgcaaatcttactgtaagcatactagtacagattttgaccatgcccacaatttggtcacttatctagaaaaagttgaccccaatgctgaagctttgaaatacgctccgggcattgaagcattgctaggaacctatcgctctctggattggttacccaaattatctaaattttctccccttaactccatgctaacggctcgcaaactaactaaacaatgggagcaggaacaccaacagtcttggcctgaagatagacttttttctccccattactcaatttttaacgataatcgccacgaacaacattctttcctttggtttacggatattaccgcttctaaaaaataattatgtttaacagaatcaaagataaactcaaattcaaattagcaaaagtccttgctccagaaattgataaaaagctagcagtggaggaaaaactgtcctccgtacaattttttggcattgccccttggtaccaggaaaacctttgggaaccgccagtgcaaatagtattacgagatcaaaatagtcaccgacggggagtagcaatcaccattctatcaaaacaggaattaaaccgagaggttaaccagggacttttgctcgtggtgggttcgttcattattgggatagtagtaattctcctgcttttagggttattaattagatatgcggtgttgctccctttggggaaactgcaccgggccttaattaactatgacaatactgagcagtttaatttgccccctctaccgagcaatgaaattggttttttgggccaaaccctggtgcagaccttcaatcaattgcagatttatcaacgagaagccctagaaattgccgaaagaaaatatgtggaaattgcccaacgctatgaattagcttcccaggccacaagggtatgggtgtgggaatgtcagcctaaaatacactactttgaagtggaccccaatttgattacttggcttggctttgagcaaccccttgaaccggcagatggggattttttcattcaccttggcgatcgcccaatgttttggcaggccattgagcaaagcttggaagatcccaccatggaactatccacagaactccgtttggaagcggccaatggggaaatttatcattgtttgttgcgggggcaaatccatcaggaacaaggggaggcatttgtgaaaattatcggtacgatcgccgatattacggagattaaaaaagcagaagaacaactaaaactttccaacaaaattttagccaaagccactcaactcaaagacgaatttctggccaatatgagccacgaattacgcactcccctcaactccattttgggcatgatagagactctacaaaaccaagtttatggtcccctcaacggtaaacaagtccagtcgttagaaatagtagaaaatagtggccgacacttactttcattaattaatgatattcttgacctttctaaaattgaagcgggcagaatggatttggatttaaaccccaccagcgtgtcagcattggtcaatcatagtttaacttttgtccaacaatttg

SEQ ID NO: 34349 - DNA, 718 bp, Zea mays
  Clone ID: UC-ZMFLMO17255H10_FLI
gggcccggggatcggcgcattaccggactttctgggtaactgattcccattatttaacagcaaccgggccggcgatcgccatatttaccaacccgaccaaacaaggctatgacgacggactgggcgaaaaaatcattggcacgtttggcaactgtgctgggggaacaaccccctgggggacagtgttaagcgcagaggaaaatttccaaagccaggttccagaagcagtctatgccgatggctccgccgtagatccggcccaatgtccgcttaaaataagtaccaacgggttgagtggccaaggcaatgtgtttggcttggcgggcaataaatatggctggatggtagaaattgacccggccaatgccaacgattacggcgtcaaacatacggcccttggacgctttcgccatgaagctgtggcggtgcgggcaacagcgaatcaacccttggcggtgtattcgggctgtgatcgcactagtgggcatctctacaaatttgtgtcagcagatactgtcaaatcccccaccgataaaggcaattcccgtttatttactgccggaacgctctatggggcgaaatttaacgccgatggtaccggggaatggattgccttaacccctgataccgtagtaaatcctgttcgtcctagcgatattgctgttgatagttctactaccggaattgtctatttgccccatccagaccggaaccaggc

SEQ ID NO: 34350 - DNA, 372 bp, Zea mays
  Clone ID: UC-ZMFLMO17256B01_FLI
accgaccacagccaggccattaccctaaacccccaattggccgaagcctacaaagctagggggaaaatttattggcaattaggagagcaagcccaagccattgctgacctagaagcggccctagcccttttctctgaccaggaaaatcttgtgagccaacgggaagcctgggaacaactgcaaacatggcatggtaatccttaagagcctgtttggaaagttttattccgccccctaaatcgacccactaaagctccggcaatactggaggactttcactcatttccccccaaatttggagggccaggggggcttttcaaacacgttcttaaataggccccaatatttcttctcaacttctccgacagtttc

SEQ ID NO: 34351 - DNA, 469 bp, Zea mays
  Clone ID: UC-ZMFLMO17256C06_FLI
aggattctttgttaggtcaggattgggaaacggcaacggatacagaggacagctttgatgaggatcggctaacccccggtgcagaattcaaacaacgggcagttgcaatttatgagctttaccaaaatcagtaccagcggcgatttaagtggattcgtcctgatttatttacgccggaactggctgataatctagaacaggatgcgaaatctttaatcaatatcctgaaaatttcaggccgttggaatgcggatgaagatggcaaactgcaatctttaattcgtttactaactgaagaacatccagacgagaaaattttgatttttacgcaatttgcggatacagcgagatatttggctcaggctttagaaacggcagggattaccaatattggtttggcaacgggaaattctcagatagacccaacgatacttgcccagcgttttagtccgaggagtaatggtaaggc

SEQ ID NO: 34352 - DNA, 1012 bp, Zea mays
  Clone ID: UC-ZMFLMO17256F05_FLI
gccttgggtactccctgtgtggcaacggatgtgacgggcattcccgaaattattcagcaccaggaaacgggattgctggtggcccaaaatgacccggaacagttagccaaagcgctccaaaccatcttgaaccaagcagatttacgtcatcgttacgcccagcaggcccgccaacgattagaacaggcttttgacctgcgacgcaatagcgcccaactccgtgacttatttcatttaggggaggccaaacgatgaagattgcttacatctgtgtcgatcccggcattccagtctttggttgtaaaggtgcctcaatccatgtgcaagagattatccgcgcttttcagaaccagggggcaacggtgaccctgtttgcggcaaagctggggggggaaccgcccaaggatttagtcgatttacccgttcactgcctgcccaaggtgcccaaaggagatttagcaatgcgggaacagggcttatttcaacaaaatcagacgttgcaaaatttattaacccaggcagctccctatgatctgcgaggagccatggtcaccaatgccaccctcaaccgagctaatttgacttcggctaactttgcctttgctaaactctacgacgtggatgtgaccggtgccaccgttgagggtatgaacatccaaaatgcggaaatttacaacacgggcattggtattggcggcggcgacgattgatggccttgactggagttgggcgaggaaaaggcgatcgccatggctcaatggttaacggccatgttcctgtctttcctgttcaatttccattctgatttccgattccagttctttaccaagaaaatagtttaaaaaagtcctgattacagcgattagccctagtttgctcaagctttctagggtaggggcgatggtggtggaaaggatatctgcccccaattggaattccagggctagagccaaccacaaaccgaattgcaagcgaatactgttgaaaaatttgggcgtattcatagtacggc

SEQ ID NO: 34353 - DNA, 562 bp, Zea mays
  Clone ID: UC-ZMFLMO17256F06_FLI
tctaaatcggagcaattcctcttgagtagctttacctacagcgtcattacttaaaccccaccatctaccaaaaccattaatttgtttttgataaattttttctagactttcaatcatgcgatcgcgcaaatcttgagtaacagctaaattatctttagactcacttctagaaccgccataaaccatttggtataacattccctgtgcttgtaattctccccatattttttgatactgtttaaattcctgtggtgcattaaatgctgtttcaatgactgtgcttaattccaatctatcaattgaagagtcctcttctaattcctctttaagactagctattacccattgggtttgggatggaattaagacataagcttgatactgttgaaagcctccatgacgacctaaacgccctaatctttgaataaccgttgcggaatcactactttcacaaatgagtacatgaattttaaaatcaacacctacatccactgccgatgttgcaacgactaggacagatttttctgacttctgcaaataagtttgggtttgctgacgttct

SEQ ID NO: 34354 - DNA, 772 bp, Zea mays
  Clone ID: UC-ZMFLMO17256G01_FLI
ttgaggatagtgctcgagtagcattacagactttagaagagcccatcaaggatttaattccggttcaaaggcaaggtattaacgaagatgatttccttaaccagtttagtaattccctaaaagtaaagggcttagactttcatgaacgtatcgttaaagcctttcatacttctctaaaagtacaagatatttcggcattagtaattttagccggaattagcggtacaggaaaaagtgaattaccccaaaaatatgcggatttcattggtgctccactcgtcatgttgccggtacaaccccgttgggattctccccaagatttacagggtttttataattatattgaaaaaaagtataagccaactcaattaatgcattatctctatcaatatcagcaggatagaaaaatgcatggcagaatcatcatggtgctacttgatgagatgaatctagctcgggttgagtattattttagtgatttcctttctaaactcgaaacacgacgtagtaagccaacctatttatcattggacgtaggtagtttaaaacttcctgagaaacaacgagatattctgattcccgaagaattcctgtttattggcaccatgaatgaagatgaaaccactcaatccttatccgataaagtgttagaccgagccaatgtcttaacttttggtcgtccaaatgaattgaaattacggggaagaaaaatcaagtatgaaaaagcagaaaattatttaccttggaatgaatttgtaaagtggactaaaga

SEQ ID NO: 34355 - DNA, 909 bp, Zea mays
  Clone ID: UC-ZMFLMO17256G08_FLI
aaaatggacaaaagaatgttcacccaaatggctcgacgagaaatatacaaagttttacgaactagtcgctctgatttttctttatccatttgctgggcatagttttggtattgattagggttttccataattagtagtttaaaaccgctttgacaaaatactatagttgttaaacttcttttttctctttatattacaaggtaatagaaaaatatttattaacttttatttctaaatagaactttagcaaaaatgtttaatgactagtatttacctgacagaacccggaaccaaggtcagttatcacaatcagcaactacagatcaaacaaaaatcccggcaggtcattacccgcttagcggagatcgacttgctagtgctctttcccggcgtgcagttaaccgatgtggcgatcgccgttttgatggatcagggcattgaaaccatttttttgcggcgggatggtcaatttcggggccgtttacaggggcagtttgccaccaatcccctcacccgcattgcccaatatcgggtgctggactccacgtttggcacagccttagcccaacggttaattttaggtaaggtgaccaatcaacgggccatcctccaacgtcgtcaccgagacacggggaaaaaaaataatgccctggcggaggcgatcgacctgattggggcctatcgtttatcattgcgctccggtcttggtaattcttcccgagatcaattaatgggcattgagggcatttgtgctaaacattactatcaggtttttcaattttgcctaccggaaggctggtcttttacggggcggaatcgtcgtccccccaaagatcccgtgaatgcgttactcagttggggctatggagtgctactggctcgggtattttctgccatcgtccaggcagg

SEQ ID NO: 34356 - DNA, 952 bp, Zea mays
  Clone ID: UC-ZMFLMO17256G12_FLI
gcccctaacctagaagaaattcggcaactgttgcataaaggggaacaaaccgtaaataccatcatttcctttggtcaatttttggatattctgcccatccgagcttccaaaggctatgctgtgcgttggttgagccaacagtggaatattcccctggagcacgttttcaccgccggaggatcgggagccgacgaagatatgatgcggggtaacaccctttccgtcgtcgtggctaaccgtcaccatgaggaactttctaatctaggggagatcgaaccgatttatttttccgaaaaacgttacgccgccggtattctggacggtctggcccattaccgcttctttgagttgttagaccccgtttaaccagccgaaatcatcgagaacagttaaaaatagcttaaaaatggctatctacctcaaacttcggtaatccctggcgatagctttttaattccccactccgggggccataaactccttcaatctgttcttcacagcaatggctagcaaattcgtcgaactccgccggagcaatgccaaacatccgggcaaagttatctggtttcacccggcaaaaactgggcctatcttcgtaaatctggcagaggcgatcgccatctattaatagcgtttctccttgaagtgccaaataggccgagagatgaactgctgttgtggttttgcctaccccgcctttaaaactggcaacggtaataatcatacttagttgtttgaaagtttaaataattaacgattcagcagtttgataagctagttatgtgagtacgcattctaagaccttatcctgtctaggttttgttccttgattatttgcgtatgcatatcattgacaatgtaccatggtgcccggctgtattttgtcctctaattttttactaggggtttcaagttatgactaaaaaattactaggggtttaagatgaaaggc

SEQ ID NO: 34357 - DNA, 952 bp, Zea mays
  Clone ID: UC-ZMFLMO17256H02_FLI
agtcttgcagaatcctgactatctcacgctacaaaccaccgctactctcgttggtgcattacaaactctggcacttttgacagtcattatcgtgtctaccctcaaaccctggggcaagcgaagggcagtgcaatcctcgacaaaatagatgtttcagtaaccagctcagagcatttcaagaagttcagtctcctattgtgcaatatacttgaattacagacaaagataaccgtacttttcatggcgatcgccaatcccctctcccgaaaaacggcatgttactaatatatattttatatatttccaatactcttttcttgataagctgatcaagacacgtttgagatgacccatctggccgattatctgcggggaaatcctcaccaacaggtttgtcgtccttcccagtctagttggggctataaaggtttccatgaatattggcttaacgataccaatgcttggatttatccccatttgcataaagctgctgagcgcatgattgaattaagccatcgggaagcggtggatgaactagaagaaaaagcattgaaccaggccgcccgggaattgctgttggcccaatcctccgactgggcatttattatgcggacaggaactatggtgccctatgcggtgcgtcgtacccgttcccatctgttgcgcttcgataaactgtttgatgatattcgagccaataaagtggatgcgggttggctagaaaaggttgaagttatggacaatattttccccaagattgactatcgagtttaccgtcctctgtaaaaatgtggactccctggcattatctcggtgggaaattgtggcggttactagttttattggttgccctattggttgttctgacaacggttttccttgggcagaattcctcagcttctcctaacaaaattcgaggagtttggttaaccaatgtggacagtaatgttct

SEQ ID NO: 34358 - DNA, 270 bp, Zea mays
  Clone ID: UC-ZMFLMO17256H12_FLI
cggtgacccggattatcatttccgcttcccaaacccccaaacaatggcgggggcgaatttaccccggtgcttcctaaagattgcttaacttagttggggaaaattagcctggcctgaaactttgctaacccatctgagagttttggcccggtcaaaaattaccccctgattccccgttgtattggttagattaactgctgatttttatggatgccactgcccccattctccaagccctagaaaaattaattgccgtagtggcccaactgc

SEQ ID NO: 34359 - DNA, 1459 bp, Zea mays
  Clone ID: UC-ZMFLMO17257A06_FLI
ctgaacagggtgactgctcaaagttcaagggaaacaccccccattgctgcaagaaagatccaacaattgttgatttacttccaggcactccatacaacatgcaaattgccaattgctgcaaggcaggagttataaatacctttaaccaggacccagcaaatgctgcttcctctttccagatcagtgttggtcttgctggaactaccaataaaactgttaaggtgccgaagaacttcactcttaagactccaggccctgggtacacatgtgggcgtgctattgttggcaggccaacaaagtttttcactgcggatgggcgcagggtaacccaagctctaatgacatggaatgtgacctgcacatattcccaatttcttgctcagaagactccgtcctgctgtgtatctctctcatcattttataatgacacaattgtgaactgcccgacatgctcatgtggctgccagaacccaagtgggtcaaactgtgtgaacgaggattcacctaatctacaagccgcaattgatggtcctggtaaatggaccggccagcctcttgtacaatgcacttctcacatgtgcccaataagaatccactggcatgtgaagctcaactacaaggaatactggagagtgaaaatcactatcacgaacttcaacttccgcatgaattacacacagtggaacttagtcgctcagcatccaaattttgataatatcactcagttgttcagcttcaactacaaaccacttactccatatgggggtggcataaatgatacggcaatgttctggggtgtaaaattctacaatgatttgctgatgcaagccggcaaacttgggaatgtgcaatcagaactgcttctccgcaaggactcacggactttcaccttcgaaaagggatgggccttcccacgccgagtgtacttcaatggtgataattgtgtcatgccatctcctgaaaattatccatggctgccgaatgcaagccctctaacaaaacaaccattgacactcccactcttgatattctgggttgccttggctgctctgttggcttatgcatgatgagtgggatcaagatgtttagcaagcttcaagttgatgtcggattccatgaggtgcactgcaacgggatatttattcattcaattccatagcggcacaggagagatgaggcgaagccaagaaaaagtcgatgtgtgtgtgtgtgtgtgtgtttgtaagttaaagggccaaaatgtatttcttgtttggtatatagcatctctacaacactttggtgaacttagttactgcaaattaggtaattacagttgcaccttttgtattttatagcaaacccagacttctatttgattctatgactgcccctcttgtagtaaatgcaaggcttcactggtactcctgtttaaagattggtcaaatagaagagacgacggtgattgtctgattgagat

SEQ ID NO: 34360 - DNA, 447 bp, Zea mays
  Clone ID: UC-ZMFLMO17257B11_FLI
gcaacggtgcccccaccttctctgatcaaacagtcgaagagatcatgaagatcgtagaggaggcccgcacgccgccccagtcgcctgctccagtggctggttttggttgggcagaggaagaagagcaggaagatgggaagaaacctgaggatgacgagcaggatggggaggatgagcaatacgacggcgaggacgagtatgacaaacaggtgaagcaagtacatgccagcggggactttcgacacctaataaaatgaagctcctagcaagaccgagttctcaactgatgagatactgtctggttttgctgtagtttgtggtgctaagatgatgcaccctcggtgcttacgtagtatacttctgtctggattcacctttttttcgcatattgtgttaatactctgtaaattatcaaactggcttcctcaatgctcgtgtaatttaatg

SEQ ID NO: 34361 - DNA, 1164 bp, Zea mays
  Clone ID: UC-ZMFLMO17257B12_FLI
gcgtgtggtgtggccgccgccggcggcttctttctccccttccattccgctcctcgtgacgtcaccgaccaggcaagcactccgctccaccagagcctcctcgcctgtctgtccgacccacacacctaccggagcgcgcgtcccgaggtcggcggagcagggtcgggaggagggaatggcggtggtgggcgtcctcgcgctgcagggatcctacaacgagcacatggccgcgctgaggaggatcggggtgaagggggtggaggtgcgcaagccagagcagctcctcggcatcgactcgctcatcatccccggtggcgagagcaccaccatggccaagctcgccaactaccacaacctgttccctgcacttcgagagttcgtcggaggtggaaagcctgtctggggaacctgtgctgggctcatctttcttgcaaacaaagcagtagggcaaaaaacaggggggcaggaacttgttggaggattagattgtacagtccaccgaaacttttttgggagtcagcttcaaagctttgagacagagctttccgtgccaaagctttcggagaaggaaggagggaatgatacatgccgcggtgtatttatacgggcacctgctatattggaagtaggtccagatgttgaaatattggcggattgccctgttcctgttgacagacccagcattacaatatcatttggggagggtactgaggaagaagagtattcaaaagatcgggtaattgttgcagtgcggcaagggaacatcctcgcaactgctttccacccagaattgacatcagactccagatggcatcgtttcttcttggacatggataaagaatccccagcaaaggcgttttctgcgctctccctgtcgtcatcgtcaagagacactgaaggcctgccaaagaataagccgtttgatctgcccatttttgagtaacgctacagacaagacaaaccaaaagattgaaggaacgaagaaactgaccgtatttattatcgatcatcatttagccggttacaaaaacagccagctgagaatctgtcatactcagccgaaaaaagtgttgtctggtagctaacttgtacgggtcaaaaataatcacgctgtgtgctgtacgcaattctcttcagataaagcgaaacattgtttttctggtg

SEQ ID NO: 34362 - DNA, 3695 bp, Zea mays
  Clone ID: UC-ZMFLMO17257C05_FLI
aaatcgcagcacggaaaaagagagtccccctccccaccaccacatcccggtctagggtttgcgccatcccgaaccatccgctcgccgccggccgctgctgccgccatgggctccggtgacgacgagcgctccacctccaagcaccatcaccgcgataaggacaaggaccgtgaccgctcctcgtctcgccaccatcgcgacaaggaccgggaccgcgagcgctcctcgcggcaccaccgcgacgatggcgaccgggaccgggaccgccatcaccgggacaaggaccgggatcgagaggagcggaaggagagggagcgggaggagcgtaaagcacgggagcgggaggagcggaaggcacgggagcgggaggagcgggaggagcgggacagggagaaggagaaggagaaagagaaggagcgggcgcggcggcgcgaggagagggaccgcgaggagcgggagagttccaggcggcgcggggatgcggatggagaggaggacgacgaccgggaccgcaagcggcgccgccggtcctcgcaccaccaccaccgggacccagagccggagccggagcctgcatcccgggaagaggaggaggtggacgccgaggaggctgagcgccggcgccagcggaagaaggaggaggacatggaggccgagcagcagcgcctcgacgacgagatggagcgccggcgccggcgcgtcaaggagtggcaggagaagcgccgcgagcagcagcagcaggacggcagtgttgccagtggcgcttctgctgctgtggcggccgaggctgatggcgccaaagcggggaagaagtggaccttggatggcgaggagtctgacgaggaagaggacaaggaggacggcaagaaggctgaggggaatggtggtgctggtgacatggacgtgggtttgcccagtggaaatggtgatgccaacggtggtgctgagatggaggaggacgaaattgatccgctcgatgccttcatgaattccatggtgctgccagaggttgccaagctggagagtgctgcagtagcaatggatacagcccctgctgcaggtgcagatggcaagaatggtaagagctcaaaggatgtcattagtaatggggataagaaagggtcaaggaaagctacggggagaattatgcaaggggatgattcagactcggactacgatgatgctgatgatgatggggctggagaggatgatgaggatgatgaggaattcataaagcgtgtcaagaagacgaaggctgagaagttggcgatcgttgaccattcgaagattgactaccaaccgttccggaagaatttctatattgaggtgaaggacatcaccaagatgacatccgaggaagtggtagactaccggaagcacttggagctcaaggtgcatgggaaagatgtgcccaagccaataaagacatgggtgcagagtgggctgacaagcaaactccttgataccatcaagaagcttggttttgagaaaccgatgcctatacagacacaggctttgccgatcataatgagtggtcgtgattgtataggcatcgcaaaaactggatctggcaagactctagcatttgtcctcccaatgctgaggcatgttaaagatcagccccctgttgtccctggagatggccctattgggcttattatggctcctactagagagcttgtggtccagatacattcagacatcaagaagttctctaaggtgcttggcatcaactgtgttgcaatctatggtggttcgggagttgcacagcagatcagcgaattgaagaggggtgccgaaattgttgtttgtacaccgggaaggatgatcgatatcctttgcactagcagtggaaaaataactaaccttcgcagagtgactttcttggtgatggatgaagctgatagaatgtttgacatgggttttgagcctcagattactcgtatagttcagaatacccggccagatcggcagacagtacttttctctgccacatttccacggcaggtggagatactggcacgcaaggtgcttaccaagcctgttgaaattcaggtgggtgggaggagtgtcgtgaacaaagatatcacacaactggttgaggtccgaccagacaccgagaggttcttcaggctattagagttgcttggtgaatggtatgttaaggggaaaatccttgtttttgttcactcacaagataagtgtgattctctactcaaagacttgttccagcatgggtatccatgtctgtcccttcatggtggcaaagatcagactgaccgcgaatcaactattgctgatttcaagagcaacgtgtgcagcttgctgattgctactagtgttgctgctagaggattagatgttaaagaacttgaactggttgtcaattatgatgtccctaaccattatgaggactatgttcatcgtgttggtagaacaggtcgtgctggtagaaagggctttgccgttacttttatttctgatgaggatgagcgctatgcaacagaccttgttaaggctctggagctctctgagcaggctgttccacaggacctaaaagccctggctgatagatttatggctaaggtgaaacagggaactgagcaggcccatggcacaggctatggtggtagtggttttaagtttaacgaggaagaggatgaagcacggaagaccgcgaagaaggctcaggcaagggaatatggatatgaggaggacaagtcagattcagattctgatgatgaagggggagtgcgtaaggcaggaggtgatctggcagcacaagctattgccaatgctcatgcagctgctgctttggttgcaaacaaggctgctaataatgcaaatcagcaaataccaggatctgcaacagcccccttgattcctttactcacagcatcaaaccaacaaaatgatgaggccactgctcgggcacttcaggctgcaatgaacttgcaacaaaatctggcaaggatacaggcccatgcagttccagaacactatgaggctgaacttgagattaatgatttcccacagaatgcccgttggagaatcactcacaaagagacactggcccctattcaggactggactggtgctgctatcactacgaggggaacatatattcctcaaggaaaaattgttggtgcaaatgagcgcaagctttacctgtttatcgagggcccgacagagtcttctgtgaagaaggcgaaagcagaattaaaacgtgtccttgaggattgtgcaaaccaggctctaaatcttcctggatctgctcaaactggaaaatattctgttatttgagttgcagagtagataacaaagtggccgagtatttttttaggagcttataatggtttgcacacttcaaagccgctgatggattgctacttctgatgctcttgctgtctccagccttttattttgtctgatactcttttataaggcaactatggttacttaatgtgacatgattattatgaaattgtcggggtattttggcaatttctactgatgagttttcattgcctttggacagaagacttagaacacaggcggtgaccgagtgctgtaatgcaaaggaaggcggccagttttctggtgcggttttgaaagtgctggttgtgttatgacactttgaaaactgatcttattattttcttgtttatggatatcgttccctttttgtgagaggc

SEQ ID NO: 34363 - DNA, 649 bp, Zea mays
  Clone ID: UC-ZMFLMO17257E05_FLI
cagcgatcggctgtaccccaggctccagagtccccatggccaacggcggatgcaacgacgctgccaactctatggcgcagaacttcaacaaactcctaaggctcgaggtggcgaaagccgtcgcatcctccatgcccggcatgagatactccattgcaagcacctacaattttgtcaccgacttgatggacagccatctagtggctgggctccgggtggtcgacagggcatgctgcggatcgggaaaactgaacgccgcggtcatgtgcgcccagccaaacacgacttactgttcggatcgcgacgactacatgttctgggacatgctacatcctacgcaggcaacaaatgaacgtggggtggtcgccatcttctacggcccgcaggagtacgcggatcccatcaactttgcacagttggccgctgccacagcaaatgatgatggtgatataaatactgctatgaccgcaggcgtctatgccgccatatgataatcactatttatgtcgattggcatgcagctgcgacatgtcactacctgagtgctatatacgtaattcagttggaataatgtacgttgtgtgcatcatcagtctctctatatatatgctggaaataaaatgaggacaagagaccccagtgttagtat

SEQ ID NO: 34364 - DNA, 1854 bp, Zea mays
  Clone ID: UC-ZMFLMO17257E08_FLI
gtacctttggggaggcgaggaaggacacgaggtcggcgcgttcgtgcgtgcccttctcactgcacgccggtgagaattgagatcccagcaccgagacgacgacacaagtctcacctccatcctcctttactcctcatcccagatccccctctccgaaccccgccgcctgccgcagatccgagggtcatcggcagccatgatctcgtccagcaagctcaagtccgtcgacttctacaggaaaatacctagggatttgaccgaggcatcactatctggcgctggattatccattgtagcagcattagcaatggtttttttgtttggaatggagttgagcagttacttagcagtcaatactaccacatctgtgatcgttgataggagttcagatggggagtttttaaggatagatttcaatatgagctttcctgcgctttcatgtgaatttgcatcagttgatgttagtgacgtgctgggaacaaacagattgaacataacgaaaactgttcgaaagtattcaattgatcggaatttagtaccaactggatcagaattccaccctgggcctatccccattctcaataagcatggagatgatgtcgaagaggatcacgtggatggtgcattttcattgtcatctcgcaattttgatagcttttcacaccaatatcctgttttggttgtcaacttctatgctccctggtgttactggagcaatcgactgaaaccttcatgggagaagacagcaaaaataatgagggagagatatgaccctgaaatggatggtagaatccttctaggcaaggttgactgcactgaggaagttgaattgtgtaggagaaaccacatacaaggatacccatccattcgtgttttccgtaaagggtctgatataaaggagaatcagggtcaccatgatcatgaatcatactatggggaacgtgatactgagagtttagtcgcggcaatggaaacatatgttgcaaacatcccaaaagaggctcatgctttggaagacaaatccaataagactgttgatcctgcaaagcgccctgctccaatggccagtgggtgcagaatagaaggctttgtgcgtgtcaaaagggttccagggagtgttgttatatcagctcgatctggatctcactcgtttgatccatcccagataaatgtttcgcactatgtgacacagttctcatttggcaaaagactttccccaaggatgttgcatgaattcataagacttactccctatcttcgtggataccatgatagactagctggccagtcttatactgttaagcatggtgaggttaacgccaatgttactattgagcactacctacaagttgtaaagactgagcttgtaacacagaggtcctcaaaggaactgaaagtgcttgaggaatacgaatacacagcacacagcagcttggtgcacagcttctatgttcctgttgtgaaattccattttgagccttctcccatgcaggtcttggtaactgaagtcccgaaatccttctcccatttcatcacaaatgtctgcgctatcatcggtggggtcttcacggttgctggaatactggattccatctttcacaacacactcaggatggtgaagaagattgagctaggaaagaacatttaaatttcgacgccgctgcaagtttaggcggatgcactaggtagccattgttttgttataactaggtaatgactcatgaaaatcggtatatgaaagatggcgtgctgaattgacagttgaaattcggggtggtcatgaactcatcatataataactagggatctcactgtttcgctaaaccactcacaataagacagtgaattgctgct

SEQ ID NO: 34365 - DNA, 2040 bp, Zea mays
  Clone ID: UC-ZMFLMO17257E12_FLI
ctctctctgccccgcctacgcctcgccccagacgcatcaaaccgctctcctctccctccctgcccccctcgcaaccctgaagaagcccccacacgcaaggccgcaaacgcgccgcgcaccgcaaggtcccagggagcgacacgaggcggcctcattgcagcatggctgctatggccgccgctggcggcgtcgggctccacctcattggcgctgccacggccacgctcatcgtggcggtccttgttgcggccgtgctggggcgccgccgccgggcccgggcccgggcccaggcgcctccggtggaagggaaacccgcgccggaggcaggctgcgcggtcggtgacggcgcgggtcccgacgtcgggacggacgtcatcatcgtcggcgccggagtggctggatctgcgctggcgtacacgctcggaaaggatggccgccgggtgcatgtcatcgagagggatctgacagaacctgacagaattgtgggcgagctgttgcaacctggaggttacttgaaattaattgagttaggcctccaagattgtgtggaagaaattgatgcccaacgggtgcttggttacgcattattcaaagatggaagaaacacaaagcttgcttatcccttagagaagttccattctgatgttgctggtaggagctttcacaatgggaggtttatacagaggatgcgtcagaaagctgcgtctttgcccaatgttcaattagaacaaggaactgttacatcacttcttgaagaaaatggtactgttaaaggtgttcaatacaaaaccaagtcaggtgaagaactaaaagcttatgcgcccttgacgattgtatgtgatggctgcttttcaaatctacggcgtgccctttgctctccaaaagttgatgttccatcatgttttgttgggctggtattggagaattgccaacttccacatccaaaccatggccatgttatcttggccaatccttcgccaatactattttacccaattagcagcacagaggtgcgctgtttggttgatgtccctggtcagaaggtgccttccatagctagcggtgaaatggcaaattatctcaaaaccgtcgttgcaccccagattcctccagaaatatatgactctttcatagcggccattgataagggaagcataagaacaatgccaaacaggagcatgccagcggctccacttcctacccctggcgcacttctgatgggggatgccttcaatatgagacaccctttaactggtggaggaatgactgttgcattatccgacatcgttgtcctacgtaatcttctcaagcctctccgcaatctccacgacgcatcttccctgtgcaagtacctcgaatcattctatacgctgcggaagccggttgcctccaccataaacacgttggccggtgctctgtacaaggtcttcagcgcctcgcctgatcaagctaggaacgagatgcgccaggcctgttttgattacttgagcctcggaggcgtcttctcgaatgggcctattgccttactctcgggtcttaatcctcggccactgagtttagttgcacacttcttcgctgtcgctatctacggtgtcggtcgcttgatgctccctcttccttcacctaaacggatgtggattggagccaggctgatttctggtgcatgcggcatcatcctcccgatcatcaaagctgaaggcgtgagacagatgttcttccctgccactgtgcccgcatattaccgggctgcgcctacgggagaataagtagagcgcgcgagaaccgattcctggctgctgctgatcccaccatgatctgatggcaaactgatgtgtcatggatggcatttttttttcctgtgttagtggttgttaggtggttggttgtgctgctgtcattggaatgaggaacctgtatagtgtgcccctgggacctgggtactggtcgaagttggaaaatatgttgggtcctacccatgtcgattactgccaagtgccaagttgtatatgattctgttgaactagtgaaaccttcccaatc

SEQ ID NO: 34366 - DNA, 1523 bp, Zea mays
  Clone ID: UC-ZMFLMO17257G02_FLI
ccggctcgcgctgtgacctgggagctctggactctggaggcgctgcaggcggtcgggcgggcgatggggtgggcttcctgctgcaagcggtctgacggggctgaacctggcaggaggaggaggaagaagaaggacacggcgtggcggatcttctcactcaaggagctccagtcagcgacgaacaatttcaattacgacaacaagctcggcgagggcgggttcggcagtgtgtactggggccagctctgggacggatcacagatcgccgtgaagaggctcaagagctggagcaacaaggccgaaacggagttcgctgtcgaggtggaggttctggcacgcgtgcggcacaggagccttctaagcctgcgcgggtactgcgccgaaggccaggagcgcctgatagtctacgattacatgccgaacctgagcatacactcttagctccatgggcagcacgcggcggagtgcaacctcagctgggagaggaggatgaggatcgccgtggactccgcggaagggatcgcctacctgcaccactgcgcgacgccgcacatcatccacagagacgtgaaggcgagcaacgtgctcctggacgccgacttccaggcgcgggtcgccgacttcggcttcgccaagctggtcccggacggcgcgacgcacgtcaccaccaaggtgaaaggcacgctggggtacctggcgccggagtacgcgatgctcgggaaggcctccgagagctgcgacgtcttcagcttcggggtcacgctgctggagctggccagcgggaggaggcccgtggagaagctgagccccaccacgagcgcgaagcagaccgtgacggagtgggcgctcccgctggcccgcgccaggaggttcggcgagatcgccgaccccaagctccagggccgattcgtcgaggaggagctcaagcgggtggtgctcgtcgggctcgtctgcgcccaggacaggccggagctgcggcccaccatgtctgaggtcgtccagctgctcaagggagagtctgctgagaagctcgacagcctggagaacgactgcctgttcaagcctggtggtagctcgttccagagctcggactgcgtcggcgagggcgaggggaggagccccggagcagatggggggatacaggaggcagttgattcgagcgagacagtatcctcagcaagctagtgtgtggtattggcagtagctggttcctcagcaagactggcatagtggcagtagctggtttctcagcaagacagcagctccctgcccctgggagaaacgtgtgttgatcagtgtatttattttttgtggttaatccttgctattagcgagttaattcgggagtttccttgcccagttctatcttcgtgttggcatggttctatcttctatggttccagatgttcactgcactggtgttagcgtttagctacttcagtgcatcaatggttttgtgtgcaagtccgtaatatgtaatacatttttgaggttttcatcatgcaaggttgatttcttcgagc

SEQ ID NO: 34367 - DNA, 1601 bp, Zea mays
  Clone ID: UC-ZMFLMO17257H06_FLI
gagagagagctcacctgagcctttcccaagttgtttctcttctcttgctccgcaaaccagcgcaagcccttccctgacagcggcggcgacatggtgctcgaggcgacgatgatctgcatagacaactcggagtggatgcggaacggcgactacgccccgtcgcggttccaggcgcaggccgatgccgtcaacctcatatgcggtgccaagacccagtcgaacccggagaacacagtaggcgtgatgacgatggccgggaagggcgtccgcgtgcttgtcactcccaccagcgacctcgggaagattctcgcctgtatgcacgggttggaagttggtgctgaggcaaacttggctgcggcaatccaggttgctcagcttgcgctaaagcatcgccagaacaagaggcagcagcagaggattatagcattcatcggaagtcctgtgaagtacgacaagaaaattttggagacaatcgggaagaagctgaaaaagaacaatgttgctcttgacattgttgactttggtgaatccgatgatgaaaagcctgagaaactggaagcattgatcgctgctgttaacagcagtgatagcagtcacattgttcatgtccctcctggtgaaaatgctctctctgatgtcctcctaagcactcctatatttactggtgaagaaggtggaagtggttttgctgcttccgcagcagctgccgtagctactggagcatctggatttgaatttggtgtggacccaaatgtagatccagagttggcactcgccctgcggttgtctatggaagaagaacgagcaaggcaagaggctattgcaaaaaaggctgcagaagatacatctaataccgaaaatatcaatgcctcaagctcaaacagcgattctgttatggctgaagcagaacttgcctcaaatgctgctgctggtgacaagcaagaacagccaaaggatgatgacgatctactacagcaggcacttgcaatgtcaatggagggcggtgcttcaggatctgcagctgtgactgactccgctatggcagaagctggtgcagttgaccctgacttagcgttggctcttcaaatgtctgtccaggatgcaaacatgtccagtgacgctgatatgagtaaggtgtttgaagacagaacatttgtgtcatctatccttaattcgcttcctggtgttgatcccaatgatccatctgttaaagatttgctggcatcattgcacagccagggagagcaagagaagaaggaagacaagtcagacaaaacagaagacgagaagaactgatgtagccatgttcatgcttccatgctcacaaagaaattgaacattggtctgcattggctgcgcttactctcttggctatgaaatttgcttatcctcatgtaacagtgctttgtttataacttaatgccgagggaatttgtattgtgactgcaacaatcttctcgtcataaatgttcaagtgatttcgtgtttcaagctctatttgcttgtgtttatttcaagctgtaaccaggccattcgatctcgtgtatgccgtatgcggcggatctgctcggttataagcgttgccctagaattttacagcg

SEQ ID NO: 34368 - DNA, 1844 bp, Zea mays
  Clone ID: UC-ZMFLMO17258B03_FLI
cttccttccacccaccacgcaccacctgacctcccttccctcatcggctcctcctcgttcccactaggcaggaacgccgcgcgccgagccgagctagcggccggaatgcccgcgcagaagcgcccgctcccgtcgtctgcctcgcccggctccgacgccgacgtcgaggaagctcctggcgccgacgcggacggctgcggcggggccgaccaacggtcgccgaaggtgacgctgaacggagtggaggagcgggacggcgggccgctgcaggccaaggaccagcgccacgattccgacgctgacgacgaggaggaaggagaccgcgaaggcggcggcggcggggacgggagcgggagcggaggcgacgacgactgcgacagccagtcgtcgcagagtgacggcgtgatggacgagtttacgcttgtgaaattagtggatgttcggaaggaagtgcaatgccctatatgcctaggaattattcggaagacaaggacagtcatggagtgtttgcaccggttttgcagggactgcatagataaatcgatgcggcttggaaataacgaatgcccagcgtgccgcactcattgtgctagtagacgttccttgagggatgatcctaactacgatgctttgattctagctttatatccagatattgataagtatgaggaagaggaacttgcattcagtgaagaggaaaggacccgtaacaaaaggattcaagaatccattgctgagacatttcggaggcaaacagaagcacttgtgaagaagcgctccactgtaaaagcaacagatgcagcttctacaaggaagactcgacggaatatgcgaccaaggaggagaggacgaattagttctcctgatattgccccaactgattttgacgatgatgatagagaagagaacggtgatgatggaagcaaggagtcgtcttctgttgatgatcactccccagatgtaaggccaaaaagatctcggaggtggcccatgccacgccgttcccctgctaaggccattggcaataccgacaatagcattgaggataatgacgactcaggaggtgctagggactttatgactgcttctccgctgcggggagagatgcttgcatgggggaaaaatggcacccgcagccaaacccggcatggcaactccagtggctccagcggaaggatgggcaggagtggccgtgttgccaagttggtagatcagttccgtaatgctgatgacttcgataatgagttgaacctgtatcttgtcctgcttccacttgatggtcaaagtgtgcctaaactggaaaagccctacctcagttgcctgccaacactatctgttcggcatctctgccagtttgttgctctccagttgtctcggcaacccaaagaagtcgagatatatatcaggaaaagcaaggatgcatgcttgtcagccaattacacctgtaaatacgagacaaagccagaacagcctaatggtttagagagactgtgggaagagaagtctctttcggatctctacccttccctcgccacccgtcaaggagatctggaattgttatactctctgaaagcacaaggacaggggtagatcagatattcactatcaactcgaccagtcgcctcaacgccactgtctgcaaggaccttcaactggtggaagcttgtacataaggctttcaatatagaaaaagatctgaaagtagcttacttgttttaaatttgctctgatatcttgtgaggtatatggtatacccaggttcattagtaaaaatgtgtggagttgagcagtagcaaaccaaccatctgaaacaggctgagcaaagcttgtctatttctgcagcc

SEQ ID NO: 34369 - DNA, 931 bp, Zea mays
  Clone ID: UC-ZMFLMO17258B07_FLI
tgttaatactttttgtagttttagttaaaaaagctgttgccttgttttgggttgtatgcatatatttgcaagtcttctggtgtgtttcccttccgtgatatatgttgaagatcacgacagatgtatgacgctaagcttatgactttgattttgcgacagatttcccttgaaagctgttaaggtcatgcacactgttgccctgagaaccgaggcaactattcctggtggggaaacacctgcagaccttggtcaggctttcaagaaccacatgagcgaaatgttcgcataccatgcgacaatgatgtcaaatacccttcgaacatcaatagtggttttcactaggacgggatttatggctatactgcttagtcactaccgtccatctggcactatttttgccttcacagacgaggagagagttaggcaacgattggctttgtaccaaggtgtatgtccggttcaaatggaattttctgatgatgctgagaagacatttggcaatgctttgtcttatttgctgaaacatggtatggttaaggacggtaaggaggttgcacttgttcaaagtggtaaacatcccatctggagatcacaatcaacacacaacattcaggtgaggaagatctgatgcggaacgcacatagtattctgattgttggaggacatcgtttcttctagcaaaccgcaaggtcttgttacaatgaaactacactggtagtaagtactggtattggtgagatagttggtgctgagctagtgttgtgattctttttcttacttgtgcactagtgctgttttccttccgtgtaaaaaggccaatccaattgccgcttggttttagctgtagctttggaacactgtaggcttgttgttgtaatacagttcgttccatttgtcaatgttaaggacttttgcctcgagagctaggcat

SEQ ID NO: 34370 - DNA, 1759 bp, Zea mays
  Clone ID: UC-ZMFLMO17258C08_FLI
ctcatcctctctcctctctcccccgccccgttcgtctccggcgagctagggtttgcccccccgccttgccaccccacggttcccgccatccttggatctccagccatgtacggcggagacgaggtttcggcaatcgtcatagatgtgggctcttacagctgcaaggcgggctacgcaggcgacgacacccccaaggccgtcttcccatcggttgttggttcaattgaacaaactgaagacacagatgaccccaagccagagaaggaagctgactctgcatcagattctaagaacggtgccaagcccatggatgtggacaaagccaagacaaaacgcagactttatgtaggccaagagttagagttcaggagggatcacatggaggtgatttcatctatgaaagatggaacggtaactgactgggatattgttgataatatatggaatcatgctttcagacggaggttgttgatcaatcctgaagagcatcctatgctcattgctgaaccatctacaaacactgcacagcaaagagagaaagcagcggaacttatgtttgagaactacaaagtgccagcgctgtttctagccaaaaatgcagtgctcacatcttttgcgtctggacgagctacatctttggtggttgacagtggtggtgggtctactgtggtttctgctgtacacgatggttttgttttacagaagtctgtgtcgacttctccagttggcggtgaatttttaactgactgtatgatgaaaagcttggagagcaagggcatcgtcattaggcccagatattcatttaagaagaaggaaatcagtcctggagaatataagattgtagatcttgatcttccaaacacaactgagagttacaggttgtactgcatgagagctattgctagtgacgtcaaggagtctgtttgcagagttccagacactgcttttgatgaagtggcatatgcaaatgttcctacaacttcatatgagcttcctgatggacaaactattgaagttggtgctgatagattcaaggttcctgatattctatttaatccatctctatcccagactattcctgggattgatggatttgcagattcaataccagtccgtggccttcaacgaatggtcattgatagcgtaaataagtgcgacgttgacatacgaaaagagctattcagtaacatcttgctctctggtgggtcatcatcaattctgcagttaaaggagcgcctggagaaagaagtattggaggagtctcctcaagctgctcgtgtcaaggttatggcaagcggaaactcagtagagagacgtttcagtgtttggattggagggagcattctagcatctcttgggtcgttccagcagatgtggttctccaaagcagagtatgaagagcatggggtttcctatattcagagaaagtgcccttgaagcaggggaaggaatatgtacaaccaatattatgctttacgagccttattgttgccaaagggttccttgtgtacaacagcctggtgccttgccatgttggccaatgaatactcgagactcttttcaagtgacgtttgttgtcttcatggctagttaattttaggtgatgtaaggtgaacgtaagaactaggtcaactaaaatatttatcattgacagtatgctgaatctgtctccccttctgtagaatgagacgggaccccatcgtgttctgtaccggggctaattctttgccagcacacaaagagccaagacgattgttgt

SEQ ID NO: 34371 - DNA, 1660 bp, Zea mays
  Clone ID: UC-ZMFLMO17258C09_FLI
attggatgttctatcaggtgacttaccaaaaagcaccaaattgcagaataagcatcttcaagcgctaattgaactgcacaatatgactggcacttttgctaggaacattcagtacttattttcagaatcagatcttgcagttgtgctgaatactttgaaagctatttattctccatatgaaacctttaaagcaaggtatgggcagatggagcgtgctatactctctgctgagatgacaagtatcgacatccgtggggccgtccctcgtggtgttggtgcacagggtatagagctgagcgaaactgtccgcagaatggaggaatccatcccagaaatgatagtactccttgaggcagctgtggagagatgcattagtctgactggtggttcagaagcagatgaactggtactggctcttgatgacgtcatgctgcagtacatatctaatctccaagaaacattgaagtccctgaggataatctgtggactggatagtgatgccttgaaaaaagatgcaggtttagagaaaaaggaagtacaacgattggtggatgtttctgaagaggaagaatggtctattgtccaaggtgctttgcaaattcttacagttgctgattgcctaactagcagaacctcagtctttgaagcttctttaagagctacacttgccaggattggaacaaacttttctgtttctggatttggctcaagcctggataaatcacctgcagcaactgctgatgagaatgcagacttgtcttttgctgggagggctgcgctggacattgcagctattcgcttaagtgatctgccagataagtctaagaagttcttaactgtgctagaacagtcaaaagatccaagattccatgctcttcctctcacatcacaaagagttgcagccttctcagacacagtaaatgaactcgtctatgatgtgctcatatctaaggttcggcagcgtctcagtgaggtcgcacgccttccaatctggtcatccgtggaggaacagggtggtcttcctcttccaagcttcagtgcctacccgcaagcatacgtgaccagcgttggggagtatctcctcactttaccacagcagctggagccactcgcggaaggtatctcaggcaatgaggctggcaacgatgaggcccagttctttgccaccgagtggatttttaaggtcgccgaaggtgccactgctttgttcatggagcagctccgaggaatccactacatcaccgaccgaggttcacagcagctcgctgctgacattgagtacctaaacaatgtcctctctgcgctctcgatgccaatccctccattcctgtctaccttccacgcctgcgtctccaccccgagggaccaggtccgtgatctgatcaaatctgatggtgcaagccagctcgacctccctactacccatctggtctgcaagatccggcggatcacattagattagtgaaatcgtcctaacttctccccctttccatgaggtttacctctgtaaaagcatgcattaccgcacgcttctgcgatcgtatgtttggcatgcgggcttgtagcttgttgcttcacctttttttttcttgccttgtaaccgtactgctggcacatagtgagaataatcctatatagaataattcattacttggagccc

SEQ ID NO: 34372 - DNA, 1490 bp, Zea mays
  Clone ID: UC-ZMFLMO17258D02_FLI
gagaaaggatggcgtcgtggtcgtcgccctcagccgccgcctcgggcgcccgattcggccccttcccgagcggagggcagcggctcgcgccgtgtccgtcgctcgtccgcggaactcccgccccgacgctcgtcctcaggccccacccggacggccgtggccatggcctcctcgcgcacaccggcccctctccctcctcgcggtgccgcgccgtcgccgccgaggtcgggggcctcaacatcgccaacgacgtcacccagctcatcggcaacacaccaatggtgtatctcaacaacgtcgtcaagggatctgtcgccaatgtcgctgctaagctcgagattatggagccctgctgtagcgtgaaggacaggatagggtacagtatgataaatgatgctgaacagaagggcttgattactcctggaaagagtgttttggtggaagcaacaagtggaaacacaggcattggtcttgccttcattgctgcttctaaaggatataagctgatactaacaatgccttcatcaatgagcatggagagaagagtcctcctcagagcttttggtgctgaacttgtccttactgatgctgcaaaagggatgaaaggggccttagataaggctacagagattttaaacaagacaccaaattcttacatgcttcaacagttcgataaccctgccaaccctaaggtacattatgagactactggtccagagatctgggaggattcaaaggggaaggtggatatattcattggtggaattggaacaggggggacaatatctggtgccggccgttttctcaaggagaaaaatcctggaattaaggttattggtattgagccttctgaaagtaacatactctccggtggaaaacctggtccacataagatccagggaatcggcgcaggatttgttccaaggaacttggatagcgatattcttgatgaagtaattgagatatcaagtgatgaagctgttgagacagcaaaacagttggctgttcaggaaggattactggtcggaatctcctctggggcagcagccgccgccgccataaaggttgccaaaagaccagagaatgctggaaagctgatagtggtcgtgtttccgagcttcggcgagaggtacctttcatctgtcctctatcagtccataagagaagaatgcgagaacatgcagcctgagccatgagggagccgtcactttaagcgggcatagtaaatgtttctgaaataagacgcgtagctagcatcagtttgctccacttggtatcatttggccatgctcactctatcctttcgctagcctctatgaccggaactaaactggtgtgtgagaaacatccacgactctcctcccaactgctttcctaaagcgaaaggataacacttcttaataattgtttatacgattgaagctgatttgattggtaattgtaaacaacttgtctttggatctttgaagtcaaacaaagtcagttggttg

SEQ ID NO: 34373 - DNA, 1350 bp, Zea mays
  Clone ID: UC-ZMFLMO17258E11_FLI
aaggcgagaactttccagagcactcgccactcgcacatcgactacaactcaacgatccgagccaagcgacgcgtgtgttctcttcttctccgaggccatcatccttcgcgcgaattagccgctcagcgaccgggattcaaggtacgtcattgctcacctccgggacccctcttcctcgtttgcgcccttctcttctctcatgtggaccaggaataagacgcaagcttgtcccccaccatggttcatcgttgcgcgagaatatcgtgtcgtctatttccgatctgtggacgaggcagaaaaggcttttcacggatcatccagcttgcaaactgaagcagaaatgcagggatcgctcttggcgtttccatggacggcgacaagtctaagcagcttctctgtccatgacatgtgattatgtgaagtaaatcgccttctctgtttagctagtacaaaaccttggtttgtgtttcgttatttccgttgacgcggagcacgatacaatcagaaacgaactcgattcagtaatcctcttcatggcttgatgggctacattgccattatctaatttgtagaatcccaggatggaggaaccaaacacttttcaggttgtgcaaatgcaatcgaacaatcggtagtatgagctaactgaacatgaccaaacgtgcgaagaatattaattaatcaaattgaaatagagtaaattgtgcaaaaatctcacactataggtctaactgtgttgcaaaccttatttaggatgaacaccgggaatttatctgtacagtgaaaagattttgacaggcaaagttacctgttggacaagttttggagaaactgaaccctttgcttctttcatctgaagattactggctgcagggttgcgatcagatgaggggcgcagcaaggcttctggtgcagagcgcgaccaaaaccaagcaaatcaatcctgtcaatggactagcaaggatgccggcgatcgctactcctcagaggcatgggaacgagaatacttccagtgaatctgtcgtcacgaaagacgaaaacgttgagccccttgtcgccttcagcaggccacctcctttgcctccagttctgggtccgctcgtcgtgctctcggttttcgagatgtcgtccggcggcggtgatgatgacaccgaatgaggcagcaaatgggcacccatggaaattagctttgtgttgtctgttaagtttgcaccgtcctacccctgtggacataaggttcgcacgagggggctgatcttccctgagcagctccgaattaggccttgtacagaactacagactacagactaagatgtactgttagctatatcaactaggtggcgtttggat

SEQ ID NO: 34374 - DNA, 2182 bp, Zea mays
  Clone ID: UC-ZMFLMO17258F01_FLI
tgccaaagccagaggagcgttatcggagcagggaggaagaagagcgctgtgttcgacgcaggagcatttcgagggacagcgactcgactcggagctctggagagatctagcggggctccggtacagccagtgcatggcaactcgcaagggctgagctgctcgtcactggcgtagccgcgtaggaaccaaaatcgggcgtcaggaaagtgccgtcgtccaactgggagcgtgacagcagcgggaggcgccatatggacagggacagcagctcgtcggtctcggcgtcggacgggagctcggaggcgggggagcgcggcgggtgctgctcgtcgccgccgtccacgcggagccgcaccgcgtccgacgcgtccacgtccctctcggaccggtgcagcagcgtcgacgtcgaccacagcgggccgttccagcctgccgccgccgtggccaagctcatcggccggtcgtccccgccgtccgccgccgcgtcgctcagacggctcagcatcaagccccgcgccgacgtgctcgaccgccgctccaccgaggacgagatggagctggtgaaggaacggttctctaagctcctgctgggcgaggacatgtccggcggcggcaagggcgtctgcaccgccgtcgccatctccaacgccatcaccaacctctacgcgacggtgttcgggagctgccacaagttggagccgctgccggcggggaagaaggcgatgtggacaagagagatggactgcctcctctccgtctgcgactacatcgtccagttctacccgtccacgcagaccctgcccgatgggaccaaagttgaggtgcattgcgcttcatcatggccttcttccttcttgaaaatttcagcaccaaccaataaacttgagcaataatgtcgtctagctctcttccaagtaccaatcgacattgttgcgctgctgatcaggatggatcgattcgtgcaggtcatggcgaccagaccaaggtcggacatctacatcaaccttcccgcgctcgagaagctcgacgccatgctcatcgacattctggacagcttccagaaggcggagttctggtacgcggacgccgggacgaggtcgttcggctcggtcacctcgtcctcgtcgtcgaggatgtcgtcttcgtcgtcgttcaggaggtcggctcaccggaacgacgataagtggtggctgccggtgccctgcgtcccggacgcaggcctcaccgacaaggcgcgcaaggacctccagcagaggcgcgactgcgccaaccagatccacaaggccgctgtctccatcaacagcggcgtcctcggcgacatggaggtgcccgagtcgttcatggccgtgctccccaagagcggtcgggcaagcgtgggggactcggtgtatcgcgtcatgcttggcgccgacaagttctcgccggagttcctgctggacacgcttgacatctcgtcggagcacgacgcgctggcgatggccgaccgggtggaggccgccatgtacgtgtggcggcgcaaggctagcggcagccacggcaagctgccgtggagcaaggtcaaggagctcgcggccgacgacgacgacaagaacgtgacgctggccaacagggccgagagcctcctgctctgcatcaagcaccgcttccctggcctgtcgcagaccaccctggacaccagcaagatccagttcaacaaggatgttgggcaagcgatcctggagagctactcgagggtgttggagagcttggctttcaacattgtttcgtggatcgatgatgtccttttcgtcgacaggtcgataaggaaactgagtgataacctcaagtcctgagttctttatcctgcactgaagcttcccagcaaaaaggttttagatgtctgttggtgaagctgcagaagaagggtgcgtgactgtagtagcggtagtagggtgattttgctgacctagagagatgcaagcctctagctttgcaagaatgcacaatgcagagtagcgtgtctgaccaacagtgaacgtgtgtgattttcgtgtcctttttatttttcagctctcgcgctcttagcttggcagcacgaagattggtgaaagggatcaaaatgtccaatagcataaatgactggtcctgcatatgtaattgattatgatgttatgtcgccatgttagttgatatttcctctcct

SEQ ID NO: 34375 - DNA, 1134 bp, Zea mays
  Clone ID: UC-ZMFLMO17258F11_FLI
ctggcattcacgggacagggcagcgaaagtgaacgccgccagtcccttgccatggcagcctccgtctctctccatccccaatctcggggcctcctgacactggttactgggtagcttctgcttggtactccatgcgaggacgacaacaatggcgatcgccgccgtccccgcttccctccccttcggcctcctccctccgcggctgttccgcgggagggcggtgaggtggccgcgcccgattagggcttcggcgtcgagcaacgccagtgacgttgcaggcggagagcggaagtttggggctctggtgagtagcgtgggagatctgagggcgctcgtcgcctccgtgcctcctgctgttgcttcgatgcagaaaaacattggcccaaattttgttgctggtttctgtgttagcatggcatttgtggctgctgctgcaagacagatctccttaagaagtcgagagcatgttagtaaaggttctgttgctgatcttgtaaggcgtggccagttaaaatcagggcaacgagggattgcaaagctccgcacatacgatgatcctttcaataacccattagtaaagattgatgagggtacatctactgcacaaatgtttggcaaggagtaccgtttggctcctgttaggcttacgaaagagcagcaagaaatgcatcagaacaggagatcgcgtgcatatcagtggaaaaggccaaccgtgtttctcagggaaggtgattccttacctccagatgttgatctggatacagttagatggattccagcaaaccatccctttgctgctgcttcaagtgaagtagatgaggagaccgccaaacaaaatgtctaccaaaaggatggcatcccatcccgtgtcaaggctgagcatgaagctttgcgggcaaggctagaggcctcaaacgatgttgccagactcccttcggatccaaggagtattcagcgtaatgagagaccaatgagattgtcaggcgagccatctgaacatcttcagagctccaagtttgagaaccaagatagacaactggctactgagtctggtaaacatagctctgatggatgtttacaatcaaacgagccggaagggcaataaaaacgtgtgtatttcagctcttcgaagat

SEQ ID NO: 34376 - DNA, 754 bp, Zea mays
  Clone ID: UC-ZMFLMO17258G01_FLI
cgctaaatggatggacacgctacgccgcattcctccccgcagccacttccttcgcccacacgcccgcgcgctcggaatactctgaggatggtgctcgaaccaagggcgatggttcgtctcgctttcgtctcgctgcgtgcgctctctgtcactccccctctctctcctcatcagatccggccatggacaccaaggagcgtctggtcggggtcgagctgctgcacgaggcgcttgacgccgcggcgcgggctgacggcggccgaggtcaccgcgctggtggacacctgcatggatctgacgcgggacgccaacttctgcatcgcccagggcggcctccaggcgctctccgtcgccgccgtcgtcgcgggcgaccacttcaagatccacctcaacgccctcgtccccgccgccgtcgagcgcctcggcgacggcaagcagcccgtccgcgacgccgcgcgccagctcctcatcacgctcatgcaggtgagctcctttcgtcggcgctctcagtggcctgtcgtctctcctgggaaatgcatgtagctggggagctagattaagttgcgagttcgaactaagagatcgagcaggagcagattggggatttgaggcttgtttttttaggtaggtcgggtggagcacgatacattgcatagttgtgctgaagtgaggaatccaaaggtctattcggctgaccattatagattgacagacattacatttaaatggatcaatggtctaacatttttgtagg

SEQ ID NO: 34377 - DNA, 1165 bp, Zea mays
  Clone ID: UC-ZMFLMO17258G03_FLI
gcgtcgtcgcccggccgctgtgcgtgcgtgcgtgcgtgctgtgctgcctttctttctcgctttaatttctttccatccatccgctttccccccctcccaatcccaatccctccaaaaatccgctccgcgcgcgcaagcgcggccggcctttatcgatccctcccggcctctagcgctgctccggcggcggagtccggccccaggaaacaaaggccgcgcgcgccgaccggaccgaccggggggccgtccagttccagttccagttccaggccgcacaagcacatgagatcatgagctcggaggactcgctcaagtcgctgtcgctggactacctgaacctgctcatcaacgggcaggccttcagcgacgtggccttcagcgtggagggccggctggtgcacgcgcaccgctgcgtgctggccgcgcgcagcctcttcttccgcaagctcttctgcggcctggacccgagccaccagccgcccccacccaccgccggcgggcgcgcgccggacctcgtcatccccgtcagctccatccgctacgaggtgctggtgctggtgctccagttcctctacagcggccaggcctccgtcgccgctcccaagagcggcccgctcccgggctgcggcgccaggggctgctggcacacccgctgcggcgccgccgtcgacctcgccctcgacaccctcgccgctgcgcgctccttcggcgtcgagcagctcgcgctcctcgtccagaagcagctggaggccatggtgaaggaggcgtccgtggacgacgtgatgaaggtgctgatggcgtcgcgcaagttcgagatgcaggagctctgggccgcctgctcccacctggtggcgcgctcgggcctctccgccgacctcctcgccaagcacctccccatcgacgtggtcgccaagatcgaggagatccgcgccaagtcccccggcggcgccgccgccgcgggcggcgccgggccgcgctcgccgttcctcacccaccactacctccccatcaacgcggcgtcgtcggcggccgaccgcgagcaccggatccggcgcatgcggcgcgcgctggacgccgccgacatcgagctcgtcaagctgatggtgatgggcgaggggctggacctggacgacgcgctggccgtgcactacgccgtcacagcact

SEQ ID NO: 34378 - DNA, 2148 bp, Zea mays
  Clone ID: UC-ZMFLMO17258G10_FLI
gcgcgcgcacaattcatgtgaaccaacacgtgatgcaatgtgtatgttctagtctgcccatacatgcgtgggcgaaatatcctagagggagttgccatactgcacgaaaccattcatgagttgcataggaaaaggctaagtggggttattcttaaaatttattttgagaaggcatacgacaaggtcaaatggccattcttattccaaactcttcggatgaaaggatttgcgcccaagtggatttcttgggttagatccttcattatgggaggtagtgttgcggttaatgtcaacgacgacgtgggaaaattcttccaaacaaagaagggattacgccaagtcgatcccctgcctcccatcctgttcaacatcgtagcagatatgccagcgatcttgattaacagggctaaagaacatgggcaagtcagtggggtagtgcctcacttaattggaggcttatctattctgcaatatgcagatgatacgatcattttcatggaaaacgacttagagaaggctcgtaatatgaagttgttgttaggcgcttttgaacaaatctcaggtctcaaaataaatttccataagagtgaagtattatgctttggagatgcccaagattctttagagagttatttggaattgtttggctgcaaacatggggattttcctctaaaatatctagggctacctatacacttcaaaaagcttagaaactcagattggaagataatagaggaacgtgtggaaaaaagattagccagttggaaagggaaacacctttcaattggaggtagactgacattgattaactcggtgttgaacagccttccgttatacatgatgtcttttttcgctctcggttcttagaaaacttattttcgctctcggttcttttggcaaggagatgagagcaagaagaaataccgccttactagatggactatcttatgtcagcccaaagaccaaggtggccttgggatccatgatctaaatattaagaacacaacgctcctaagcaaatggttattcaagcttttaacatcggacgacacttggcaacaacttattaggaacaaatatctaggctctaaacctctagtcgaagttgattggaaaaccggagactcacattttttgtctagtttaatgaaggtaaaacaagattttctatgttttggaaccttcaaaataaaaaatggatcacatgtgagattctgggaagatacctggcttggagggcaggggttgaaagatcagtaccctaggctatataacatcacaagagcaaaatttaaaactattgttgaggtgctaacaaataatgaaaccattttttcttggagacgtactttatttggatctaggctaacggagtggaatgaacttcgttagcgcattgctaacattcaattaacacaagaggatgatgtttttcattggaatctgacccaatccgggcagttctatgtgaaatcacattatcaagcattaataaaaatgaggtgcccaatctaaacaaaagactatggaaattaaaagctccgctaaagatcaaagttttcctttggtaccttaggaggggagtaatcctaactaagaataatcttgccaaacacaattggcatggaaacaaatcttgttgcttttgtcataagccagagataattaagcacttgttctttgaatatcgatttgctcgtagggtctggggtgtaatttttttagcctttgggatacctccaccttctagtgtttttaatatgtttcaaactggctagaggggtttgagcacaatcttaggaacatcattttgctaggggcggcaagcacttgttgggctctttggctaagaagaaatgatattgtttttgagaaaaaatcaatttactctcctttgcaggtgatttatgccatttcccattggctccgtacatgggcggtgctacgattgttggtgcaggtggtcaaggacttttatttccaggcctatgggtggcgacctagtcatcggattgattgccactagagtgtctgtatttctttaattttaggctgtgtgattcttgatgagcagaggcaggaagaattttcaaaaacttgtattaacttgatacaatgcgtttgaaattaataaagtcttcctattcc

SEQ ID NO: 34379 - DNA, 1374 bp, Zea mays
  Clone ID: UC-ZMFLMO17259B08_FLI
gttgttgtggggaacatggcagccctcaagagagcaccaactcatacataaaagaaatgttgcaagtatccaagtttcttcgtgtcatcaatctacaaggcatcgatatcggtgagagcttaccaacagctattgggaatgtagcacaccttcagtacctcggtgtcactgcttgttccttgaaatatatcccatcgacaattgaaaaccttaaaaaacttcagacgttggatgttcgacacacgtttgtttataaacttccagaagcattttggagtataacgacactgcggcatgtatttggtgagggtcttttcttgcctaagcaggtgggtgacttgaaacacctgcagacacttgaaagcatagatcctgataaggataatggttgggacagcagcacttttgagaaaatggctcaccttcagtcccttcatgtttgggattctaagtacaatggagttaatgctgaggctctatctgctgttattgataaagccaatttcctcgaacacctagataccctcactcttgatgttcatgacatcccattgagtgtgttcaccagttcttccctgaggcgtctccgtaccctaatcttagacggcaagttggacatgttggtgctgcaatctaaagaaaaggagtcaaaatttcatttccccaacattagcttcctatcattggcaaaaacagaggtgtcgcagaacttcatcaacaagcttgggaagctgccttcgctcaccactctaatattggatataaaatcctacaaggatgatcaagatcaacttgccttccaagctggtggatttacaagccttacaaagctgagactttctgatctggaaattgtgaaactcgagataaagaaatatgcacttccagaactcacagatttggaggttgagtcttactacgacgacatcgaaatcgaggtatatggtgagcatgagtttgtgaagaaaattgaacaagtggatgaatacctttatggccgtatcactcaagttccggttgctccaaagaaaattggtcagcttcctagcatgaagcaacgcgtggctagctgaagatcacaggtaaactaagacaccaatatagtactacttgctgttatttcgatttgcctgttcagtatgtacaactctgtcatgagtcgtgagtttattagtgtggatgtggtggcagatcggcatgtctacataataattgctggccgcacctgtctacagtatgcgtgtatgtattatatattatggaacctgcgaaaaaaacgtatgtgtgcgcgtgtatcatggtgtgtactcctaaattgtaaaataagtgaaagaaaaaacaagtggatcattgaatgttgaaggatgtttttgt

SEQ ID NO: 34380 - DNA, 2481 bp, Zea mays
  Clone ID: UC-ZMFLMO17259D10_FLI
caaggaataaaacaaacaaaactaagaaatgtagctcaaaccatgtagttgtagtccaatgacatgaaacttcgtgagatatgtgtccgtttgtgaagcacctatattcacacttttgcataatgctctaaatttagaaatggcgaaacaaaattgggtaccgaacaaaaatttgcccaattggtttggctccaagatgcaaactttcctgtgtttgacttcataggaacccgagcccttttgacatttgatactaccagtattacagaccaattctggttccagtttctactgctaacagagaatcacaccttactgttgcaaccagagaccttttgacatttcagcaattacatccggtgcgggcactgtctacatgattgcaacgctcaagtaatcaccgatttggaatccgagctctgcaagagttttggcatcgtcgcctcttccatgaccataagcaaaggtcgaacccacctggatgcagttgagccggtgtggagcagggatgagtacatcggagcatagagcctgctccagctcgagagacgctgaagatgcgttggagaagaccggcacgcctgcctggagaagatgcctagagaagaccggcacgcctgcctgctccagctcaaggagcgctagagatccacccgcctgaagaagactggcaggctgtcgtgtctgcccgccaggcaccggagatccgtccacccggtaggccgcgcgccgaagatctgccatgcgccggagatctatttgtccacggatccgtccgcctggtaggccgccgcgccgcgtccgaagatctgctaggcgccgaagatccgttcatccgcgtatccgttcgcttggtaggccgccgcgtcgcgtccaaagatctgccaggcgccgagaagatccgttcgtctgcggatccattcgcctggtaggctgccgcgtcgcgtccgccgcaggcctccacgtcgtcgaagaagcaggtcgccgcgccggggaagaagcaggctgccgcgccgctgaggatgtgccaggcgaaggagagatggagagttggagtcgggatcggggaagaagaggctgcgtggaaaaaagcctatgcttctttttgcctgaaaccatgacagactttctcatactactggaactttggaaaggcctcatagtggtaccatgcctcgtcttcttgatagagatgaatgggaagtcacaatcccttggcaaatgggtaacacgacttgtgggtaaatgtgcacaacatctggataacactaggttagtgttgttagatgacgtccacttggcgatcagcctttattccgatacttgcttcgttcatccatcttcgggttaattcatcaacattatcttgcggaaaagctcacgctttccattatcttgtggtcgactcaactctggttctccgcatcacatggttaattcacgtaccagcatcaaacgtgactcaatacttgtgagaatgttgataaattctggttcggacttgtcgttgaacatctgacaggtgttgagatcttccgcccccatgacccagatgaggctgatcacgaggaggcgaagcacggcgaggcacgtatcggacgagcttctgatattaaagacgatgacacgtgtcatgatgaggcggcatatggcgaagaaaaataggaatgaatgatgacgagagaacagaggcgcgcagagggaagtcggcgtgcaggggacggcaggtccaacggtcgtcatggcgcggtgcagggaggccgagtggaggacagcgttgccggatcacgcaggccgagcaagaagctcggcgagtcgacgaggttgaggggcatgcgcagggacgagcgagcagggaggagcatcgagcggagctgtggacggaggaacgcgagccgggaacgcgacgcggcggccatggccgagcagaggaagttccggccgggcgcggcgagcagagagaagcggctgccagacgccataggagacgggcgtcgagcaagcagaggggacggggcgcgccgctgggagctccgcaagagatagatgggcgtgcagggagccatgggagagagagccgagctggagctggaagaagctccggccatgggggatacaaggggctagggcaagctcggggaggaagaccgcgacgtgtaggaaaattggacgccaagcaagagcacgacagggaggagctcggccgggcgccatggggcgagctcgaggaagctccacggcggggttcgcggcgcaggacgcaggcgcgcgtgcatagagggagatgcgcacggctggcgagcgcagggagcatggccagggcacggccgagctggcagcagggaggagcagaggagcacggtgcggcagggaaggaggaagccaagcgccctggtgagtagaggggattcgacgagcaggagtcggcggcctggagaagaagggcagcgcgcacactgggagagaaacctagcgccagag

SEQ ID NO: 34381 - DNA, 1270 bp, Zea mays
  Clone ID: UC-ZMFLMO17259E08_FLI
aggccatggctgcaagcaccattgcacagaggggcatacagcttgtggcaactgcccatggggtaacgatagagaatctgatcatgaacccatcactagagatgcttgtgggaggaatacagagtgtcacacttggtgatgaagaagctaaccggagaggagttcaaaaaactgttctggagcgcaagggcccatcaacatttacatgtgctgcagagatcgtctccaaaaaagaattacgtgtccatcgtagtttggaagccacggtagatgctttactcgcaggtaagctgcctaattttgaaattcgaaagttgggttcaaagggatctatgcaggaagtttctgtgcaaaaggaacaatcacatcttggtatttatgatgcaactgaatttggcagtgactctctaaggaatgccagaagaagcttagactctgcatttagtcttgactctgctgaagggcatatagtgaggtcagatggagctgattcaagctttaatctttatgcatatgggatctccgagtcgactgccttgcaagccattcatcagctggagttggacgacagtgttacttcaacttataatatcagtgaagctgatgcagtgatcgcgttacattcaaagctcaagaagaactatcagattcaggctgtgctgaaatctcaagatataccggttttcctcgtaaagacaaactccctgcctcaaatcaccagggcactccgtgctcttgtcgacgatcacatggacgaagtgatagactacaatgataaagaagaagcaaggtcatcagaagaaaccgatgctctggaggaggcaaggctggcaatcgagcaagtagtgattccgaaaggcgagagcgtgcagctactgccaaggccatcaagcatcatctcgtcccaagtgggtctcgtcgaaagcttcagcctcaagtgggaggtcgtaggccaggagcctaaggcatgcgtgaggatccttccgcactttgcgccaaaacaagtcgaagctgtcgcgcgagaaaccccagcggagcccgccgactcggactgggagagccacgatgactcggatcatacccagagtggcatcaccaggctacctttcctaccggattagcgcggcgtctggcgtatcctttcagttcttcgtggccctgccgcctgctgtgtatgtattccatttatttatcttggtaataacttgcaccagaaagcacttgcgtggttgcgtctatctacctacgtaatataagtggatagtgctcc

SEQ ID NO: 34382 - DNA, 2889 bp, Zea mays
  Clone ID: UC-ZMFLMO17259E10_FLI
gcgtttatccaactcggctctcagcgactgcccaccactgaggattcctcttccggcggcggcggcggcggcagcgatgctcctcctgcgcgccaacgcgctcgccgccgtaccggtgtccttctccataacgccggcggcctcctatagctgcttcccctggccgtcttcatccaccactgccgcgagctgctccgtcggctcctctgccaggctcgccgccgccgtgcagtacgacccgctccgccccggctccgatgcgtgggcccatcccgacggcatggtcaccgcggagggtgacgaggagaaacagcgctatgacacggagggggagtccaacgactgggaaggggaagggccccaaggatcatcagaccccgagggcatcaacgtgccgcgccagcgctacatcgccgtccccaaggaggccctcctcgatgctgtcctctcgcagttcgcgtccgacgacgacgacgccgcggacttcaagcgctgcgccagatgcttggacgccatccttcacgccgagcacaagaggatgctcgaggagatgcgcacctcctacatgctcacgcaacgccaccgggacgaggaagaggagcaggatgacactgacaccgcctcgggctcggactacgtcaacggcaaagccggctccggatttttcggcatcacccaactggatggaacgttgttccttactagaagcgtggacttgagaactctgctcggattgaccccagaccccgattcccagaccagagttgcttttgcaactcaatttcagcgctcattcatgaccctactacgcaatgctcagtttgaagaactctccgcacaagatctgctcttgacatatgccctaaataacgattacctgctcacgctgcccatttatgtcgactggaagaaggctgctcaatctaatgcaataatattcaggcgtggatacgcgactgagaggcagaaaggcctcctgttggttgagaaacttgattacttgcaatcaaaactcttgcagaatgtctttttcagcctctccaaacccttgaaaaagccagggaaatggcttaatgagttcctggcaggctttgaaaagatcaacagataaccagggatttcagatctggatagacaaactgagactatggcttaaagagcaaacttatgcagataattcactgctgttgatagaaagctcttcatgggacaagcttagttctgatcagttacctgatgcagatgttcctatttggatcgctgcacaaagggcagtctctcgttatgaaggaattttgtcacctgttggtcctcgtggaagactgttaagaagattgcttaaatggactggactaataccttctctgccagaagcaacgataaaatccaacaatgaaactaaacatcttgaaggacatgtgaggccaaactttctaccaagaattacccttgctaatatatgggaacctgcaagcagagaatcttgcaataacaatatctgggagatggtgaaagcttcttttcgtattctgtttgggaggtctactcttcaggaaccagcattccaggagttaatactactttacactgatgaagttgttccaagtgaaacgaaggacgagatggttccgctgcaactgaaaatttatgagaggattccgatcccagatttgccagtaagtgactgagtctcagataaatcggaaaaggaaaatttatggttttcctagatgtttaaggaaaacaatgtttcccagatctaaatacatttcattaatatcatcccagtcagaaggcttgctatctattgccgttactcagatgagaaacctattgtcttgattactttagtaccaatgaagcattaataaacaatcttcacactgttctttgttttgtcatcatagtgacggtcatggtaaaattcgtctgcaggtagttttcccccacaagaaattgtccttccgcatcctagatacagtaattctgtctaaccttatctttttcagtctagtcacctgttgtctgtgtggacccttactatatgattcttttctgttcctgcacataggcttgttgatagtttgcttttaatgcaggtaaggctagatattgctactgtaataggtctattggcatatgtggtgaactacaaatttgagagtttagcctcatctccgtcagcttttcttcttgatatagttgctggtactgcactcgtcatacttgttttccgtgtagcactgggctacaaacagacccgggataggtaccagcttctggtgaataaaaccctctatgagaagacattggcaagtgggttcggctcggtttacttccttctcgatgcttctgagcaacagcagtacaaagaagcacttttggcatatgccatgttgctctgcagaaagaagtatgaggtctcatctcgtgcaagcataagagatgcatgcgagcagtttatgcacgagaaattcgaggcaaagattgagatgccgatcgacaaggcaatggagacactgctgcggttggggctggtgattgagcttcccactgatggtgggtcgagcgtgattggtctcccatgctcggaggcatacaggatcctgaaaagccgttgggacggcttgctggaacaagatacagagcaaggctgattagaacgagacatacgttggtggcttggagtggagtgggatgggatgccgtgctggtacatattcgacgcgtcggcaaagctctctcttgtttgtatgtatgtatgtatgtatacgtaccagttgttgcagcaagtgtatatgtgctagctacgtgcatgtataatcgtgatctagttcgttgtacacaaacgattgcagtgtatgtatatgggagcacatgttttttggg

SEQ ID NO: 34383 - DNA, 2395 bp, Zea mays
  Clone ID: UC-ZMFLMO17259F03_FLI
tctcaggcttccccttcttcctccacatcgatcccctcccccctccactcgtctcccaaatcgccagcgagagccatgccgcctcctcccctgccctcgccgagcctgaccgactgaccccacctcgccactgttctttccctgccacctgggccccacagcgcccctttaccgtcaccaccaaatccccaaatcccggaggcacgaggagggaattcgtcgcctgaccgatcggccgatccactgccgtcggcaccccaatccgccgctgccgccatgttcaacaagatcatcaagaggggaaaccgcaagggcgcgcgcggggacaacgcggaggccgccgcgcgccccgcagcgccctcgtcgtcctccgggagcggcggcggcggcgcgggggcagccgcgcccgtcaccgtcaaccacgcctcccgggccacagcgccttcgccgtcctcgcccacttcgccgcacgtggcgccgtctgcgcttgcgaccaacccggcgggggcggcgtccccgccactcctcgagccgctcccgcttctccgcgacgtcgccgccgcggatcgcccgggcctcttcctccgcaagctccgcatcgtcgccgcgctctttgacctttcggactcgctcaagcacccacgggagaaggaggccaaacgccaggctctcctcgagctcgtcgattacgtgcaggctccagctcaggcagcgggcgccaacgcacccacgcgcctcccggaccacgtccaggaggcgctcgtcgccgccatctctgccaacatcttccgcccgctgccacccgcgctgcacgaatccgccgccgcgatcgaccccggcgccgcgcccgacgaggaggaggagccatacctcgacccctcctggccacacctccagctcgtctatgagctccttctccgatacgttgtttcgcccgacaccgacaccaaggtcgccaagcggtatgtggaccacgccttcgtcctccgtctcctcgacctctttgactccgaggatccgcgtgagcgcgagtacctcaagaccgtgctccaccgcatctatggcaagttcatggtacaccgaccattcattcgcaaggccatcaacaatgtgttctaccggttcatctttgaaacgcagcgccacaatggcataggggagctccttgagatccttggaagcatcattaatggctttgccttgccaatgaaggaggagcacaaactattccttgcccgtgctctcatccccctgcataagcccaaatctgttgcgatctaccatcagcagctgtcctattgtattgttcagttcgttgagaaggactacaaattagcagatactgtgattaggggtctgctcaaatactggccagtcacaaactgccagaaagaggtgttgtttctgggggagcttgaagaagtgctcgaggcaacacagcctgcagagttccagcggtgcatggtgccactgttcaagcagattggacgatgccttaacagttctcacttccaggttgctgaacgtgctttgttcttgtggaacaatgatcatattgtaagcttgatagcacaaaatcgtgttgttatatttccaattatatttgaagctcttgagaggaatatacagagccactggaatcaagcagttcatggtctcactgcaaatgtgcgcaagatgtttttggacatggacagtgaactatttgaagagtgccagcagcagtacatggagaaacaagcgaaagccaaagagatacaggaacaacgagaatcagcatggagacaattggaagctgttgttgctgccaaggctgctggagatgacatggttttggtcaactagatgatagctgctcacttatttcatgagcgtcatgtgcgcttatcgaggcaacaaggtatcggtgctagttgcggtgctcttatatcaacattgttgacttgggactatcagatccatgttccttgcatcagtgcaaaaaaatgcggaccgagtttgaacacattggtggcagcgaaagccaattcatgcagaatttttttgcctagtgagatcctgctgtggttctgagcccttgctttattcagcccctccttttctgttgcgttaatttatgaataattggactcttgtgttaatccttcagtgtctgccctagttacggacccacaattgggaaaatccaagtagagaaaattactgagctagattgaaatcttttcaatttatttttcctttttttacttcttttctccttgttgggagttaatttcagttcatgttgttgtatggaggtaacagcacaaatgcagataaaagctcatatgtagtaggaactgtttcgacgttgctgtggttgttttagcaatataatggctcactggtacgcccg

SEQ ID NO: 34384 - DNA, 873 bp, Zea mays
  Clone ID: UC-ZMFLMO17259F06_FLI
ctaaaatttacaatttacaatttacagctgtgcggaggcgggagcagggggcagcgagcacctagcagcgcgcggccggcgactccaccgagacacctcagccggccgcgcggtcgcggttgcctccggctggctcctcgcctcgatggtggggatgtaccagcaccaactccgcgacgaccccttcgacaccctaagcggcggccactgcggtgagcagccacgcgttgccggcggcggcgcctcctcctcctcaccctcggctgttcatgacccgctgtctgcagaggtacatggcggcggacagccgcggcagcgggtcgaggcgcttgccgacggaagaagcatgttgcgcggcgggggaagcggtatagttggcgccgcgggtggagatctaggggtgctagtgcggtggatgcgggaactcgcagcggatcccgtgggtccacttccggcgccatcagagcacagggtgaggaagcggcacgtgctggcctggcggcgcgctcgctacctcagattggaggacgtggcggacgcagaagagcttcccagcttctccaagccagagaggtggcgtgctagggacaaggcagggaaggagaaggacatgccaccggtgtcagctactgtgtgagcacgagagaacggaagacggaggcattgaggcatagagcagatgcaaacttagctagcagagatggatggagactggggagaagagatggagggtgcccgcgactgcgtgtgctgtgggaaagagacgatgtcgacagggtttagaaagtttactcagtgatgtagccatcgtgggctgaccgggcctaaatggctgattaaaaaacgaagtgggccaaaatcccaaaatagttc

SEQ ID NO: 34385 - DNA, 2207 bp, Zea mays
  Clone ID: UC-ZMFLMO17259G01_FLI
ttccatctacatctggcttcagcgcgcctgctcccttgtcaaacatccctggttcagaaaatgagttcaaacaagaccagcgaccttttgtgcagggctctgactttattcatggtggtcctgctaatgattggattaagtcttttcggcctccgggggttcctgaacttggtggaatagaagcacactttccagattttgagcaaatttataacaatgcaggaacaacctttcagccgccattggatggtccaccacaaagagtgttgtctggtgtcttgcattcctttctcacaagtggcccagctggtgtgccatttcaacctcttccagtaccagctgctcttggtttatctgaaagtgacaaacagtgcatacgtgatcgtagctgcataatggcacggcatattttttctgaccaaccggaagaatatatacaggctcaggtcaatactttgctgcattcgcttgatatagacaaccgtatgagaggacctatgcatggacaatacccagaactacaggagtactggaaccagtcccaaagttctatgggtcctgccctgatgcataataccgctgataaatggattactgagtttggcaaacaaaataataatccggaaaattgggcaaagtctttcgaacaacaatatggccccaatgggtgggcctctgagtttgaacagcatcagtctcagatggccatgggccagatgggaggagtgaacatggccaacctggctgctatggagcaatcccgaatgcttgcacaaactttagcaagtaataatgatcccaagtttcagctttcacaaggggcggataagtgggttagtgagttctctagtcaacataatcaaggtgcgctaaatgagagctgggttgatgagttctcgaaattaaatgtcactgatgaatgggcagaggaattcagtggaggtggttttggcgaaagctctgctgatccgtgggtagatgagttccaagaacacttgtcatctttcaaacaaagttcaggcgcctctcgaggggtttatgtttattctgagaacaacccgtatgttggtcaccctaatccaatgcaagaaggacaggagctcttccgcaagggcctcttaagtgaagctgttcttgctttagaggctgaagttttgaagaatcctgataatgctgaaggttggaggttgttaggcataacacatgcagaaaatgatgatgaccaacaggccattgcagcaatgatgcgtgcgttggaagctaatccgacaaaccttgaagttcttcttgctcttggtgttagtcacacaaatgaattggagcagggagaagcattaaggtatctttataggtggcttcagaatcatccaaaatatggtggccttgtccctccgcagtcaactgattcaccttatggtcctgatgttgttagattgtttaatgacgctgctcagatgtcacctgaagatgcagatgttcatgtagttctgggagtcttatacaacctatcaagagagtatgataaagctataacttcatttaagacagcagtacagctcaaaccacaggactactcactctggaacaagcttggtgcaacccaagcaaacagcatccagagtgctgatgcaatattggcgtatcagcaggcactagacttgaaacccaactacgtgcgtgcatgggcgaacatgggaatcagctatgccaaccagggtctgtatgaggattccattcgatactatgtaagggcagttacaatgaacccaaaagctgacaacgcttggcagtacttgaggatttctcttggcaacgcttcaagagctgacatgattgccgcatgcgacgcccgcaacctcgacgctcttcagaaagagtttcctctctgagtcctccctagctttctccagcagcgatctccatggaaatggaattggaggccagtaacatttttgtatttgcctgttgattcttctgtttttattttgcttaagtgttgttgggtaaatgtataggaactaggaagtgagggggaacaacatcccgtcgatgtgtgaagtatcattgcaagaaggcaatagtggcaaagggggaattatacatctgtaagtacacaggaataaaggaatggttgagtaataaattgtttttagggcgaaccactgcttgttttataaagttaatataaaaaatgcaatgcgggtgct

SEQ ID NO: 34386 - DNA, 937 bp, Zea mays
  Clone ID: UC-ZMFLMO17261C03_FLI
ctccggacagcgccaagcgtcccttcctgcttcctccttgccctagtactcaacacatcagcgccgacgacctcgtcctggccttcatcatcagcgtcaagctgctcgcatccctgctccccaccgcaccgagctgctcacgtctctgctccgtcctccctcatctttgtgcatgagcagctcctgtacgccgtcattttcagcggcgtagtcgtgtttctccgccggccagactcctcatcgtagtgtctcggtcctcctctacaccagcacaccaagccacagtcatgggacttcgtctcgtccgcactcgccggcaccggagcacccgcgcccttgcttctgttcccatggccgctcgccgggatgctgttcccagctccacgccgatgctcgcccagaacactctctgtcctcgtcgtttacagtactcaggttctatcaatgtcttcgatctcttgctctggtctccctgttcctcaacgcttgccaggaattctgtaaaatggagacgaaccaattggagaagggagatctacaaaattttatggatgaagaagaaaatgaagttgaagagtaatgctccaaatcgtagctgtgctcgtggccttcgagtcggattaaattactgagtaatcaccggaatgtgtgggaaagaagcgtagtccaatacgacgcccgcaaagtgctcgacaaattgtctgaacctgggatcgtcgtcgtttctgcagattccgtgttgatctggttatggtgagctgacttgttgttcccccttatttgattgaatggattggatagatatattggttgtaataattatcttgttgttgagtaggtgcgttgtagttgtattagatgtttgttgaactgcccgttatttacggtgatgtagttgtgtttgtgattataaaatagatgtgtggtatttatattc

SEQ ID NO: 34387 - DNA, 1752 bp, Zea mays
  Clone ID: UC-ZMFLMO17261D07_FLI
gtcgctcagtggcatgtcgcagatgaacttaagccataaccagctcactggcggcataccggcggggttaggctcgatgccggagctcaccctgctggacctttcgtcaaaccagctttccggcgccataccgccggcgctgggaacgctgagggtcaaccagcttaatctgtcctccaaccagctcaccggcgaggttcccgatgcgctcgcccgtacctacgaccaaagcttcatgggcaatccaggcctctgcaccgccccgccggtgtcgggcatgcgctcgtgcgcggccccgtcaaccgaccatgtctcgccgcgtctccgtgcgggcctcctcgctgcgggcgccgcgctcgtcgtcctcatcgcggcgctcgccgtcttcgtcgtccgcgacatcaggaggcggaagcggcggctcgcgctggccgaggagccctggaagctcaccgctttccagcccgtggacttcggcgaggcctccgtgctgcgcgggctcgccgacgagaacctcatcggcaagggtggctcggggcgcgtgtaccgcgtcacgtacaccagccggagcagcggcgaagcggcgggcaccgtggccgtgaagcgcatctgggccggcgggagtctggacaagaagctggagcgcgagttcgcgtcggaggtggacatcctcggccacatccggcacagcaacatcgtgaagctcctctgctgcctctcccgcgcggagaccaagctactcgtctacgagttcatgggcaacggcagcctggaccagtggctgcacggccacaacaggctggccgggaccgggagcgccatggccagggccccgtcggtccggcgtgagccgctggactggccgacgagggtcaaggtggccgtcggcgccgcgcgcgggctgtactacatgcatcacgagtgctcgccgcccatcgtgcaccgcgacgtcaagtccagcaacatcttgctcgactcggagctcaatgccaaggtcgccgacttcgggctcgcccggatgttggtcaaggccggtacgaccgacacgatgaccgccgtcgccggatcgttcggctacatggctcccgagtccgtgtacacgaggaaggtgaacgagaaggtcgacgtgtacagcttcggggtcgttctcttggagctgaccaccggtagattagccaacgacggcggtgagcacggctccctggccgactgggcgtggcggcacctgcagtccggtaaaagcatcgccgaggccgcagacaagtccatcgcggacgccggttacggtgaccaagtcgaggccgtcttcaagctcggcattatatgcaccggtcgccagccgtcctcgcggccgacgatgaagggtgtgcttcagatactgcagcggtgcgagcaggcgcaccagaggaccttcgacgagaaggtcgccgactacgacgccgctccgctgctgcaggtgcatggaggtagccgccggaaacaactctccgatgccgaagtgatcgacgacgatgggaagggcggtttcgactgcaatgtctgaagaaaagcagaatgagcaatggctatgggaaccctgaccacctgaggccagaacctagcatataggacgccatgtgcttgtgcacgctctttgccagagcaaaggatagtcatcacagctcattacaacaacactgatggacagtgccaccccgtaatataggtttttatgtactgtaacagcgaaactataaaactaaatccaatcat

SEQ ID NO: 34388 - DNA, 2262 bp, Zea mays
  Clone ID: UC-ZMFLMO17261E01_FLI
cgtctccactctcccgtacgccgatacccactgacgccaccgcccgaagcctccccgagaaacaggagccggcgcggggatgtcgtccatctcgcggaatctccggcgatccctcgccccggaccgcctgcgccgcctctcccagcacccgcgagagtatgtgacgtcggagtgccaccgccccgtcgtcctccacaagcgcggccccgacatcctccacgacccctggttcaaccggggcacggcgttctcgatgaccgagagggaccgcctcggcctccgcggcctgctcccgcccaacgtcgtctcctcgcagcagcagatcgacagattcatgcttgatctgaaacggctgcagagatatgcaagagatggcccgtctgatacttatccattggcaaaatggcgcatccttaacagattgcatgacagaaatgaaacgatgtactacaaggtactaatagataacattgaggagtatgcacctatcgtttacacaccaaccgttggacttgtttgccaaaactacagtggtctgtttcgacgccctaggggaatgtactttagtgcagaagatcgtggggagatgatgtccatggtgtacaattggccagctgatcaggttgacatgatagtggtgactgatggaagcaggatattgggtcttggtgatcttggggtgcatggtattggcattgctattggaaaattggatttatatgttgctgctgctggaataaatcctcaaagggttcttcctgttatgattgatgtcggaacgaacaacgagaagctccttaaggatcctctttatcttgggctacaagagcaccgtcttgagggagatgaatatgtttcagttattgatgaattcatggaagctgtttttactcgctggcctaatgttattgtacagtttgaagatttccaaagtaaatgggcctttaggttgttgcagcgttacagaaagacttatcgcatgtttaatgatgatgttcagggaactgctggtgtcgcaatagcaggccttttaggagctgtacgggcacaagggaggccaatgatagattttccaaagcaaaggattgttgttgctggcgctggcagtgctggtattggagtggtgaatgctgcaagcagaaccatggcaagaatgttgggaaacaatgacgttgcttttgagagtgcgaggagtcaattctggatagtggatgcccatggcctaataacagaagaccgagaagatatcgatccagatgcacggccttttgctagaagaaagagtgagcttggtcaccagggcctaagtgagggggcaagcttagttgaagtggttaaaaaggtgaagcctgatgtcatacttggattatctgctgttggtggtttgttctcgaaggaggttctagaggcactaaaagattcgtcctcgtcaaggccagcaatttttgcaatgtccaatccaactaagaatgctgagtgtacacctggggaagcattttcaattctaggtgaaaaggtcatctttgctagtgggagcccatttcatgatgtggatcttggtgatgggaagattggccattccaatcaagggaacaacatgtacctctttcctggaatagggcttggaacccttctgtctggtgctcgggttatctctgatggaatgctgcaggctgcagctgaacgtttggcttcatacatgaaagaggaggaggttctcgaagggataatttatcctccaatttccagaatacgtgacatcactaaggaggtggcagcagcagttgtgagggaggcagtagcagaggatctagctgagggataccgtgacatggatgcacgtgagcttgcacgactcagtgaggaagaaactaatgaatatgtcaagacgaacatgtggagtcctgtctatccaacaataatatacaagaaggactagatagctctatttgctattttgcatatgttcaatgatcatgtatgatatactttaggctgcgttctggaaggcactccagaagtgtaggcacgttagttataagaaaacagccttcattgttcattgaccttacttttaattgaatttagtacacgagacaccttaggccacagttcctgacgtactccatggtgctgaaacatttcccatctcaaatatcatcaactgtaccactactggaactgtagtccaatccctctcagatgttaaaatcctgtgtgtaactttgaacacagaccaaataacaaagccagaaatttgcc

SEQ ID NO: 34389 - DNA, 1334 bp, Zea mays
  Clone ID: UC-ZMFLMO17261H02_FLI
aactttctgagaaatatcagaagaaatttggtccacttcgatattttgtggctggaatactgaaatttttatgtttgcctagctacttctatgaactggaatatcttccttcgccaaaggagatggccgtgaatggaaaaggtacagatcaagacaaggcccacctgtccaatgtctataccgatgtgatgcacagcagatcaaagaaagaaggaattccaagagcctccagtttgtccagtattgattctattatgactccaagtcggatgtcgcttggggatgttgatacatcaggtagtacagtggcaagcactgaaccatcagactatgtacgtggtctcgatccgaaagcaaaacgcttgtctctgggaagaagtaacattgtttcagaacctgaagaagtgctacaccctcaaccacatcatggatcattctggccaagaaccaggtccaaagcaagggctgatagaaattcagttggtataacgtctactaatgacacacggtcgtcttgggcagccccatcaatgcatgataaggaagacatttcctcaacaatatcagacccaggacctatttgggactgtgaaccaaagtgggacacagggccaaaatgggatagtgagctaacttgggagcctgaccaccccattgaacttcctggaccacaagaggacatgggaattggagcaccgatggaacttgtgccaaatttggatgagaaatgggtagttaggaaagggcactttcttggtgtcctagtatgcaaccattcatgcatgacagtgcaaagtctgagttcacaggttgttgcaccgaaggccatccatgatgacaacagcttggacttacttttagttggtggaaaaggaagatggaaattgctgagatttttcatacttctgcaattcggtcgccatctctctttgccttacgtcgaatatgtaaaggtgaagtcagttaagcttaaacctggtgcaaacactcacaatggctgtggcatagatggcgagctttgccgtgtcaagggacaggtactctgctccctgcttccggagcaatgcagactgattggccggcgatgtagacaatctatttaagcgctgtgttgaatttcatggatcctggggttctttccacttctaacaaatgtttatataactatactttctgatgggattaagcttgggttggtgttgcaaatgttgagagtttgaaccagaagcaatgttgtgaggtttctgtatatttgagcggttataggatgatatgctgattctgtttaattatgttgattttgcttatatatattcaatagagtaatttagtcc

SEQ ID NO: 34390 - DNA, 2441 bp, Zea mays
  Clone ID: UC-ZMFLMO17262B03_FLI
ctcgatgaaatctgtagtatagagttgaagcatcgttcgatcccgtcgatcgttcgatcccgtcgtcttcatcgtcgtagcaccacctcgacagcaatgcaccgattgtcaaacttcacctcgctgctcttccagcctcatgcctgtggttgcacgccttgtgcctcgcgtttgatctgcttgacgcgagcatgccttcgacgacatctactttgttgtgtttgtcatttgtgtgctactcgactcaggggagcgggtctgctctcttttggcttttggttatgtttatgggcaaggtggtgaagaagagagatatgtgcccatcactcgccagatgctcaagaaaaggtttgaaccgtagatcatcgtcgtctctcatctgttaagtcgattcagttatggtaagctgatttgtttttacggttagttggattggttagttatattgtggcgatgctttgggaagaatacctttcttattttttttgtgtgttatatgttgccataaggtgtttgcagtaatatttcctatgcaatagttgtgtcatgtgttgttagacttgtatgcaaggcacgattaaattaataatgtaagaagtgggattagcatttttgaaattgtctagccggtagtacttttagtgttacttgagagaatccttattacatgatgatgatgatcccttgcgttatagtagcatcgatcagtcgtttttaattgaaacctaagattttcataatagcaagtgcgcataaacgctttagatatttgggttgttacaaagcagttttgcagaactatatgtgatatgataatgttctacttgttgaattatagataaatgagatattttgtttagttggcgtgttagtcataatagtctagaataataattataaaactagttgaatggcttatattcttattctaagtcgtggatgtcctataatggtgagtcggaattttattagattatcaatgttatgctttagctaaggtttatataggacttgagcttggtttattattttaatgtttgtgttagatccagttaagttggaaaaacgtattagttgtacttagtaatatatctatatctaatatttgcttatgtgtgttgtaatgtgcctcgctgctaaatgtgcaattctctattgtgtagcatcatcatagtttgtgttatttgctatatgattcatgcatgtgcattatgcatctcatgaggtacgctagtggaacacgtgatgcggaggaccaaagatgagtcgaccacaagatgatgctgatggacgaacttgaagatggataatctaaacaagtgcgaagacaaaagatggtcgccacctaacaaacactaacctagtgttatccaggcaagccccggtacatttgccacctccttgctgttttaaaatctttatcaccttgtttgatgcattaggtgataggagttatgtgctaaacaattgatgcatttccttccttagaaaattgattacccttccatgacacccttttataaaaaggatttttatgatgcttagccttgctttagaaaaacaaaatgttttgttttaaaacaaaagtgatgctacagattggatgggaagttttcaaaattaaaacttgatggtgaatccatcatggccgtgatgggttcaacatctgaaaagatgtacctctgccaggtaccaaactttgggttttaaatgataaagctgagaccaggcggttgacttgcacgagaagggagtctcggtgtagtgtctccatctgagtcgattaaggaccgtgccgatgtaggcctgatgatcgaggaccttttaactggccacatgcctcatcatgggtaagctttgcctcgggcagactaataccagaaaggccaacacacaatgggagtggggagatgtcgagagtagcgtgtaccctccatggcaagaggctggacggtggtgtatctgtgctctcggttggcgtgaacctggtctggtcttaagaaacccagtggcgagttgacatatgcaagggttaagtgctacatatgtcgtgtgattggagatccccagctgggtattaatcgattcggatcgccattacttctcggacatgaagacttggtcactgacttacacgtagcaatccagtaaagtaaaggggtgataaaaaacggctagtgcaggccaagtgcttgaactagaatagaaagaactctagatgcaggtaactttacttaacctgacaagtaaaaaatggattttaaggatccactcatagtaagcttttctgcaaacagagtctttgattcttgataagctttaccttgattcccaaaagccaacatatccttaagagtctttttccttagacgggtaagacttgcgaaagtacacttcgtactcagggttttcgaacccatgttgtcgcaggtactagaatt

SEQ ID NO: 34391 - DNA, 1744 bp, Zea mays
  Clone ID: UC-ZMFLMO17262C06_FLI
gtctctctctgtctctgtctctgtctctctctctctctcgtcccctctcgctctcagacgaccggtgggccgccgccgccgacgccgccgccgccctaagccaggtgctgaggctcttgttggtctcttcgccggcgaggagcacccagcaggatcagtacaaagacgatatcaaatatgaagagaaacaggctcttcacttgcaggtggacaccgaggaaatcggagtgcaaagctttgatctttatctgccacggatacggagccgagtgcagcatatccatgggagacacggtcgctcgattagtacaccatgtatacgctgttcacggaatcgaccacgagggccacgacaaatcttcaggctcgaaaggctacttgtcgagcttcggcgacgtcgtcagagactgctcggaccatttcaagagtgtctgtgcgaaataggagaacaagctgaagaagaggttcctctacggcttctccatgggaggaaccgtggtgcttcagctccacaggaaggatcctctctactgggacggtgtcgtgctgcttgccccaatgtgcaagggttattgtatattaacagccaacagtagtgtcgaaggagcacaagatgaggtgtgagcttagtagagctgtcatttatgaacacacgtgagacagcttttgcccttaggaagttgtcactcaccaaggccaaaagttaccttgaggatgtgatcgcccacaagcaggccatccctttccgcaggtattgtggtggtgttgggcgtactgctcaggctaagtctcgccactcaaatggtcagggacgctggcatgtcaagtctgctagattcattctagaccttctcaagaatgcagagagcaatgctgaggtgaaaggacttgatgtggataccatctatgtgtctcacattcaagttaatcaggctcagaagcagcgacgcaggacataccgtgctcatggacgcatcaaccataagtctatctaactaaagttgaaattttgctatgcgatgaactgttcttcatttggagcttaacattctgtttgcctacctggtccagcttacatgtcctccccatgccacatcgagctcatcttgtcggagaaggaagagccagtgaagaaagaggctgagtctcagattgcaaccaggaaggcttagagaaggggctctatcttctgtgattgacttagtgagctgaagtcaactaaggtgtatgagaaatgggctaaaaagatctcagggatggagccaccaacaaatccgctagagaggagagcgaacgtagggttgagcggaaaaaacagttcaactccatcctctcgaacatcatgtccaagtgtgactccaaggcgagcagctcagagcccacagaagaagagtttgagcaagcgcaacagaggctggagagcagaagggccaagaggcgcaagtgatgctgctgccagccttcttgccctatgctgaacattgtctgaaccttttggtgtgacctgaatttaccagcatgcaagtgatggttctaagacccagttttagcgtgtcaaggtgtgtgtcatatctcttgtcctctcacggtacactatgttgtatggttatcggcttatcaccttgtcgagagggaagctctatttgacttgaaagtatcatgacatattttaccgcgacaattatcattacacatttcttcaagttatgttgcaagaataaaaattggcttcagtttcaaaatt

SEQ ID NO: 34392 - DNA, 2775 bp, Zea mays
  Clone ID: UC-ZMFLMO17262D04_FLI
gcgcttccttccgcctctcctccccaatcccatcgacacctgtaacgcaagtgcacatgggggacggcggcggcggtatcggcaggaggccctcgacctcgaggcgatgacgcgcgcgcgcgcgaggggtctctgggcgctgctgctcgttgcgctggtggcggcggcggtggcgcccggggcgctggtgctggcgcagggagggaccctgacgtcgcggtcggatctcgtggggctgtacgcgctgcggggctcgctcggcctgagggcgcgggactggccgcggcgtgcggacccgtgcgcggcgtgggcgggcgtgggctgccgcgccggccgcgtcgtctcgctcagcgtcgccgggctgcggcgcacgcggctggcccgcctgtcgccgcgcttcgacgtcgacgggctgcgcaacctcacgcgcctcgaggccttcagcgccgcggggttcgggctgcctggctccatcccggcgtggctaggcgccgggctcgcgcccacgctccagtccctcgacatctccgcctgcgccgtctccggggagatcccggcctccgcgctcctgggcctcggcaacctcaccaccctcaacctcgcaggcaaccaactgtccggccaactcccggccaccgcgctcccgaggctcacgcgtctcaggacccttaacctctcgcgcaatgcgttctcgggcgccctgccccacgcggtctggtcgctcccggggctcagcgttctggacgtgtctcgtaacaacctcaccggcgcattgcccacgccagggcttgcgctgccagccaatgcgcaggtggtggacctgtcggggaacttcttctatggcggcgtcccagagacctttcgtcggctgttcgcccaggtgctgcttgccaatatttctgggaactactttgacggcgagctaggagtgtccgacggtggtggcggcaatgtttcgtttcagttgaattgcttccttgatgttctgggacagcgtacacaggttgattgccagcagttctatgccagtcgtggcttgccttatgatggtccagttatcccacccgcaccacagcctgcaccttcaccggtaaggaagaagcacaagaatctgaagtacatactgatcggggccattggtggaggcctcctgctgatagccgttgttgcagccattgtgttctgctttgtgtgttctgggagtacagggaggaggaatcatcagagagaaagtggggcatcaccaagtgcaccatcgggagtgtcagctaccggcacagctgcagctactggtggcacgcagccttctgcattgtctgcaaacacggtgaaagtcggcgattcgtttgcttacgaccaacttgtcaatgccacctcgggatttggggaaaataggctcatcaagcacggtcactcaggtgatctataccatggtgtgctccaagacgggactgccgtggtggtgaagaggatcacttcgcgtgtgcctcggaaggatgcttatctggcagagttagatttgtttgcaaaaggagtgcatgaaacgctggttcctttgttggggcactgccttgataaagaagaagaaaaggttcttgtgtataggtttgtccgaaatggtgacttgtcaaatgcactgcacagaaagtcaagggaggaaaatgaaggcttgcaatctttggactggattaagaggttgaagattgcaacaggggtagctgaggctctttgctatctgcatcatgagtgttctccaccaatggttcacagggatgtgcaagccagcagcatccttcttgatgataaatttgatgtgcgtcttggtagcttgagcaaggtgtgtcctcaagaaggggaagggcaccaaaatgttatcacaaagctgttaagattttcttccagatcaaggttcttctggttccccatctgcaacttgcccatatgatgtctattgttttggaaaagttttactcgagctggtgacagggagacttggtatcagtgcatcaaacaatgctgccacgagcgaatggcttgatgccaccctgcggtacgtcgatatttacgagaaagagcttatgagcaagatcattgatccaacgcttattattgatgaggaccacctggaggaagtctgggcaatggcgattgttgccaagtcctgcttgaatcctcggtcttctaaacgcccaccaatgaagtacatcctaaaggcactagaaaaccctttgaaggtggtgagagaagacaatggcaatagctcggccaggttgagagcaacatcgtctcggggttcatggaacgctgcactctttgggagttggcggcatagctcgtctgatgtaggtccttctagggacgacaacattctgaaacgctcagagacaatcagatcgtccggcgggagcaatggggaccattcttcctcccgcaggaggcaatccaaggagatcttccctgagccgtctggctctcgtgacaccgaggattaaggggctgtttggttcgtatctaaatgtgccacactttgcctaagattagtcgttcgaattgaagaactaaccttaggcataaaagttaggcaaagtgtggcaacttaggcataaccaaacaggccttaagcgtgaaggagaatctttcttactaatcactttttcggtaaggcgggagtccttatggaggagggctctgttagagctccgcttgctgcttctgatagaattctttcgtccaaaaagtcaggaatgtgaattctctctcctactcaatggcttc

SEQ ID NO: 34393 - DNA, 3025 bp, Zea mays
  Clone ID: UC-ZMFLMO17262E06_FLI
ttttggaattacgccgccggacgccgttgcgtgggagagagcaaagtgaaccaggccgaaaccgaagctaccgccacgcccaccacccccgcccactgcagcaacgccggaccctcgtctccctgtccccgactaccaggaggggatcccggcggcgaggatgagcggcggcggtgccggagggaagggggcggcggcgcccgtcccggccgggtcgaggaaactggtgcagggtctcaaggagatcgtgaaccgacccgaggcggagatctacgccgcactgcgcgagtgcggcatggaccccgacgaggcggtcagccgcctcctctcccaagatactttccaagaggtaaagagcaagcgcgacaagaagaaagagattaaagaagttcctgagacaagatatcgatcggcaaatagttctactaatcgaagccttagaagtggtgcagatcgtggtggacgtagcaattctgtgcactccagctctactgataacatgacctcaaggccaccagtctcagggtcttgtacggcatcagttaattccaatcaaatgcagacaattgcaagttcctctgcaaacaaacatatggttactgatggactagctgtatcattgcaatcatcgtctgggtttcagcatggtggttggtctgggacacctggtcagttgtcgatggttgacattgtgaaaatgggtcgccctcagggaaaggcttctagcaaacctgtggtcacagctgacagaggttatgctggacagtacccatctttgccaagcacaaaccagaacctcaaacaatctggaagcatggtttccccagcagagcttgacaaggggttacaacctgcccacaatttggttcaggttaagaatcatggtcattttactgctgatagcaagctcccatatggtactgattggtctccacaagacgacccaacatctgagaaccaatcttcccagcctgagacgtctggtgatccatctttgtatgaatcatcatttcagtcatctacattggttactgatgtagttaattcacatgaaaattcacacttggagttggatgaaaacagcacctttgcaatgagatcaacacttgcctctgagagacacttggaacctagtgacagtattcctgaatacaatgatggaatattgaacaactcaagttcatatcagcctcataattactcttacacagaacaagatgttgaggattccagtgctgatgtatcagcagcagcagaaaatttccagagtttaagcctacataatgatgagttagctgcaaaaaagactgctgaagataaccctgcagtgataattcctgatcatttgcaagttaccaatacagaatgtgttagtttgagctttggcagttttggatctggtgcattttctgggctactcccacaaaagaccactgatagcaatgtggaattccttgttcgagaggattctgcaacagtagatccaatagatgccaggaatcaagattactatgaaagtggtgcagtaacttcaccagcagaagaaaatcttgaggccatgctaggaactaacatggagaatgtcgatgcaccttctgtttcacaggctaatgagctcagccaggacgtacttgatccttctatacttaaatatgacgtgccatcagtttcaagtcatgcttattcgaacatgaacactccacaacctagcaaaatagaggacccacaaggaaacaaccaagcacatacactttcccatttgtcaaacatgatgcaagcaaatcctttgagcactagcagcctattggcgtcaaatcaaaatcatccatctcttcatggcatagagtttgatttgctttatcttgaagcaaaatataacacaggctcgactacaaatcctagaccagccatatccatgcaggaggccctgaaagcaggggttttctccaacgctcggtctacgcagtctcttccaagtactagcattccgacggggcatcctctccctcagcaattagcacatcacccttactctcagccgactttagcacccatcacacattttccaaatatcgttggctatccgccgtatttgccacaaaactatgctgcttacctatcttcgggcaccttccagcaagcatacccgagcaatggagcattccatcagtctgctgccactttgctcggatctggtatgaagtactcggcccccgagtataagaacaacctgtctgccacaggcttacaacagcaacatcagccacaaccgcaaccaccttcatcagtcatctctggttatggaggctttggaagctcaagcaatatacaaggaaattttacccttaatcagagtaccggcactggatcaactcttgtgtttgatgatgcattgggcagacagtacaaagacaccagtcaacacatagctctccagcagcccgacaactctggaatgtggcttcatggctctggttcaagagcggcgacgcttccgcctaaccacttttatggttaccagggacagagtcagctgggtggctttggtcaggcgcagcagcaacagccttcccaattcggaggccacgggtacccgactttctaccagtctcagggtgggctgacacaggagcaccacccccagaaccttgctgagggcagcctgaatggcttccaggtcgcaccgtctcagccgtctcatccgagctggcagcatcagcacacctactgagcattgttctcccttgttatggtctgtctctttcgccgtcacaagccaagtttcgcgtgcttgtgcccttactcgatgcagagtaagctgctcggattttagctgagcttgtaccttcagcgctgagaagggtcccaggcatacaacagtcagagcgttttaacatgctgcgtgcgtgcgtgtgtgtgttgccagaccgatgccttgtggtttttcgatagcgagttatatgtgtggaggcgcagtcatgtattactgagacatgataacataacaaccaatcgtttcgcttgc

SEQ ID NO: 34394 - DNA, 2029 bp, Zea mays
  Clone ID: UC-ZMFLMO17262E08_FLI
gttaaaaaacaccgcaattaaccagctcaccctggctaacccaccaccaccaccataccaggagagagaaaagagagaggcacctccactcgtgactcgtgagtcgtgagtagtgactcgtctggtctcccctctctcgtccgtctggtcctcccgtccagaggcgttctctctccctccccctttcctctggtcatcgcacccgtctccccgctctgactccgcccgcgccgccgactcccggcacggccccccaggcttcatctccgccgccgccgtcgccgccgcctcgctccgatcgacccccgaaacgccggaaaccgtgggcttcgcgaggttgcctctcttcgtccaagcggtagataacataacagtgcgacaggtgaattgcagagagaagggggggcatttggtcgctgcatgatggcggaaggccccaatttcgctggcatgattggtggccatgacaatggtggggatttctgcgacatggcatactaccggaagctcggtgagggctcaaacatgtcggtagacaaccttaatagcatgcagaccagcacacatggtggctccattgcaatgtctgtggacaacagcagcgtagggtcctgtgactcccatactaggatgctcaatcaccctggcctcaagggacctgtcgttggcaattactcggtcggcgggcacagcattttccgtcatggacgggtgtctcacgccttgagcgacgatgcgctggcacaggcgttgatggacccaaggtacccgactgagacactcaaggattatgaggagtggacgattgatttagctaagctccacatgggaatgccctttgcacagggcgcctttggaaagctctacaggggtacctacaacggtgaggatgttgccattaagcttttggagaggccagaggcagatccggagagagccgggttaatggaacagcagtttgtgcaagaagttatgatgcttgcaaccttgaggcaccagaatattgttaaatttattggagcatgcaggaagccagtggtttggtgcattgttacggagtatgccaagggcggatcagttaggcagtttctggcaaagaggcagaataggtcagttccactaaaactggcggttaagcaagcactggatgttgcaagggggatggcgtatgttcatggtcttggcttcattcatagggatcttaagtcagataacctcttgatatctggtgataaatctatcaagatagctgactttggagtagctcggattgaagtaaaaactgaggggatgacacctgaaacgggaacctatcgttggatggcaccagagatgattcagcacaggccatatgaccaaaaagttgatgtctacagctttggcattgtgctgtgggagctcataactggcatgctcccttttgctaatatgacagcagtgcaggctgctttcgctgtggtgaacaagggtgtccgcccagctataccccaggactgcctgcccacccttgctgagatcatgaccaggtgctgggatccaaatcctgatgtccgtccgccattcactgaagttgtgaggatgctggagcatgctgagatggagatcctgagcactgtccgcaaggcccgatttcggtgttgcatgtcccaaccgatgactaccgactgaatcaaacaagagagttgaaatgaactccatggaagcgtaattgagtgtatttatcatgtgtccaaacttcgctcagctgaagtagaaagcacacctgagtttatggctgtatgtgtgtatactcaggtgtaagccttgttgtctttgaaatattcctgcacttagaaatatacctagttcgcgttttcagactcttgagatgttttagggctagtctatgtcctgtcgaaacatcatgcagggttcctattcttgtaatgttcttgtgatcctgctactggaatgtgcctcctactggaggtggtctgttcatgttataaccctcctactggaatatgcacaaatacttcgttgcttgagc

SEQ ID NO: 34395 - DNA, 3149 bp, Zea mays
  Clone ID: UC-ZMFLMO17262G05_FLI
ccgctcattcctgctgggactgtcctggaagttcgacaggtgatagacacattgtctgattcgctacagttatgctctatgtctgagttgtcattgcccgagccagttacaaagttgttgcagacctttgcttctgtctttgatactcccgtttcactacccccaagtcgctcctgtgatcactctatacctttagtggacggggctcggcctatgaacatccgaccctatcggatttctcctgcactgaaggacgaagtggagtcccagattacagagatgctgaatactgggttaatctagcacagttctagctccttttcttcgcctgtcctccttgttaaaaagaaggacaattcttggcgtttttgtgttgattaccgccacttgaatgctctcactgtgaaatctaaatacccggtgcctatcatagatgaactcctcgatgaattatttggagcagcatggttttctatccttgatctaagagccggtttccatcaaatcttactgaaagccggtgaagagcacaagacagcttttcaaacccatgtgggacactatgagtttcgtgtcatgccatttggtctcacaggagctccaggcactttccagaaagccacgaatcatactcttgcacccttgttaaggaagtgtgtcctagtattttttgatgatattttggtgtacagtcagacctttgaggaccatattcaacatttaactcaagtatttcagttgttggataaggaacagtggaaggtgaagctctctaagtgctcttttgctcagaacaaggttgcttatttaggccatgtggtcagccctgaaggtgttgctacggaccctgctaagattcaggcaatcacagattggccaacacccaaatgtctcaaggatctgcgcagttttttgggcctagctggctattataggaagttcatcaaacattttgggattatatgccaacccttgacagccttgcttaaaaaaggagtgttgtttatatggacaaatgaccatcagtcggcctttcaaacattgaagcaggcccttgggtctgccctagtcctatcacttcctgatttctcctccccattcactattgaaactgatgccagcgatataggtgtgggagctgtattgatgcaaaaaggtcaccccctcacatttctcagcaaagcattgggacctaagttacgtggtttatcaacttacgaaaaagagtatctggctgttattgtggcagtgcaacagtggcgtgcttacttacaacatggagagtttgtgattctcacagatcacaaaagcttgtctcaacttaatgaacaaaggttacacaccccatggcagcataaggtgttcacaaaactcctcggcctacaatacaaaatccactatcgccagggtactgataaccgagtggcggatgcattgtctcgctgttgtcagtccgacttgcatgctatgtcagtgatcacccccagtggctacaggatgtccaacaaagctacctggatgatgcagagtcccagtcaatgattgccaaacttgctatcaacgccaaggctgtgcccaactttgtatttcagtatggcctgctccgttataaaggacgcatctggattggccaggatccctctcttcagtcccgtatagtgtcagccttacactgtgcggcagtgggagggcactctggtgtgccagtcatatactgccgtgttaagagcttgtttgcttggaaacgactaaaatcctttgttcagacgttcgtcactgagtgccaaacctgtttacaagctaaaccggatagagctgcatatcctgggaaacttcagcctctttcggtgcctgttgtagcttgggatattatatcaatggacttcgtcgaaggactccctcgctcgggcaatgctgactgcatcttggtcatagttgacaagttcaccaaatatggccattttataccactttctcatccctacacagccctgtccgtggcacaatgctttctaaatgaagtctatcgcttgcatgggttcccatcagctataatttcagatcgggatccagtcttcacaagtcaattttggcaacatctattttgcctcagtgccaccgagttgaaactcagttcatcttatcacccacaaacggacggccagaccaaacgtgtaaaccaatgtttggaaacatttctccggtgctttgtcagtgcatgccccaccaagtggaaagcctggatccctacagcggagtactggtacaacactagccctcattctgctcttggtcgctctccctttgaggtcctgtatggcaggaaaccaaggtctttaggcctgtctcttgacatagccattccagccacactgtctgaatggattcaggaacgcacagcaatgcaagccttagtccgtcaacacctcatccgtgcccaggatcgtatgaaaaaacaggccgataagaacagatcagagcgctcctttgtggtgggtgactgggtatatctgaaactacagccctatgttcaatcctcagtgcttccccgtgctcaccagaaactgggtttcaagtatttcggaccatatcaggtgttggctcgtgtgggtgccgtggcatatcgcctccaactttctgattccagccgtattcatccggtgattcatgtatctcagcttaagtttgctgcaggttttaagggtgaagcttctactgctcttccagtatctctacctgagttccgtgtgccggagcaaattctacaaaccagaggtgtcaccaagggcaacagattagtccaacaggttctggttgcctggtctggtcttccacatgatctggctacttgggaggacaaagaggcgctccgccaatgcttcccccgtgctcctgcttggggtcaagcagattttcaagggatcgggagtgtcactaccactggaatgcagggcgatgaacagaacgtgtagcttccaggcgaccgcagccagcgcgcgaggcgtgccaatgtacgcgtccatgggccggagtgggccaagtaacgtgggccgcgtctgtaagggtattaatattgtgtcgtgtccgaggggaaaggcatccaaaacatgaacaaacgattgtcttcctgaataatatacttcgtcttc

SEQ ID NO: 34396 - DNA, 1318 bp, Zea mays
  Clone ID: UC-ZMFLMO17262H09_FLI
gttccgttgtaaaatatattcgtaaacggacgccggccaaaatcttcttgtggtttgaagaatacatagaggagctcgtccagacgaacgccaccggagccaagaagaagctctgtgagggcacgttcttgaacccgggctcctggggtgcggcgcttctagcggccgggaccacgctctcctccgcgaagcacatactagacgggcaggggaacctggcctacgcgttggttcgcccccctggccaccacgcgcagcccgaccacgccgatggctactgctttctgaacaatgccggacttgctgtgcaactggctctggattccgggcgcgcaaaggtcgccgttgtggatattgatgtgcactacgggaatggcaccgcggagggcttctatcggacagacaccgtgttgacgatgtctcttcacatgatgcatggttcttgggggccatcgcatccgcagagtggctccgtcgatgagattggtgagggcaaggggcttgggtacaatctcaatatacctttgcctaatggaagtggagatgctgggtatgaatatgcgatgaacgagttggttgttccatcgattgataagtttcagcctcaactgttgtttcttgtggtcggccaagattccagtgcgtttgatcccaatggaagacagtgcttgaccatggaaggctacaggaaaattggacaaataatgaggcgcctggctgatcgccattgcaatgggcaaatactggttgtccaggaagggggttaccacatcacttattcggcatattgtctgcatgctacactggaaggagttttggatctggaagccccgctgcttgatgacccaatcgcttattatccggaggatgataaatacactatgaaagtcgttgacatgataaagagctactggaaggaatcggttcctttcctaaaggaaatttagaggaaataatgttcgcgccctcaatgttcaaattgcaggaaactccacattcctggacatcttcaattgaattgggaagaacattgcacgtctacgttttcaggccgtttaagattatctgattgacagtttcacgcctaacattgtacaggatagattaagaacattgtttgctgctgctcttgaatttctgcaatcaggatctcgtcagcctatttttgataaacagtcgatcttttttttttccctgagatgcttttggcggcagtagaaggtaggcggtgcttgagagtgacagagggccatgtaaccaggggataaatcttgattgactagtccaagcaaagggtgatgctcgctaccagaacttg

SEQ ID NO: 34397 - DNA, 1634 bp, Zea mays
  Clone ID: UC-ZMFLMO17263D12_FLI
cttcaagtttttagggattgtgctctgcaggacattggcttaggggagtaccctggagtaaaggatgcttggatggaagtagtggcatctcaaaagcagtcattgttgtcggttgatatttcttgctctgaagtagctgatagtgggatagatcttcttagagattgctcaagcatgcaaagtttggcatgtaattactgtgatcaaatatccgaaagtggtctgggagtactgtcaggattgtcaaacctatcttctttaagcttcaagcgaagtaatgctgttactgctgaaggaatgagagcctttgcaaatttagttaacttactaaatctcgaccttgaaggttgcctaaagattcatggtggccttattcatttaaaagatctgacaaagctcgagtcattgaatatgagatattgcaattatattgcggattcagatatcaaatatttaacagatctgacaaatttgaaggaccttcaattgtcatgttgtaagatcacagatctgggggtgtcgtatatcagaggcttgcagaagctcactcacttgaacctagagggctgcccagtgactgctgcttgtttggaagctatttcaggattgtcttcattggtattgttgaacttgaaccgttgtggtatatacgatgatggctgtgaaaactttgaaggtcttaaaaggttgaaggttttaaacttggggtttaactatattacagatgcttgtttggtgcatctgaaagaattaatcagtttggagtctttgaacttggattcgtgcaagattggagatgatggtctatcacatctgaaaggtcttgtgctactgcaaagcttggagctttctgatactgaagttggaaacaatggactccagcatctatctggtcttcgtaatctgcaaagtattaatctctcatttactttggtcacggacattggtgtgaagaagatctctgtgttgaattcgctgaagtcagttaaccttgacaatcgccaaattactgatgttggcctggcagcacttataagtctcactaggctgactcatcttgacctttttggagcttgcataactgacaatggcacaaattgcttcagatattttaagaatcttgtttctcttgaagtctgtggtgggttcgttactgatgctggagtgaagaacatcaaggatctgaaggccctgacgttgctgaatctttctcaaaatgctaatctgacagacaaaaccttggagctgatctctggcctgactgctttgatcaacttgaacgtgtcaaactcacgggtgtccaatgctggtctcaaacacctgaatgacctgcacaacctgcgttcactgtctctagattccacccgggtgacggcaaacgagatgaggaagcttcgagcaacagtgctgcataatctgatcagcatgcggccagagtagtacccatttggcacctgctgtaaataatcattaggttcgagcaggttgttctgttggtaagtactgccttcgttctcgaatatttgtcgtccgctagttcatttttgaactagaccgcgataaataaaaaagaacggagggaatatcttgtaagaacctgaattgaaggcaggcatataattatataagttaac

SEQ ID NO: 34398 - DNA, 793 bp, Zea mays
  Clone ID: UC-ZMFLMO17263E01_FLI
tcatgggcagttttggagctgattatacatgatggtgcagcgttccacatgggatgaggtgtgaagttgagctgaaaataaaagtacgaggacagaaacacactttgatagttcatgaatgattttttgaaacttttttgaaccgggaaaacagcaagatttcaatgtcagttaccaatttgtgctggtgctcttcactctcgttcgatctgaacgtgctggacccggtggttgatgggatgaacgtgcgttgcgtcactctgctacacctctagcagcaaacgtgaaccgaccgcaaacactcccccaaactggtactataggatcatccgcgctttcatgtggccgatccgatggagtagtgtgtagccggacccgcccaaactgctgctatcgtgttgctatctatctccatagaaactggttattactcttgacatggggctccttgttgctgcaactaaatatcgaggagagtttgaagagagactaaataaacttatgaagcaacttaagccaaatgaagacataattatctttaggcaaataatgcttataaggtgaggaactgcccttgtcatcattctgcaggacaagtgttagtgaatgggaggcttgagaagcattggcatggatactgaggtgtgtgtagagcctgttcagctagccacattttgttcatcattgttcataatataatttggtgaatgataaatgatatatgtataccacaacaccatcacatgcatttgtttatgacataagatgagcaacattaattgctttgtttggc

SEQ ID NO: 34399 - DNA, 1196 bp, Zea mays
  Clone ID: UC-ZMFLMO17263F02_FLI
aagcacgacgacagcgcatatttcgagatacagagcaatatgatccatcttcttatgaggagtatctgcgctggtactcaggagcaacacggcggtaccttgtcccagcaaccagtgacgacggtgaagcgggaccttcagctccaactgacgatttctcagatcttcagtaccaagccaaatctccaataatccgcaaagcagttgataaactggaaagcatggttaagaaagccaagagagccatgacaaccacagctgatacaaccactcaagccttggttgctgagtttctgcttggctttgaggatgtgttacaagatcttggcgagatccagaataatagtggttcaactgttccaccttttcacttggatagtccacattttgatgcagccgcaagtcaacagacacctcaacttttgcttgaagctgaggaaaatttagataccaacaaccaagaagcacaactagaggaagatgaagaacttaacacagtggagcgtgcttcattggcactggagcctgtggaagagttaaacgacttctccaacgacgtgctccctggaaatctttcactgggcgtggaggaagactgttattcagccacaccagccaatgggatttgtgatgcagccactcccatgaccgatttggttgttcctcggtcagatgagggtctccatcaagatcaacatctagaagaccacaccgaaattgagccggctacattgatggtggagcctaagtgtgaggagggcgatggttccagcttcgtgctcccaccaagccctccagaactgatgctcgaggaacaggacgattcagggttaatagctctaggtactggatcatgtaccgaacagcagagccttggagtaggagaggctgaggatcaggaaaaccctagcacaggcacagctcagcatggcatcatgatagtggagcgtacgggtgaggagaacagcagttgcaatggcgtttattcttcctgcccaccgtcatctgtcattgttgaatcgagcagtgattatctgtgttagttatgtagggagtagaagctttttttatatttaaagatctgacatgagattgttagttcctttgttgctggtggcatggggtttgattctgtaacttgtttcgtcgtgattgtcttgataatttgagccacaagccccacgtttgagggtctt

SEQ ID NO: 34400 - DNA, 4726 bp, Zea mays
  Clone ID: UC-ZMFLMO17263G04_FLI
cccaagcggacctcatcccctccgccctccgcgtcttctccctcctcagccacccctccaccgcctcctacaccaccgtcctctccgcgctctcccgccacggccgtccccacgacgcgatctccctattcgcgatctccgcgtccgcggtcgcccccgacgccgagctcctctcctgcctcgtctcatgctgccgccgcgcgtccgccttactccccgcgcgcgcggcgcacgcatacgggatcaagaacgtggcggcgctggccttctacgcctcggcaggtccggcgctggtcgccttgtacgcgagccgcgggaaggtcggtgcggccaggagggtgtttggctacatggatggcttggacgtggtgtcctggaacgccatgatcggcgggttcgctagtgccgggatggacgaggagtcgtgggcctgcttccgggagatgcactcgagaggtgttcgagggaatgcccgcacagctgtggtggtgctgggatcttgtgacatggagtccggcaggcaggtccatgggactatagtgagtagtcatggtggttcttcaaacgccattttgtggaacgcgttgatgagcatgtattcgcgtgccggctgtgtcactgatgcagagagggtgttcatggagattgtaaagaaggatgttgtgtcatggaatgtgatgataggagcgtttgcgaagaatggatatggagaaagggcccttgaatttgtggacatggtgttgcagtgtggtatgaagccagactctgtgacattcacggccgttctcatggcatgctgccattgtggcttggttgatgaagggcttgtactattccagcgctttgtgtcagttgttgggctcgttccaactatggaacagtgtgcttgcattgtggacttgcttgcacgtgctgggaggtttctggaggccttggaatttatcggccagatgtcagtgagaccaaatgcagttgtctggggtgctttgctgtctgcaagtaggatgcatcacaacgtggaatttgcaaagattgcatttgaacaactggttcaggtggagcctgagaatgctgggaattttgtgacaatgtcaaacatatatgcaaaggctgggatggtagaagatgcaaagagagttaggatgatgattgatagtgtagagttagcgaaaccttctggaaaaagctgcgtggaaattttgtagtaaagcataagactccatggatttgtcagggtttcacatcttcaaagaggaaaggattgcaacagggcagaccaaatcatgcgattagtgatatgaagagatttgaagtgcctgcatgttttgatgcaaccaggaagctgactgaagatgaatatcagcaaatgttaccacaacagatataataaaacttatccagcaacatatactgatctccttattacttcacatgaaatggtggcaaaataaaacgtatccaggatgaggatggagtcaattcgaaactgctgccgttccctgcatgcataactcatctcccagcacccatccgacaacaaaggattgatatggagaaagggctccttgaacttgtagccaatggtttgtgacttttaaagacaattatgcatcatggacataattttatctagttcttagttttgatcattcgtgaatgttcttgtttctaatgagagctatctcactgagtcaccaggtcgtgacttcaaagcagtctctccatatttgcaacggaagacttttttgcctcattctctagacctcactcatgttggagcctccgacattgggtccgtcctgcctcaaatgttcttgtctgagagccttcatagatgaagggtatttattcagtgatacagtagtggggttcattatctgcaccactttgatcaataaattaatgttttatattcacatacaagcttcttgttgtgcatgtatctattgtttcttttggtaaaatcaattgtgacacaaatctaggctttgactgttttgttgcccatcctgattcttatcttcagcgaaaaggcctctagccgagttggttagatggtccgagtaacactccttaggtattgagtttgaatcctagtaagagcgaattttaggctgagattaaaaaaggtcactcgctgttcactggtcgtgtgcacacgagatggactaacctatggagacggatcctcgtgtaggggctaggaaggttcaaagcacgagtaaagatctggcatatagggggcggtggaccaactttcgtgacctttctcggtcggggatccgattaagcttcttcttcatttaataccgtaggggcggtctttcccctaccagccgagtttttgattcttatcttcaatgtttcttcttcagttagtaacaaatttgttgagttgcggcttgaaaggatggcagacaagaagatcaaagggactgattcatcttgcattatctcttccacaaaatatttgcaaagttcagtagggcctaagctaattgaaggtactaatgaagatgattcaggaggcctaagctaattgaaggtactaatgaagatgatctcaataacctccagaaaacagtaagtcacagtgccaattttgtggcatcgatgcagcaagaacatcctataagccttgtattggctgagaacaaaagcaatttgcaagaaattttagttgaacagaagattcctacaggtgtttctatcaatctttcaccaaaaatggatagcagtgaagtgccacgcaaggcttatagcagtgaagtagatgacccaaacacaatgaaatcaaacacatctagttgcatgtttgaggcatcaaagcagcaagaatgccctataagcctcattttgcttgacaagaaacgcgatttgcaagaagtttgtgttgaacagaatgttccttgtggtgattatgttgccctttcaccaaaagcaaacagtagggaattaacatcagccaatgaggttcctgatggttttttaactttctctagaaaggcttatgaatcaaaggaagcccaaggtgattatatcacattggaagcttcagaagtaaatatatgtgcagcttcacactccatgcttaggttaattttaggtgtccaggttgaggcttcttgattgattctggtaaggttacttatgaaacaccacctgccatcatgaaaagggtgaaagaagatagaccactgatcgcctacagatttcataagcgccaaatgagcctaggagacacacggcactgagcagatcataacaccagcaagtacttaagaatgcataaaaccattgttcatactacgactcccattgaatcagtgaaggttactgcttcaaagttgggtgacagcatcaactagaaaactcacaggacacacgcagcacaggtaacttagaactgctatcccgtcctcataaatactttttatatgtattaaactgtaatagctctgcgacatacactcatttgtttctataagcaagaaagtgaccatatagtgcttgggtttgataaactaaagaacgaaatttcagaatgtaaacatcaaactgaagctgcaaaattatcagtattaaatgagctgcagagaacaaagaaagattctcgagatggagcccgctaaaaactgtagatggaaaagcttccgcaagatgatgtggtgcggtggtgccaagtgctgctattaattatgcagtaaaggggattaggtattcacaattgtggttttgtggtgatttcatggatatttaatagtgtgtcacatcaaaatttttaatgacatggtataacctttaagatgattgagttttatgagataaaattattttcatagggatgaaatcatgttaactcgtttccaaggtcttagaaacagtatgaaacctctattaaaagtgatttgttttatcttcacacatcttactaatttcaattagctattgagttgtaacatttaattgatatgttagcctatacaatattcttagtgaaatattatattgagagacattgttttattcataacgtttttaatgatgtagcagcgttggaaagagtgctatgaaattcttattgtaaatagcctttaggacaggaccacaggagcagttcagcacatgctaccacactcactggtactgttttgatctcctgattgcttcacgagaaatgaaggcaaaacaaagcttctcaagatggagtccactgaaaactgtagatggaatgtttttttaaaggaactgtaaatggaaaagcttccgcaagatgatgtggtagtttcagggaaagatgctgttggggaccttcggcgtccgaaggtcctcaaaaacaggatttaacagtatttctgcagtacaatgtgtgaacaggtatcctcggactaaagtcggcattgcaatagaccggaataatacgaaggttgacacagagccgaaggtgcgagcaggaaagcttcggcgcgacagcaaagagtgaaaccgacttaaagatgaaaaggctattcagacctcgatagactactatagagttattatcaaatgtaaagggcatgaatgtaattttgtaagggctgtgtcctgtgtctataaataggtgaacagtatccccgtactgttcacgctgacttgacattcacttttttgcgtcacgcttgtattgtcatcccttctcgactaaaggtacacttgtaattcaataatatttccgtttatgcttgat

SEQ ID NO: 34401 - DNA, 765 bp, Zea mays
  Clone ID: UC-ZMFLMO17263H01_FLI
gtttctccagattctgatcactcaaaagatgatgctggactcccccttacgccaaaaaatgttgatccagctggatctgaaggctttacgacaggaagatcttataatataagaattgatgaccaagttttgcttcggttttcaccaaagaattctgactcaacctattactttggtgatatgattggtggagcacttaccttctttcacggaactggaaaacggaggtgcctcgaggtatctatagccctggaaacatctgaaacaattaatcctcgcgcattacatccttcaagaaggggctcaccaacaataaccaagctacacagtgaacatcatgaggttgttgcggatcttcaccagacaagctttctattttccattcccattgatggccctatgtctttttgtacctcaaaggtcactgtacagtggtctcttcgatttgagttcttcacaactccggaaggaacagacccagctaggtacgagcacccgctcctggttgataaaagagagaagggtgaatgggtgctcccggtaactgtttacacacctccattgcgcagacgagctactcatgagaggaatggtagatctgtctcacctggaaatatcttcaactcttgaagtgcactgttgccgaagtatagttactttcagctggaaaggatttacagactattctgactggtacaattgcatcaaaaggattttctcgctgtaaattgttatagggtttgcaatgtgatgtctatttttttt

SEQ ID NO: 34402 - DNA, 1760 bp, Zea mays
  Clone ID: UC-ZMFLMO17264A02_FLI
ccacgccgggcccgtggagttcctctactactggttccaccgggcgctgcaccaccacttcctctactcgcgctaccactcgcaccaccactcctccatcgtcaccgagcccatcacatccgtgatccatcccttcgctgagcacatggtctactacgtcctgttcgccatccccatgctctcgactctctacatggggaacgcctccgtcctgggcatcgtgctctacatcgcctacatcgacttcatgaacaacatggggcactgcaacttcgagctggtgcccaggtggatgttccagctcttccctcccctcaagtacctcatgtacacgccgtcgttccattctctgcaccacacgcagttccgcacgaactactcgctgttcatgccgctctacgactacgtatacagcaccatggacaagtcgtccgaccagctgtacgagacctcgctcaggggagcggaggagacgcctggcctcgtccacctcacgcacatgacggacctgcagtcggtctaccacctgcggatcggcttcgcctccgtggcgtccagaccgtctgccaccagcgccatgtggtggtacatgtgggtgctgtggcccgtggcgtggctgtccatggcgctcgcgtgggcctacgggtcctccgcgttcgtcgtcgagaggatcaaactcgggaagctgaggatgcaaacgtgggcagtgccaagatacaacttccagtacggcctgagctgggagagagaatcgatcaacggcctcatcgaaagggcgatactagatgctgatgcgagaggtgtcaaggtgctcagcctaggactgctaaaccaggcgaaacagctgaacggcggcggcgagctgttcaggcacaggtatccgaagctcagagttcgcctcgtcgacggaagtggcctagcgactgctgtggtgcttaggagcattcctcgtgacgcgaagcaggttctcctccacgcgggcccttctaagatagcgtgcgccacggctgctgcgttgtgcgagaggggcgtccaggtcgtcatgaacccaaacaaggaatatgacatgctcaagtcacagattgcagatagcaaagcaagctattgggaacgacgctccgacaaccaccacacgcctcaggtttggctagtagacaacatcgacgacgaggaacagaagatggcaccgcaaggagccgtattcgtcccaatctcacagttccccatcaagaaaatccgcaaggattgcacctacctgagcactccagcaatgaagatccctgaaaccatgcaaaatatccatgcctgcgagaactggctgccaagacgggtgatgagcgcctggcgcatcggcgggatacttcacgccctggaagggtggaccgtgcacgagtgtggggacgccatggtgcatgctgagaaagcatggtcagctgctattaggcacggattcgttcctttgacgaaagcctgaaagcctgtacgcaactctagacgccattcgacgatggctggaaaactacgtttcagcaatcggtagcacaaattctccccagctacagaagccgactatatggtctgcttgacgagtcgtccagggaggcacggcgtgatgaatggcgaccttgattccaacagcatatagtaactatatatatagttatgttgtggcattgtatgatgcaagtgcgagaaactgctttgtggctgtgtgggtgacatatacaattataataaaatgtcgatttggcttgtccttt

SEQ ID NO: 34403 - DNA, 1198 bp, Zea mays
  Clone ID: UC-ZMFLMO17264A10_FLI
attttggagagtgggggcttgcttggattgcacatcatctgcatcagttcacattttttgggcatttgctatcttgtcaagcttgctgactatacagttctggttcaaggaacgcctttctgaggtctcttggattatgggagctttctgttcatgtctgcaacctgattattcggaccatcatggaaaccaagcttcttcggcgtttaggaactgcatgtgcctcagatgctttacccagcagctgatcaatgcgtatactgttttgttccgagctggagcagtgcattctgtttccccccgctattgaagccactccagttgattcaactgaaagctccttcgatacatatcgttcgcccccaagacctctgccctatgatgatccacgattttcccctcctgctcgtgactggttaaggagtgagaacccaagccattccccagaggaatcggaaccacttagagcaaatgaggatgatgaagaaatggaaacaccaagtataatacagaaggcaagtaaaacaaactacaacacaaaaatgaaaatctgcagctctacttatggtgataaggtgccaccaagggaacatggaaattacttcagctatttttccccatctgctgaagatgaagatgtttgtccaacttgtcttgaagattatgattctgagaatcctaggatagtaatgcagtgctcacaccatttccaccttggctgtatttatgagtggatggaaagaagtgaagcatgccctgtctgtggaaagaagatggagtttgacgagacaacataatcctctggctggactctacaccatggcccatggattaacaacaaaccttctcatatgacattctgaaaatacagatggtctagcccagcaagttctctgtaaatacgccctgtaaatattggactggtagtgtgggtccctcttggccatacgagtgctctccaaatgctggaacggtgcacataaacattcttttccgatttgttacaaatagtcggcaggggaaggttgcccccctctgcctgtctgcgcctctgcctctgccttgtggaggcttagaggtgcattggttccggtgatagattcatcggaagcctgtaaattaaagacctaggctcatataataatcatatggagtcccgtggttctggaagttcttgcaatgataactatttggcttc

SEQ ID NO: 34404 - DNA, 835 bp, Zea mays
  Clone ID: UC-ZMFLMO17264C08_FLI
gctgctgcgaaactgcagccaaccaaggagtggaggagtaggagtagcggcagtcaaagcgtggcgggcggacgggcgggcaagctggaacccgttggatcggtggtatcaaggaatcggaagagggacccggctctcccctccccaccccgcgtcccacgtcggttcccctaatctgcgtccgcggcgtgatatgagacggttctgtaattgctgatcggcgtgatgaattttaggccaatagttcttatcttcctcctgctcgtgctcattgtcacatcacagtttgagtggaagcagcatattggtgaggctgaggcgaatccaacagctacacgaaggaggcaacaggcgcttggaagggaggatgctgttaaagagaaagtaatattggcacaagagaaaaacattcagcagcttaatgagcttattcagagccttcagcttcagctattgcattgccggggcagtaacagttctgctcagaccgcctcaagccacagcgaagtggagggacatgaaatgattggtgactgataacctctcatcccctcccctctgttgacataggtagtttgcttcagagtataaccaagacaagaacagaagctcttcaggcaatggaaactcttgttgtcgccttacggtgggccggtagagttactggtattatgtgctttacgttatcagtatcacctccttttgcattctcacccagcgtgtacagggttttagtatgttggtctaggttactttgctgatcaaggttcgaatgtatttgttcttttaaacatatgcactccgatctttatatgatggaccatttctttgtgtc

SEQ ID NO: 34405 - DNA, 464 bp, Zea mays
  Clone ID: UC-ZMFLMO17264D08_FLI
acgaggtgaaggaccccaacaccatcttcgtcttcaagttccgcacccacttcggtggaggcaagtccactggcttcggcctcatctacgataacctcgagtctgccaagaagttcgagcccaaataccgcctcatcaggaatggtcttgctactaaggttgagaagtcccgcaagcaaatgaaagagcggaagaacagggccaagaagatccgtggtgtcaagaagaccaaggctggtgacgccaagaagaagtaaacagtcatttatatttctgtattactgtcctgaactctgggtggtcgtctagttgcaatgtcataattatggtcgtgttaggttttgttccgcactcagcagtaagtgaagttttgtaattcctggatgtgaacctacccggattggctgtagcatgttgtgagatgagaaggctattttgtcatgcagttgtgtcatttgcaagcc

SEQ ID NO: 34406 - DNA, 1102 bp, Zea mays
  Clone ID: UC-ZMFLMO17264E01_FLI
cgtgagcatctctctccctcggatatttcttcactgcaggccatcggatttatctgcgccgcgggtgctcgcctcagcccaaaccgcgcccatgggccatggcgtgctcttcccatgtgctcgccggcgctcctccctcgcccatgccgcaacgctccagctcgcatccactccctgctctcgtgctccagctcggttctcctccctgccgcacgagcttgcccctgctcggagttccctcggctcggttccagctccgtgtgcgcgcacctatctcccatggtcgtgtgccgtggtgctccggcgtcatttcctcagtccctgcgctcggattccccttcttccatggcgctcgcccagccgtcgagctcccttgcgcgcgcgtgctccttccctgctcgcaccgccgcgcagctccctgtgttcatccatggctgaacgcttctccttggtcggcgtccgattccctgctgctgggccaaaattcctcatccccttcacataggtcgtccttgtttagccatggtcacacggtggtgggcacaggaacatcttggtctgtccatggccgctctcttcgtcgttggtgctcggcgatcaaccccctgcgtcgcgctcggtcctgcccatctcaccgtgcgcggatcccgtctgtgtcgccgccgtcgagttccctcgccaagtccagcccctgttgccgtgccctgcgtcctcgccgcgtgccatctccctcgcgttcgctgtcgcagtgcacgtggcggtgtttattaaggaagaatgcgaagccctgtggtgttcgatggactattcgaaccgaagagcgtggacgatctcgcgaagttaaatcgaattggtcatggatataactttgtgctgctgtgatggtgttaagtgccggtgggctcggccttcttataagtctaagtaacccttctatacttcttaatgaggatggtcacttgagctagcatatatttcaaaaactacaaataatttatatcagttcaaagttatttctttgaatcacttttgtaatcactccgatcatgtacaaagtaaaatttttgtaacttgtaaaatttggtaataagatttccgctgt

SEQ ID NO: 34407 - DNA, 1087 bp, Zea mays
  Clone ID: UC-ZMFLMO17264E03_FLI
gcctgcgctcgcctcctttcttcccccccggccccttggcttttgcttggttgcatcgggccggtcgagccggagaggccggaaaagctagctagctaccagctctccggtgtggtagtacgtctgcctgcagctggggttagctgcaagggttgggagccatggggaggggtcgggtggagctcaagcggatcgagaacaagatcaaccgccaggtcaccttcgccaagcgccgcaacggcctgctcaagaaggcgtacgagctctccgtgctctgcgacgccgaagtcgcgctcatcatcttctccaaccgcggcaagctctacgagttctgcagcggacagagcatcaccaaaacacttgagaggtatgaaaaaaacagttatggaggaccagatactgctgtacagaacaaggagaacgagttagtccagagcagtcgtaatgagtacctcaagctgaaagcgagggtggataatttacagaggactcagaggaatttgcttggtgaagatctggggtcacttggtgtcaaagagcttgagcagcttgagaagcaacttgattcatccttaaggcacataagatccacaaggacacaacatatgcttgatcagctcactgatcttcagaggagggagcaaatgctgtgtgaagcaaataagtgccttagaagaaagctggaggagaccagcaaccaggtgcatggccaagtgtgggagcacggtgccaacttactcggctacgagaggcactctcctcaacagcaggccccatcacatgttggcaatggtttgttctttcatcccctggaagctgcagcagagccaaccctgcagatcgggttcgctcctgagcatatgaataacttcatgccaacatggctaccctgaagatggatcttgaggcaaaggaaataaataaagatgcggtggcagcatcatactctatgcaagctaagagtgacagctgtgtttcagtcacatatatgatctagtctgtgtgtcaatgtgtcgaaaaacatgtctgtgattttgttatatgaatgtaacgcgcaatgaaacatacaggactagctgcttgcttg

SEQ ID NO: 34408 - DNA, 1051 bp, Zea mays
  Clone ID: UC-ZMFLMO17264F07_FLI
ccagcagctattgtggtcgtccctcagccgcgtcgcaccgcatcgcattctacgattcgaagctctctctgctcgcagccatggcgaagaattacccaaccgtgagcgccgagtacagcgaggccgtcgagaaggccaggcgcaagctccgcgccctcatcgccgagaagagctgcgcgcccctcatgctccgcctcgcgtggcactccgcggggacgttcgacgtgtcgtcgaggaccggcggtcccttcggtactatgaagtgcccggcggaactggctcacggcgccaacgcggggctggacatcgcggtgcggctgctcgagcccatcaaggaggagttccccaccctctcctatgccgatttctaccagcttgccggagttgtggccgtcgaggtcaccggtgggcctgagatccccttccaccccggcagggaggacaagcctcagccgccacctgagggccgtcttcctgatgccaccaagggttctgaccacctgaggcaagtctttggcaagcagatgggtttgagtgatcaggacattgttgccctctctggtggccacaccttgggaaggtgccacaaagagcggtctggttttgagggggcctggactacgaaccctttggtctttgacaactcttacttcaaggaacttctgagtggcgacaaggagggtcttcttcagctcccaagtgacaaagccctgctgagcgaccctgtcttccgccctcttgtggagaaatatgctgcagatgagaaggcattctttgatgactacaaagaggcccacctcaagctctccgaactggggtatgctgatgcttaaatgtccatatcctggagcgggacacaaactgctgcctgtatggactcgtgcgattcagggtgaaccatcagattgtctagtgtcttctttgtaataaatttatctgttcttggtactttgtctatggttgaatcggaacccattttccgtttgcctagattcttaatttctggtgctgtatccagctgaaactagtagatctatgatcttgtggctgc

SEQ ID NO: 34409 - DNA, 218 bp, Zea mays
  Clone ID: UC-ZMFLMO17264G05_FLI
atcgaaacatggtagataaataaaggacttgacgatttgtaacgcagtagctggtgcgtgcgtggtgtggtggtaagaaattcttctgctgcctgtgttcttgtagcctcctcgtcctcgcccaccctgttggtacgtgtacggtgtacgtagtctgccgccgcgcgctgttcgtgttcgtcgtgtctcgtgtctgtattatactcgtcctccccatc

SEQ ID NO: 34410 - DNA, 1389 bp, Zea mays
  Clone ID: UC-ZMFLMO17265A05_FLI
gcgcgctgaagcgtgcgcttagtgccgatttttggaaccctgattgttgagtgttttgacatagtaactggctgtaacacattggtatttgaagaccattgcaggttgtaacacactgttatatttgaagaccagtggtgggttgacttaaaagcagggtttaaacatcacttttgtgatttgttctgcaatatctttgccatatcatggggtttcagaccataccagtcgtaccagaccttgtggtggataagagtgaggttgaaacctcacaagttgcgggctctgattcaatagtcatagaaagggtggaaacaaatctgagcaaggaaccctttctgctagttcccttggaaaataaggaagagaaagagtcccttggtataatttgttatcttgaaaataacaaggttgatgttcctgaggccttctctccaaggagagatatacttgaattgtcaatctctagcaagtctactgatgatagtctttcattgggttgtgagacaccacgtgaaagcatctttgatccatttgctccaggacctgaggaggcagcctgtgcaccaaagaagaaagtgactagaggtgctcaagttccacctcgcaggaagctaaattttgattcaggtgactacccagttaaaaggttaagtttcgattgcagtgattctgaagaggaggatcaatatatcgaagtgattcacaagatgatcctggatctattaattctagatgtccctcttggtggacaaaaagaaactggaaagaatgcgacagatttgggcctacatggaagctgcaagacacctgattcaaagcctctacttactggcattgcatccacatgcccagatgcacctttgaggccatctcttaaagcgttaaagctgagcccaggcatttgtcgaaagattgactttgacttcgatgcagtcagtggctcaggaagtctaagttcttccatggataaagaaagtaattgatcgttctgcccttcttgattgacaatgacaagtaatgaactgtgcattttgggactgaatgaagcatcgtgatgatcttccccaggaacagctttaatctgcatatttgcatctcatgtatcagtatcctatgccgttgtggcaccttagctaaccctgatgctttggggattattgctgatggtagacaagtacttaagtagcaagcagtttatgttatacatgtaatctatctctggttttcttttgtaactggccttgtgctaattacctcctagatttatatcagttgattcgagctctgaccatattattttgtaaatcttaagacgagacttattccatctgattaaagtaatgcacccgatgcagtttcttggtagctgttaaatcagctctgacc

SEQ ID NO: 34411 - DNA, 552 bp, Zea mays
  Clone ID: UC-ZMFLMO17265A11_FLI
ctcagtttcataaccatcctaggagtggcaactatcgcgttctctctacttccggtcttccaaaatccggagttcagaaccatcagagcatgcctcttctttggcatgggtgcatctggcgtgatacctgttcttcacaagctagtactcttctggcaccaaccggaggcattgcacacgaccggatacgaaattctgatggggctcttctacgggctgggagcattggtatatgcggcacgggtacctgagcgctggatgcctgggaagtttgacatcgccgggcacagccaccagctgttccacgtcttggttgttgccggagcctacacacactaccacgcagggcttgtgtacctcaagtggagagacctgcaaggctgctgaaaggtactgcatcgttgaggatgtggatagattgtagattccgtgaattcaggctgaaggtcatggtctgttgtaaattgtaacagtaatcatgaaacaattgctacaagtctaccaggtagtcgggcttccattaataatcaattgaagactagtatttatgct

SEQ ID NO: 34412 - DNA, 1865 bp, Zea mays
  Clone ID: UC-ZMFLMO17265B01_FLI
tgttgttatcctttctcctcatggctacttcgctcagtccaatgtgcttggataccctgacactggcggtcaggttgtgtacattctggatcaagtccgtgctttggagaatgagatgcttctgaggattaagcagcaaggccttgatatcactccgaagatcctcattgttaccaggctgttgcctgatgctgctgggactacgtgcggtcagcggctggagaaggtcattggtactgagcacacagacatcattcgcgttcccttcagaaatgagaatggtatcctccgcaagtggatctctcgttttgatgtctggccatacctggagacatacactgaggatgtttccagtgaaataatgaaagaaatgcaggccaagcctgaccttatcattggcaactacagcgatggcaacctagtcgctactctgctcgcgcacaagttgggagtcactcagtgtaccatcgctcatgccttggagaaaaccaaataccccaactcggacatatacttggacaaattcgacagccagtaccacttctcttgccagttcacagctgaccttattgccatgaaccacactgatttcatcatcaccagcacattccaagaaatcgcgggaagcaaggacaccgtggggcagtacgagtcccacatcgcgttcactcttcctgggctctaccgtgtcgtccatggcatcgatgttttcgatcccaagttcaacattgtctcccctggagcagacatgagtgtttactacccgtatacggaaaccgacaagagactcactgccttccatcctgaaatcgaggagctcatctacagcgacgtcgagaactccgagcacaagttcgtgctgaaggacaagaagaagccgatcatcttctcgatggcgcgtctcgaccgcgtgaagaacatgacaggcctggtcgagatgtacggcaagaacgcgcgcctgagggagctggcgaacctcgtgatcgttgccggtgaccacggcaaggagtccaaggacagggaggagcaggcggagttcaagaagatgtacagcctcatcgacgagtacaagttgaagggccatatccggtggatctcggcgcagatgaaccgcgtccgcaacggggagctgtaccgctacatttgcgatacgaagggcgcattcgtgcagcctgcgttctacgaagcgttcggcctgactgtgatcgagtccatgacgtgcggtctgccaacgatcgcgacctgccatggtggccctgctgagatcatcgtggacggggtatctggcctgcacattgacccttaccacagcgacaaggccgcggatatcctggtcaacttctttgacaaatgcaaggcagatccgagctactgggacaagatctcacagggcggcctgcagagaatctatgagaagtacacctggaagctctactccgagaggctgatgaccctgaccggcgtgtacgggttctggaagtacgtgagcaacctggagaggcgcgagacccgccgctacatcgagatgttctacgccctgaagtaccgtagcctggcaagccaggttccgctgtccttcgattagtacggggaaagaagaagaagaagaagcccaggccggagaaccatcgcctgcatttcgatctgtttcaccgcaattcgcattgttagtcgtgtattggagttatgtgtacttggtttccaagaactttggttccttctcgttttttttccttgtttgagcgtttttgggcagcgctggcctggttcctagtatggtgggaattggctgcaccttttgcttcgaataaaaatgcctgctcgttcacctgtcttccagagtgcaatgcgatgttctgttgccc

SEQ ID NO: 34413 - DNA, 1059 bp, Zea mays
  Clone ID: UC-ZMFLMO17265B04_FLI
tctaaatggggtgcagtacaatctgagtatcaacaacccacctaacactcttcatggtgggtttaaagggtttgacaaaactatatgggaagtcgccgagtataacaaaggggacaagccctcaatcaccttcaagtattacagtaaagatggagaggaaggttacccaggtgatgtttctgtcaccgcgagatactcgcttctcccaagcgcgacactgaagcttgagatggaagctataccactgaacaaggccacacccatcagcctagcacagcacacctactggaacctggcaggccacagctcaggagacgtgctctcgcactcggtccagatctggggctctcagataaccccggtagaccagacctcaatacctacaggcgagctcatgccagtgaccggcacccccttcgattttctgaccgggaccaggatcggaagcaggatcgaccaggtccccggcggttacgatcacaactacatggtcgactccggcgaagtgaggtcaggcctgcggcatgtggcgcacgtcgcggacccgtccagctcgagggccctggacatctgggccgacgcgcctggcgtgcagttctacaccggaaattctcttggtggcgtcgtgggcaaaggaggcgcggtctatgggaagcacgctggcctctgcctcgagacgcagggtttccccaacgctgttaaccagccgagttttccctcggtcgtgtttggccccggtgagaggtacagccatacgatgctgttcgagctctctaccgagtgagtcatgtagcccgtctgcctgcccgtgtagatagatagatatacaccgcttttattttccttgttgttttgtgcttgcgagtagttaagaaactgtggcgcgcgcggcggttgttcaattgattcttggtttagggctgaatgttgtagcaggaatgcaacaagactagtaggaaaggaacggatttgaggggagttagtaggttactaggtctgcatctcgttctgatgtgaacctgtcacttgtgtgtgttgagtatagttcattcaggattt

SEQ ID NO: 34414 - DNA, 2188 bp, Zea mays
  Clone ID: UC-ZMFLMO17265D02_FLI
cattgcctatatataaacccggtcgcccctaggctgtggctcgccgtctcagttctcatgtccgggtgaagaaaagaaaaatcctcctgttccctgactatcgctacccctccacatccagtggccatggtgaagaagcccaacgacgttgccaaggccgcggcgacctccgccgacgcggcagccaggccatccaaggcgaatccgtccacccctcagtcggtcaagacctcgaagtttaagaagcggaaggtcaaggccaaccgccagaagccagcggtcgctgccgcagctgttggcgatgtcgccccggtaggcgcaggcactggggatggcgatgcatctgcatccgcggttttaccgcagccatccaatgttgctgaggcatcgcctgtggtgcaaacgccaaagtcgaccacttttgttgaggcgtcacctgtggtacagacgcagaagacagccactgatgctgaagtaccggtgcattcaccaatgccagccactgctgaagcatcagctttgtcgccaaagccaaagccaaaaccagctcatgctaatgctgatgctgcagctgcaatttctgtcagcaagggcaagggcgtgggtgctgataatagcgggggtgatggcagaatgaagagcagaaaagagagggctaggagtggcaaggggaaggaggttttgggggatggaggaagtaagggaaaggggaaggggaaggggaagaaggctgtaggcaagaaggaagaaaggggtgaccataaggttgcagggtttatatttatgtgcaatgcaaagactaagaaggagtgctaccagaatcgcttgtttgggatgcctggtgggaagattggaatggtcaagaagataaggccaggggtgaagctgttcctgtatgattttgacctgaagcttttgtatggtgtgtacaaggcagcatcacatggggggctaaaccttgtccaaggagcatttagtgggaagttccctgcacaggttaagtttaagattgataaagattgccgtcctctccctgagagtagtctcaagcaagccatcaaggaaaattacagtgcaaagagcaaatttgacccagaactcaccacaaaacaggtccaaaggttacttttgctgtttaagcctcttagtgcacctcaatctgttccaaataatcactttgaagaaaggcgtcactatgaagaacaaaggaagccatattatcattttgaagaaaggcttcctctgttgcctattgaagaagtgcgtcagccacggtttgatgatgaaaggcgccctgcagttagacatgttcctcttgaggatccatatagggcacaagcaccacgctttgcaccagttcctgttgagtctcagcttggccattcgttggctagtgctcagggtgatcacggcagatattatcaaccaccagcacttgcgcctgagcctcgacacattcctcttgttctagagcctcgctatgttccgccagcccatgtgcctactgtgccagagcttcaacatgtcccagctgcatattatcgcacttcggctccatctggcgactcatactatcggcctgttgataatctggtgcctgaggggtatgcagacagaactgtgtcaaacataaccgctagagatccaatcattagtgatcacacagcacttccagtggaggcctctgctcgaccagaccgcttggatgatctctaccggattcgtggtgctcatgtggaggagctgtaccgtccacgggaaattgctgatcgtgcggggattgccactagagcagatcgtatggaggaactctaccgttatgatcgacttgctaaccgtgctgtggacccccctcattcagcctaccttacaactgcttatgagaataaccctgcttatgctgaaacaagcgttaggcctatctcagcaagggttggtggctccggtgcgccggtttcgtcactctattccttttctggtggtccagtatatcggtgatgagtgatcatggctagctctgttgaaaagccttagccagactaagaagacatgatgttcgtctctataactgcaactgccgttttaccttggcttcgactctgtattttcttaaatatccttcactggatgaatggtactcttcgttatcaagaagacctgctggtctatgctgttgaattatgtattt

SEQ ID NO: 34415 - DNA, 1737 bp, Zea mays
  Clone ID: UC-ZMFLMO17265D07_FLI
agcagctctctccgactccttcgatcccttccctcctctcgccgccggccgattcacttcttccatcattcgattaagcaagcaaggcaaggcgcatttccctcgggtgactcgatcggccgcgcgcgatgtctgcgacgcagccgtggaggtcgctgctctgctgcgcggcggcgggatacgacgacgccgacgagccgccgccgtcgtcgcgggggcagaggaagggccggagcaggagggaccgggaccgggagcggctccagctgctgctgctgccgtcgtcctcgtcggcggcgtcgcgggtgtcgctgtcgagcctggggggttcgtcggggacgctgacgcccgaggacctgtccctgacgctgtcgggctccagcctgcacgccttcacctgcgccgagctgagggccgccaccgcgggcttctcccgcgccaactacctcggctgcggcggcttcggccccgtctaccggggccgcgtcgccgccggcctccgcccgggcctcgacgcgcagccggtggccgtcaagtacctcgacctcgactgcggcacgcagggccaccgcgagtggctggccgaggtcttcttccttgcccagctccgacacgacaacctcgtcacgctcatcggctactgctacgaggacgaccaccgcatgctcgtgtacgagtacatgagcaaccagagcctcgagaaacacctcttcagaagtctcgacggccccatgccatggatgacgaggatgaagatcgccgtcggcgcggccaagggcctcgccttcctccacggcgcggacacgccggtgatctaccgggacttcaaggcctccaacatcctgcttgaccaggactacagcaccaagctgtcggactttgggctcgccaaggacgggcctcagggcgacgcgacccacgtaacaacgcgcgtcatggggaccaacgggtacgcggcgccagagtacatcatgacggggcacctcaccgccaagagcgacgtctacagcttcggggtagtgctgctggagctcctgacgggccgtcggtccgtcgatcggtctcggcggcccagggagcagagcctggtggactgggccagaccctacctcaagaagcccgacaagctctaccgggtcatggatccagccatggagtgccagtactcgtgccaaggggccggacgcgccgctatggtggcgtacaagtgcctgagccagaaccccaagtccaggcccaccatgagggaggtggtccaggccctggagcccgtcctggacatgaacgactaccttcaaataggctcgtttgtgttcaccgtcgtggtggaagacagcaacgacgacgacagccaaggcaagatggtcgacgtgacgatagagacgacggtggaggagaagcgccagagccaccaggaccggcaccggcagaagttccccaactcgcttgtcaatgccgacgtggtgctgcaccgggacggcgacctggggaagcacattgccgcgctgcggcggcaccggaggacgtccagctacgtcaaggagagaggggcgtagaagcgtagcatatagccttcagggtgaattggcaggcatggcgcgtactagtgtttaggagagaatcaacaaaagaaaaatattaatgtgtacatataattaagctagatcatagatgggtgtggcacaacaaggcatacacaaccatgcctcatttggtttggtggccaaaaaattgttc

SEQ ID NO: 34416 - DNA, 453 bp, Zea mays
  Clone ID: UC-ZMFLMO17265D12_FLI
catccggatgccaagatatgttgattggagcaatcagaaatcaggttctgaatgagttcgctgcagttgaaccatctcttccatgcaagcggctagcggatggctccaaacgggttcaactccctcagttcctaaagcagcagccgtcgaaggacaacaaattaattgaattgagccagacccagtgcactgtgcatcttggttcataataacaccaccagagccagttaacggagcattgtacacaccgaattatgtgaatcatgcaccacataacattatcaattcgttgtatacttctgtattgcatcagaacctgtagtgattgttgtataagctgctaattgctgcatggacatgtctgaatccatcatggatttcttgcgaccgttagtctgttctaggaaacattatataggaataattcgtaaccatgacccgtattctctaggg

SEQ ID NO: 34417 - DNA, 1962 bp, Zea mays
  Clone ID: UC-ZMFLMO17265E12_FLI
ctttcaggtggataggaagtacaaacactattatcatcagatgcaacttgtaatgtcatcgtttaatatggttgctggtgctggagctgccaagccttatactgcagttgccctccagacaatctcacggcatttccgatgtctaaaggatgctatcaatgatcaaattagtgttatccggaagaaacttggagaggatgacaatacatccggcaaagagggcaaactaacccgccttcgttatattgatcagcaaataaggcaacagcgagctttccaacagtatggtatgctacagcaaaacgcttggaggccacagagaggactacctgaaaattcagtctcgattctccgggcttggctttttgaacacttccttcacccgtaagtttttccgcttaacttagagatatgttcactcacccccttttctatttgttctcatgccacgctgacactcttaggtatccaaaagattctgaaaagctaatgttatcgagacaaactgggttgacaagaagtcaggtattttttatttgcttaagatatgttttctcttatcaaatttgcaaatcattggaatgccttagtattattaaaagtgatgggtacgttaaaaggaataattttagtagttttttttgtagaaagaactaatataggttgtttcagctgtatattattgtgctgcaaacatattgtaagtgctgtagggttgctgcttgtctgcatgtatatatgtacgaatctcatcctgtctttacatcttaagtcttttcccatcgacaaaaactttaaaacaaactctgcagttgctcttttccagaacaaggtacaccaattctgttggtatttggatttggaggattacctgtgatctgatgacttgctgtcatattagtagtttgtattccgtatcaaataatggaaaccatatttactgaaactcacatgcgtccttctattctagatttcaaactggttcatcaatgcccgtgtccggctgtggaagccaatgatcgaagacatgtacaaagaagagattggtgaggcggagctagactccaactcttcctccgacaacgggcagcgaaacaaggacaaagcaccatctcccgaagaaaatgaggacctgcagaccccaacaagccaggcttgccaaaccagccagctcggcgagtccaaagccatcgttggtggagtgatgggctttagtggagtgctagccggcggcttccacaccgaggccaaccccgacgacagcttcatgagcctgatgctgaaggcccagagacctggtgaaaccgaaggcaccggtctcctccacgatgccgtcgctcaccactcggacgacggcgcccggttcatggcctaccacctggcagagttcgggaggtacgggaacagcagcaacgtctcactgacgctgggcttgcagcacgccgagaacagcctcgcagtcccaccaaacactcagccaggcttccccggcgtcagagaccaagacatgtacaacgccacagctcctcctctcaacgtcgcctccacgtcttcagagtatgattcggcgagccaaattgatcaacaacagcaacggcagcggttcgagccgtcacctctgatgcatgatttcgtggcctgaatttcagctcgcccactggaaaacgtgggggaaaactactgccaatttgtagtgtgtgccaggacgaataacttgcctggactgaattttcaggcgtgggactgtagctgtagttaacgattggggatttggggggtacagtacaggaggtatatagcgtaaatgtgatgtaaatttagtgggggtgatagcggtaaagaaatcctgtaaagatggaatgcatttatacgtgtatttaagggccatgctgtaaaaatagatttacctgtaatgagtacttatgatccaggtaatatatatactgtgcacgctgttgaaac

SEQ ID NO: 34418 - DNA, 2450 bp, Zea mays
  Clone ID: UC-ZMFLMO17265F06_FLI
acgtacgcgtggggtcgagagacggccgtctactcagccgtcgttggcgacggctcgtttcagggtcccccacctactaatcacgaccctggcctctctcgattctgttgccttgccattgccatcatccaccctcatgcatgtcggtgcaacgcccatgggcatccactggtgcttataagaggaataatccggcttccgttcctctgaggacatcctcggccttccagggcagcaaccacgaaagccttctgcgcggggtgctttcctcgcagcaaatattcctgccttttgcattccggctttgcaagttccttgctttgggcatatatattgtgaggtctctctatatataggtggttcgaggtgatcggcagaaccacacaggcaaagatggcgagcgtgcacaaggccaccacccttgttctcatgttctgcctgctagcgctggggagagcggagtacctcaagtacaaggacccgaagcagcccgtcgctgttcgcatcaaggacctgctgggtcggatgactctcgccgaaaagatcggccagatgacgcagatcgagagggaaaacgccacggccgacgcgctggccaaatacttcataggtagcgtgctcagcggcggaggcagcgtgcctgctcctcaggcgtctgcccaggcttgggccgccatggtgaccgagatgcagaagggcgctctttctacgcgtctgggtataccgatcatctacggtatcgatgcagtgcatgggcacaacaacgtctacaaagctactattttccctcacaacgtcgggcttggagctaccagggaccctgacctcgttaagagaattggagaagcaactgctcttgaagttagagctactggaattccttacgcctttgctccctgtatagcggtttgtagagatccaagatggggacgctgctatgagagctacagtgaggatccaaaggttgtccagtcactgacttcactcatctctggcctgcaaggtgacgctcctgcggattccgcgggaaggccgtatgttgggggaagtaagaaggtcgctgcgtgcgcgaagcactatgtcggtgatggtggaacgcataacggaatcaacgagaacaacacgatcatcgacacacacgggctgctgagcatccatatgcctccttactacaactctatcatccgaggtgtctccacggtcatggtctcctactccagctggaacggagtgaagatgcacgcgaaccatttcctggtcacggattttctcaagaacaagctcaagtttaggggttttgtgatttccgactgggagggcattgatcggatcactactcctcctcacgccaactactcttactcaattgaggctggtgttggtgctggaattgacatgatcatggttccattcagatacacagaattcatcgacgatctgacgacacaagttcagaacaaggtaatccccatgagcagaatcgacgacgccgtctacaggatccttcgtgtcaagttcacaatgggtctgttcgagaacccttaccccgactctagcctcgccggcgagctcgggaagcaagaacaccgggaactggcgcgcgaagccgtcaggaaatccctggttctcctgaagaacggcaagtcctcctacgctccgttgctgcccctcccgaagaaggccggcaagatcctggtcgccggcagccacgccaacgacctgggcaaccagtgcggggggtggacgatcacgtggcaaggaagcagcggcaacaccactgccggcacgacgatcctctccgggatcgaggccaccgtggaccccagcacgcaggtggtgtactcggagagcccggacagcggcgtgctggccgacaagtacgactacgcgatcgtggtggtcggtgagccgccatacgcggagacgttcggcgacaacctgaacctgacgatcccggcgcccgggccgagcgtgatccagtcggtgtgcggggccgccaagtgcgtagtggtcctcatctccggcaggccgctggtggtggagccgtacctgggcgacatggacgcgctggtggcggcgtggctgccggggtcggaggggcagggcgtggcggacgtgctgttcggcgactacgggttcacggggaagctgccgcggacgtggttcaagtcggtggaccagctgcccatgaacgtgggcgacgcgcactacgacccgctcttcccgttcggcttcggactcaccaccaagggcacgaagtgagtgagtgtgaggcgctctgatgggatgtggcctgtgagtgagctgtgtattcgtgggcgggcgtgaggctctttggctttcgaattggttgggggtgacgggcggcgagtcgtgtacgccgcacacattgcgcagcgtacgttgggttgggatgtttgcgtctgggtaataacagtgatgcattcttg

SEQ ID NO: 34419 - DNA, 1751 bp, Zea mays
  Clone ID: UC-ZMFLMO17265F11_FLI
gtgggtcggaacgatttctaaccggattgcttctctaatttatataaactttgattagctggaacgattccgggtacaatccgacacaaacgaacaaggccttagttattcttgtagcttggtgtatttgcaaagctaggaatggctgcatctttgatgaagcctctcctagggttcttgatgttgttcaaaacataaaggatgaggctgaaatctggtgcagggctggtgctaagggacttgctgcaatctggtcaggttagtgtggggtccctttttctttctgtaatgggtgtttgctagtgtgtgtgttcttgccctcctgggcttttgtactttggaccatttttgaacttctctccttaatataatgatgcacaactctcctgtgtgttcgagaaaaaaaaaactataggtaaaataaagatgtagccagtgctgaaagaaaagtttttgaagctataattttacgtagggagtatcagatttggttctttgtactggtactgcttgttattgaggccacacactggcaaagtttgaaaccatttttttttttctagaatcactgctaggcaatgaactagttgaagagggagatgcaccaatgcggatacttgtaatcttagtgttttataatgtgtaaacagtcgatgcgttgcagtttgcgttccatttgcctagttgtatacacaatggtgtcttaggaaatgtttgttaatcaattgtgtcgtgaggcactttctgctgttgatttgttgctatcccattctatgttttatgtagcctctgcctagcagcattgtgcatcaaatgatataatccattcacgtatcttcttatgacttggctttcataacttctcgtatgacatgcaaaatcttgcatgcaaacacatgaattgcacacattgtacatccttcttccctagttttttactagtaaaaaaataaaatagaaatttgtagtggtgtcacttgaaaaatcaattatgtgttttatccttttaaatggtcagcattgttttaaataaattctccacagaactgctaagcatacgatagatccccgttacctatattttcagtaagtaatttctttgtcactcaatttagtaatgatgtttgtcaaactttgtagttcattgtgaaaataagcaacctgaagtctcatgttcagttcaatatgtactatgtacatttggtctgttactctgttgacatggcttgatcttatacacatatttttgtcatgtgttttagaaataaatgtggtaatggatctatccaagaaaatgaggctcaagcttggtgctacttctgagcctgtgaaaccactggagaaaccttcagctgggtttgtgaaggatgagcttgtgaaaccatcagagaagccttcagctggacctgtgaacgacgagcctgtgaaaccatcggagaagccttcagttggacctgtgaaaaatgaacccactgagccagctccagctggagaaaacaatcaagctcccacggtcggtcagactacagtttctccgaatgatgcaggtgttggtgcaccagtagtcaagcatgacaactcagaggcgcagaagtcctgatccattgagatggcatatcgtgcacatctgctcgacaaaaatgtagagtggccggttgatcccctgtgggctcagattttctttcttctactgtaggtaaaattgtttgttttgggctaatcgaagaagagtggtgggcgtatcaagatcc

SEQ ID NO: 34420 - DNA, 2035 bp, Zea mays
  Clone ID: UC-ZMFLMO17265H01_FLI
ccggcggccacctccatctccctctctccgctcgccgcgcctccatcggtccactcagccttttgtatcgagcatgtactaaattggtcatggagaaatatcaacaagtatgccgacattagctcttgaaagatcccaacttaccaacattggtcagggtaaatttgtcaagttatcaattgatgtgtgcttggttattgatttccattagattgcagcatagcttgctcttcatctgaaagttttcgagggtaagtgtttatcatgcaccatggttgttggtaatgacatagtttacatggttgggtgctaaaaggacgagaagagtttgaataatcggtccgatgaacattctacttgagcttaagcacctcaagccctttagcatccctgcaaggcttgtcatctgtaaaggccttctgatagtgattgcccttattttgttgagagcaattgtgtctccttttcttgctatagattcatctgagaagaaagagttttacgagtcaacagcccctgacttgcttcctagaattagacgtgacaagtttcttgaggtcccacagatcatatgggggttgaacaatcaaaagattgcattcgccagagcatgcttgactgcaagattcctgaacagatcccttctcatgccaagcttgagtgcttctctcttctacaaagaggttgacttgcttcagcctatcaattttgacaaagtgtttgactttaacaagttcaatgcgcgttgccatggcttcgtaaggttagctcagtattcagaagtttcaaatcgaaccgagcctttcaaactccaaaaggggactggtagaaggtggacggcagacagagatttggatcaactgcagcaatccatagggagcaatgcggatgactctgaagtcattgaaattgttgggaaaaatccatttctgtggcctgaccactggccagtcaaagactatgccaaaatctttgattgccttgtcttagttcctgagatagaaaccgaagtggttaatgtgatatccaagattagagaggcaggccaaagagcaagacatgaagctgggagttctcatagtaagcagaggagagatagctcaacgaatccgcctgtaccgtatgttgctgttcacatgaggatagaaaaagattggatgatacattgcaagaagtgggagcaacggtccaagtcgcatgaaatctgcagtagtaaagaagagatcattcataaggtctcacagatcactgatctacatcggccggttgttgtttatcttgcggtagctgacagccttcttgaagatgattcaataaccagtgggtggagagtgggtatggttgcttacgagaagaagaagcttggtgttactgacgtctacgatcggcagccatatcttataaagtctgccatcgactttgaggtgtgctcaagagcagatgtgtttgttggcaatagcttctcaacattctccaacctcgtagtgctgtccagaacagaaaggctgtataacctaggaaaggcgagctcatgtggcgagaacatcgggctttcatcgtatgcatacaatgtcatgggcggcgatggtggaccgcagagatggatgacggatatgtcggatggaagcctgcagaggttaagttacggaacaaataacgtctcatgccactgactttgacgcatagcacttgcctgaacatgatgtatacgtgaggaagtccctgtccgatttcatttagggcttgttcgtttgtgtcggattgcacccggaatcgttccaactaatcaaagtttatataaattagagaaacaatccggttaggaatcgttccgacccatcaatccgacagaaacgaacaaggccttatcgacaaaggaaacaagtacgtgcagctaatttgctgtgcctctgtgtttgaagcacttgtgaaagactatggccaggagttgtctgttgatagttgtgcttaaaagccttgacagtgttgggcagtttgtagtttgtataaagctgaatgctgtgcgatggctttt

SEQ ID NO: 34421 - DNA, 1057 bp, Zea mays
  Clone ID: UC-ZMFLMO17265H07_FLI
agccgagccctttccctctcctccctctgcgccaccaccctcgccgccgccaagcccccacagcaccccgtccccttcgccccggctcaccgcgcgctcccccaccgcctcgccgccgccatgtcctcctcttcctccccgacccccgccgcatcggtggacgccggtgccccggccccttcggcgtccaacgccatcgacttcctcacgctctgctaccgcctcaagacgaccaagagggcggggtgggtgaagcgcggggtgcaggcgcccgaatcggtggccgaccacatgtaccggatgggcgtcatggcgctcgtcgcggccgatctacccggcgtcaaccgcgacaggtgtgtcaagatggcgattgtgcacgacattgcagaagcaattgttggtgacatcaccccttctgataatgtacccaaggaagagaagaaccgcagggagaaagaagcattggaccatatgtgcgagctgcttggtggtggttcaagagcacaagaaattcgtgaactttggatggagtatgaggagaatgcgtctttggaagcgaaggttgtcaaagattttgacaaggttgagatgatacttcaagctctggagtatgaaaaggagcaagcacgggaccttgaagaattcttccaatcaacagcagacagacttgggaaaagcatgggcagcggagattgcatcgagaagaaaaacaaagtgatcaaacgatgctcattttaccacgtcggttccaagacaacttgctggcacagcatttctgttgaactttgcttttactagatgatacttcgaggtggcattgagacgtagggttgccttgggaatgtgaacttcaccacatttcttggtcctgccctgaccctgaggcatattgggcttgcgataccagggctctagataagtaagataacccactttgggtattggttgtagatgctcctgccaagggcagttagctggatccaacgggaaggttcagcaccagctggtggtgatgtaaaatccttcacttcatgaattactgtaccattaccgtttc

SEQ ID NO: 34422 - DNA, 2110 bp, Zea mays
  Clone ID: UC-ZMFLMO17266A07_FLI
gggatcctgagtttaaagttattgagagtgcatatccttttgtaattgggagactccttgcagaccccagccctgatatgaggaaaatattgcgggagcttcttatatgtgacgatggatccatcagatggaatcgactggaaaggctggtacatgcttaattattgttccttatcttgttatctcattgttatcacgattttttaccaaaatcatatgatgaaattaccaaaaccagtcttttaaataacaagaacatgctagggagttttgtttgtcatgatatacactcctgatttctctgttcgtatgtgtggaaacagtttcatggacctatcctttctgtgaacatgattactaatttgtggtagccctcttgacacatagaaccactaaggtaagattgaagggagtatccagcctatagatgtggaattattaacaacttttactgttgaccatctatttttttgggatcctgtattttgtttgggctgtatgatctgagctagctcagtttgtgggaatactcacaccactcaggttcgagttgtatttggcttgaatatgatcaacctgcaggggggtaagacaaccccgggcattgcattaagaacttctcacacagagaggattttcctaaccctagactgaatatcctttcttgtgggagtcaaactcaggtcctgcagaggctatcaagtcacataaccatctcagctagagtccctttcacttatctgtttcttcttacttacaacgtgacatagttccttctacttcggtcgactttttaaatatatattctgtgcaagtactgcagtgttgctcaaagaaaaatttgggttggtccagttctggtacctatgatctaagagccacttcataaactacagctatttgttctcctgttaacaccaatcaacgagttttcacaaccctgatggtagtgctgattggtcccaccccttagacagacaagtatgcatcaaccatcctgggtgtcctcatcacatccaggttgtctggaaggacaggtgtaatcatgttgccatttaaaagggtgctaaagctgtagttttgtgttactatggtgcaatagttgcagttccttgaaactggtcctaggagttgaagtttgagttaggcacacaaaattgtattctgtgaaataatatggtgttaggatcgtaattgcaattttttaatcgtagtttattgagttaggcacacaaaattgtattctgtaaaataatatgatgataggattgtaattgcaatttttaatgttttaagcttcaaatatgcaacagaggagaaatttcgataatctgaaaattttaatgcaacaaattgggttatctttgctcgaaatgggtcatggtctctatcctgttgttggttctaattcttgtgttgggtttgggtagtaacttagtgtgatgagaaattttacagatatttgttttttatttgttcctactaacaacatttggtttttagattgcagctatatctgaacagtcatcagaatcttcaagcgcatcaggagctgactccagtgagaacgccaatggaagtcctgagtggagatcatttgatatgcattctgtgattgcagctacagaagacctatttgatttcattttatcgaggaaaggatggcgggttcgggttttccttgtccaggacatcgttaatgcttcagacgtgttccttcaagaagcgacattcccatatgtatatgcgaaagtgggaaagataggggacctaaatccagagagaagtaagatgatcaggaggctggtgaatactgtgcaatcgttccgccaagctatcaatttggctccagatgcttggagcgccatgctaatccgcactttgttgaaacctgaatcacaaaaatttgttcttgatgtgtttttggccctggctaaccattccagttacaagattccagaaacattctggctatttatgtcaagatttctaaattacttggacaaacaagatatactttaggaacggttaatatatcaattcctctttttttttgttatggcttgaatttatttattttagatcggtcgccactggccaatgttgactt

SEQ ID NO: 34423 - DNA, 2034 bp, Zea mays
  Clone ID: UC-ZMFLMO17266A10_FLI
gcgccaaggctcaacgagtgggacatggttgctggcggtggttcctacaaacaaagtagtattgcctgagataatactgcagatatccagataatggcctacagttgcagtactcccatgagcaagaaatatgttttaactcattctagagatggacagcgcaaaaacatatccatccatgaactaattgcatcagaatcaaactgcataagggtgatggttattagggatatgtgaaacatcggtgttattcacagtcctacacgcaaacatgtgcatcccctacccactgctaacaagtagaaaatgctgatatttactctgcttgagaaaaatgcacaatgaaagatagttttggtatcctatatagttttactctacttgacaccaattctaaaggtaaggtacgttgcagcattagttcggttcgtttcagactggaaaaaaaagagaaatggaaaatcaaccagaactgtctcaggaaagatggaaaagagacttcgattggaaactgtctgcatcaggaaaggtgtgctgattgcggtgttagggggagggacgctgattgacggtgggggcctgcaggggtaaatcagctactatcactgtccaacaacatagagagctattaccaacctgaccctgttatcggatttgtttcagtacaacaagaaataaatggactgaccttttcgaattataaacatgtggtgtatgtttgtctctcagagaaatcttatcatagattgtctctgacgattccaaaacctgataaaccttatcacagattgtctctgacgattccaaaacctaaaacaaagaacgcacagctgaacatagacttgaagtaactactactcatgtaacgaaaaaggtctcatgaacacatactgcaagaggtcgcgggagtacatagaacccaagcactaacaaggtataatcttaaaagctttcaagacttgttgcagtacacagcaaagccagataatcttaaagtgagaccgtctcaacctacaccagatataaattccattccagttaactgcaaaggaaagtaatcaccacaatacagggacaaatagagtgtgtctgacttcgtaatgatgaggaatagaatcaatagatttccaaatctatggatgagtagcacaaaggacatctacttccagttacatacaaatgacatccaaacatttagtgaacgtgtgcaacacatgcaatctgcagtagatgtttctgtaaaaaaccaatgaggaccctcaagagcctactaagcatgatagtccagattccttttttgtcgttaaattctttactaacatgagcatgttgtattatctccctccaggacaaggcaacaggctgttggaatatggaccaacaaggcatgcatgaccatgaaggggtccacgttgttggatttgaagtcccgccttcaccggattccagctacgacaaccctgttcctgggaatgaagacgaaggccgggagcccccactgatgccacctcatctgcagcacacgctgctgagcttcccaccaagccaagacgagtcgagcccgctgccccagccccagaccgtggttctgaaccacctttacatcgagaaagagaacacgaggtccatggttgctctggggatcacgcaccggttcaaggccaagttcgtgaccgtcgtgctttacaagccagtgctgaggcggtagggtgtggactgtggtcgtgtgcctgcgctcctgctccctcttctcgcgcaggatcggtaatggtaatgccgtaatggtaatggtaattgaacaccccttgggttgcagcccaccccttccagttgttgttattgttgttgtagtggtgcagaaacgggcgagaacatcattttcgaatgattattagccttgttgtacctaatttggctgctggtggtggcagtgatggtttggttgaaggagtagtttgcttgtgatttggcaccattcttctgtcgctgctgttatgattgcggatgtgccggctctctgcattttgaccggtc

SEQ ID NO: 34424 - DNA, 2922 bp, Zea mays
  Clone ID: UC-ZMFLMO17266A12_FLI
cgcactctcgctcctgctcccggttttgtcgctccccactctctcctccagacctctaccaccaccccacaccgccgcacgcccacacgcaaccacgaaacggaagttttcctcgccttgcctgccctctcgatccgatcgggacccaaccctagcccggaatggcggcggcgaccggcggcatgcggaaggcgccgtcgctggaatggcggtgggtgtccacggaggacgacgacgacgaggaccgcgccggggacggggccgccgccgcggtcgtcggggcggtgagcaggggcgggagctttgagtcggaggatgacgaggatgatgaagaggaggaggacgaggagaagaaggggaggaagaggctgatccggaccgtgccatccgtcgactggttcgacgtcgaggggaacgaggtctccgtcgcgcagcagctcgacgactccgaggagtttgattttggcaggacaatgtttcttgctcttcagactcttgctgtggtgtttggagatattggaattggtccattgtatacatttgatgtcatgtttaacaagtaccctattcttggagaggaggatgtccttggagcactctcactagttctgtatactcttatattgatgccattagtgaagtatgttttggttgtcctttgggccaatgatgacggtgaaggtggtctatttgccttgtattctttgatttgtagaaatgcaaaagtgagtctcattccaaaccaagtacagtctgagaagaggatgtcaagttttcgactcaagcttccaacaccagagcttgagagatccataaaagtaaaagagaaacttgaatcgtcactactgttgaagaaggtgcttctaggcttagtcttgtttgggacttctatgtttatatccaatggagttatcacaccagcaatgtcagtgttatctgctgtcagtggcttgaaagttgggctaccaaatacctcacaagatgctgttgtgatgatttcaattgcacttcttgtagtattgtttagtgtacagaggcttggctgtccctcggtggttgtcttttatgtgcaacaggatctgaggccatcttttcaaatctttgttactttcccgtaagatacgttcagtatatgtttgtgcttcttgttcttccttgccttgtcttggcgtatctaggacaagctgcttttctcattgccaaccaaaagtcatcggagcatgtcttcttttcatctattccaagtggagttttctggcctgttttcttagtggcgaatctggctgcactaattgccagtaggacaatgacggttgctatattccagtgcctaaagcagtctatagcacttggttgttttccccggctcaaaatcgttcatacatctcgaaaatttatggctaagatatacattcccgttgtaaactggtttctattggtttcctgcttgggctttatcattctgttcagaaacatatatgatgttggcaatgcatatgctattgctgagctcggggtgatgataatggccacggtttatgttacaataataatgcttctaatatgggagtccaatattacaaaggttctgtcatttgttatcacattcctgttcttggagctgattttcttctcatctgctctgagtagtgttggagatgggggttgggcgttgttgatttttgcatctgttctactcatgattatgtttatatggaactacgggagcaaactaaagtatgacagtgaagtcaagcagaagcttccaaaggatttgatgaggaagttagggcccaaccttggtaccatcagagctcctggactaggcttagtctgcagtgatattgtgaaaggagttcctgcaatttttggtcattttctgacctcactccctgcgatacactcgataattgtatttgtgtgtatcaggaatgtgccagttccggtggttcctcaaagtgaaaggttccttttccaacgtgtatgctcaaggggctatcacttgttccgctgtatagcgagatacgggtataaagacaagaagcaggagcaccatagcgtatttgagcgtcttctgattgaaggccttgagaaattcatacaaagagaggcagtagagctatccctacaaagcgaagacgacattgactcggacgaagagcctccaacccctgtgaagatcatcacagcaccaaatggcagcctgtactcgctcgacgtccctctcctggcagactatgtgccttcaacagagctcattcatgaagccagctgctccacgcctcaacacgatcctgtactggattatgcacagaaccttgaactggagctggcgttcatcgagcagtccaagcggtctggggtcatctacctcatcgataatcccatcatcaaggccaggaaggactcatggttcttcaagaagctgatgataaactatttcttcgcgttcctgaggaacaactgccgccgggcgatcatgttgatgagcatcccgcattcaaacatgatgcaggtgcgcatgacttcttatgtctgattgctggaactgcactggttctgttcatggatgtctgatacaaaccacactgacagtaaaagaatgaacgtggcaaatgcaaagaggatatcggcacttttgtttttgttcataatttgatgatggcttaggttgttgtcggaatctatctcccctgtagttgtacaatgccaaaatatagttggaagttttagctggtacaccattagggtgctgtattaaccttttttactcttgtgcagtaaagattctttttgtcagcctccttgattttgttagataaggtttttggtgtttgcaaagttactggtgaatgtggcaatttgtatgtatatttttgcctctttttttaggtaacggaagcataagcatctggctttgcg

SEQ ID NO: 34425 - DNA, 1407 bp, Zea mays
  Clone ID: UC-ZMFLMO17266B02_FLI
gcgcactcgccgcgcctgcgccctgcgggcagtctcttcttgccctttctcctgtgcgcagccgcggcggacccaatctcgcattctcgcgttccgagatactgttgttctttcagggagatagatagattcctactgctcgccattggggttgccttggccgcgtgccgtccgtcgcttcgtcgagctgcgtgcggggcgctcctcgtcctcctcacgatggggggctggaaccggtcgctgtacgtgacgggccaccgtgaccgctccgccggcgcttcgcgtactcctctgcctccgccttcgcctgattacggagacaagcaccagcaagtcccattatgggagagggaattctgccgccacgttggcgacatcacttgggagcagttctgtgaaaacaagcagtatgttggacaattccataaactcgagccttgggatgattcagcggcatttgattgtttccagaacgcaaaggcaaggttctgggcgagctaccatggccagccttctgacattcctttgctggacgacccggatctgtacatcgacaaggtcgaccaccaatgcgaagtcgacccggagttggtagctgatctggatagcgtagggctaccgttcgagtcggatgataatcctgcctcagccaaagggtggaccaatgctggggccgacaacaagtgcacccagaacgggtctggaaactgggacgccttcgtagaaaagccagctgaagtcagtaagtgggactccgaggccaatctcgcatccaacacgacttggggcggccaggccaatgtagcaacacctgaggcggtttggagaggccaatctttcagtaaatggggcaatgatagcaacaccagccggggtgttcctctggagaagccaagctggcgtggctgtaacaagaaccgctacacacccaacagctggagcagcaactttcatagcagaccatccgacaataggtaccagcagctggaggatccgagctacacttctgggactggaaggaaatggaacggcggcgacggtggcgggtacgtcaagcagaggagctttaagcacaggaaccaggaccaggggcagcaccagcagccgaggagtggcagctggcagcaggaccaaagaggaaggagcaggcagtggcgtccggtgcacagcagggctccctaaaatggtccggcgtcttgatctcgtggcgagaatcgcaggtgtcttctcttgtgcagtcagttttcagctgctgctggcaaagtggtgcctgtaaatagatgttttttttttgtttgagttgtatgctgcagctgctccttcgcagctgcgtccttactttgcttatggtgcaatgttaatatgttataatgttagttaatatggggagcatcacagtttttggtt

SEQ ID NO: 34426 - DNA, 1273 bp, Zea mays
  Clone ID: UC-ZMFLMO17266B10_FLI
agtacaaccacggaggccatgttcatcatttcaccgaatggcaagttcaagcggaacattaaatcatggatgcgtggtgctcttctgggaagcggctcatttgggatggtgtacgaggggatcagtgatgagggtgcattttttgctgtgaaggaagtatctttgcttgaccaaggaagcaacgcacaacaatctattgttgcacttgagcaggaaattgcactcctcagtcagtttgaacatgaaaatatagtccagtattatggaactgacaaggaagaatccaaactctatatttttattgagcttgtcacacaagggtctctttcatccctctatcaaaagtataaactacgagaatcacaagtctctgcatacacaaggcagattcttaatggattggtttatctccatgagagaaatgtggtccacagagatatcaaatgcgccaatatattggtccatgcaaatggatctgtaaagcttgcagattttggattggcaaaggagatgtcaaaaattaatatgctaaggtcatgcaaaggaagtgtttactggatggcacctgaggttattaatcctaaaaagatgtatgggccttcagctgatatatggagccttggctgcaccgtgttggaaatgctaacccggcaaataccatttcctaatgtcgagtggacaaatgctttcttcatgattggaagaggggaacagcctactattcccaactacctgtctaaggaggcacaagattttattggccagtgcgtaagagttgatcctgagagccggccttctgcgtcacaacttctggagcacccatttgttaacagaccactgcgagcttcatttgaatcttcgtctccaccagccatctgattctagtattgatataatggggtgtttctcgttgaggccaatgctcaggtcacgtactcacgtgttgatcttcatgatctacactactggttccagaatggaattacgtgggcttgtttaggatgtagtttagtagctgtagtccgtagggttggtgggcagcattgctctgtggttttgtattctttggggtgttcttcattgggcaaagggttttcttcctggttattacgtagatttgtgtaaacttgtaggtaaaagggctgcaattgcctctgggctctggtgtaggtttagccgatgtttgtgaatgtttgacatcgccattctttacgtaaatggttttgttgctcaaaaaagcatccggagcattgaatccccctggtgttacttt

SEQ ID NO: 34427 - DNA, 1751 bp, Zea mays
  Clone ID: UC-ZMFLMO17266C01_FLI
caggcctcctgcatgttagagaaaaaaaagcttattgtgcatgcatacagtgtagtacaatgtcatgggcaactctgaccttctcctcttccaaattataagacattttagctttcctaatacattgctttaactatgtatctagacagaatgtatatctaagtgcatagcaaaagttatgcatctagaaaagccaaaatgtgttataatttgtaacagagggagtaaaacacaggaatacacaactgtttgtagttcttttatcatttgttggtgtttttatttacatatataaggaataatgataaaagactaattaccataacatatttgaaacaagtaaattcgttcaaagtttcaaacatcaattatggccattcaaaatttggtttatttcatcataccatatattgattgcataatcacttaattttgttcagttatgacacctgccagtttgtatttggaagagaagtcttggttttggtatatatgtgggagtgggagtctatagcatagcatcaagattaaattgtgttgcagatattgttgattttgtcattttatcaatttgctactgtaataatatatgccaaattgagaattgagtatcagatatgtgtaactatattatatataaacctcaatttatttggagtactgctacacatacaaccatttgctacaactcagggtctaatcattgaaataacctatatggaaaattcattggcacaagctgtgagcaaagtggatgtatgtagaatttctcatttatttcttaacttctttcacttttgctatgtgaatcttttgactttgactgatttcaaaaatgtgatggactggtggtggtgttattttaccatgtctactagtaacaaacattgttattaaaacgtcgcttaaacgtcgtttaagcgtcgtttaagcgttaaaacttgattagcagttggaacgtccgggcgttttaggtaagctgcgtagaacgtccgtttcgagcgtttaagcgtcgcttaagcgtcctaatcgcgttttaggacgttttatgcgtgcttgggacgttctacccattatgggtctttcctgggcctttaggtttttctgtgtatgtgttggacgcacgccaccctcctctctcctctacggctcagccggccgccgccctcctctctcctctacggctcagccggccgccgccctcctccctcctatcctccaacatctccggcgcgtctctcctcagccgcggaggcaaagccggccgccggccgtggaggcacagcagacctgcgccaccgctggccgcctaccccacagcagatctgcactcaagaccagcagccagccagccatcctctgcggctccactctgccagcgcccaagaccagcactagcagccagccatcctccacctccactgctctccatttgatcatttggatcgtctcgttcccggctaacctggatttcatgatcttcaaccaccggggaagagcgctgccgtcagactcagacctgaagctcaagacatagacatgccgttccagaatccagatcttgttccttatttcccttgtaacctggaggaggttccaattttgtgcccgtttgtttaggggggaaagaacttttcctgaattcagatcacaagtagcttatctatgctgtaactcgataatttgtggcgtcttaatttctactatctgtatggaggtgattcaagcttttgttgtagtccgagcagatc

SEQ ID NO: 34428 - DNA, 900 bp, Zea mays
  Clone ID: UC-ZMFLMO17266C08_FLI
ccgcccgtgccctatctcttcgtgccgcaggttccagagactccactgcacagacctactgagctctctcctcttctcaaccattcaccggtaaacgaatccaccgaccaccactcccaggatcagggtattccaactctgattacatggagccaaggaggagatgaggtgttcctggaaggatcgtgggataactggacatcgaggagggcacttgagagatctggaaaagatcacgccgtcttgttggttctgccatccggagtctaccattaccggatcatcgtggacggggagctgaggtacatccctgaactacctcacgcagctgacgaaagagggcgagtggccaacgtcctcgatgtccatgactacgtgccagaaagcctcgacagcgtagccgagttcgaagcgcccccgtctcccgtgcacagctacgacctgcattgcccgggcgacgaggagttcgccaaggagccgcccacgctcccgccccagcttctcgtgtccgtcctcgggggggacgtcgatagcgctggccatggcaatcaagctttgaagccacagcacgtcgtcctcgaccacctgttcatcgagaaagggtgggggtcgcagtcgctgctcgccctcggcgtcacccaccggtttgagtccaagtacgtgagctttgtgctctacaagccgttggagaggtgatggtggtactgtctactagctgtgtgtgagtggaagaacagagtggactgctggaggtgaataatgtgtgtgtgtgcccttgtatagaagggaaatgcatgcaggagcttgtagctgtagctgatcttttattttatttttttattttcctttcactttcgacgaaagtaataaattagttgaccatgcatgcatgcttcgtgc

SEQ ID NO: 34429 - DNA, 919 bp, Zea mays
  Clone ID: UC-ZMFLMO17266C11_FLI
ggaaaaaagagaggaagaaacccagacggaaaagaaagagttccttgtgatcttttttctttccgcctgcttccatgcatgtttgcctgacaacatttctgtacggtgtcacgcgcacgctgacgcagggaccttctggacgagtacacggtggcggtgcggcggatggcgtgcgcggtgctggagctgatggcggaggggctgggcatcgccggcggcgccggggacgcggtgctggcgcggctggtggcgcgcgcggacagcgactgcatgctgcgggtgaaccactacccgccgcggccggcgctcaaccccagcctcacggggttcggcgagcacaccgacccgcagatcatctcggtgctccgcgccaacggcacctccggcctggagatcgcgctgcgggacggcgcctgggcctccgtcccgcccgacggggacgccttcttcgtcaacgtcggcgacaccctgcaggtgttgacgaacgggaggttcaggagcgtgaggcacagggtggtggtgaacagcgagaagtcccgggtgtccatggtcttcttcggcggcccgccgcccggcgagaggctgggcccgctgccgcagctcctgggcgacggcggccggagccggtaccgggacttcacctggagcgagttcaagaccagcgggtgcaggaccaggctcgcggaagaccgcctgtcccgcttcgagaagaagtagctagaggctacgtcatttgcatgaccggcggtaggatcgattaccatgtatgcttctctgtatatgtcagttgcattgccacagctctagctactggcgcccgtacgtgtatattagtggccatgctcgtattgtacgtgcacgtgtatgcacgcatatacatggtggcaccacacagggtatcatgcatccattgttatct

SEQ ID NO: 34430 - DNA, 2171 bp, Zea mays
  Clone ID: UC-ZMFLMO17266E12_FLI
gcgccgcctcaacctccatggcaaccggctgtcgggcgtcatccccgccgcgctatccaacgcctcgtcgctccactctctctacctctacgggaaccgcctcacgggcggccttcccgtcgcgctctgcgacctcccacacctccagaacctggacgtctccgggaacgcgctctcgggcgagctgccgctggacctccgtggctgccgcagcctgcagcggctcgtgctggcccggaacgccttcacgggtgagctccccgcgggagtgtggcccgagatgcccaacctgcagcagctcgacctctcctccaacgccttcaacggctccataccgcccgacctcggcgagctccccaggctcgccggcacgcttaacctctcccacaaccacttctctggcgtcgtgccgcccgagctgggccgcctcgctgccaccgtgacgctcgacctccgcttcaacaacctctccggggccatcccacagacgggctccctcgccagccagggccccaccgcgttcctcaacaaccccggcctctgcggctacccgctccaggtcccctgccgcgccgtcccgccgcccacggagtcgccgacgccgccggccacgacgaccccgctgccctccaccgcgtcctccgaccaacaccagcccatcaggacgggcctgatcgcgctcatctccgtcgcggacgccgccggggtggccctggtcggcgtcatcctagtgtacatgtactggaaggtcaaggaccggaaggggcgccgcgacggcggcggcgacgacagcagcaagagcgggctctgccgctgcatgctgtggcggcacggtggcagtgacagctcggacgcgtcctcgggcgacggcgacggcgaaggcaagtacagcggcggcgagggggagcttgtggcgatggaccgcgggttccgcgtggagctggacgagctgttgcggtcctcggcctacgtgctgggcaagggaggcaaggggatcgtgtacaaggtggtggtggcgaacgggaccacgcccgtggccgtgcggcggctgggcggcggcggcggcggcgcggaccgctgcaaggagttcgcggcggaggcgcgcgccgtggggcgggtgcgccatcccaacgtggtgcgcctgcgcgcctactactggtccgccgacgagaagctcgtcgtcaccgacttcgttggcaacggcaacctcaccaccgcgctgcgcggacggcctggtcaaactgtcctgtcgtggtcagcacggctgaagatcgccaagggcgcggcgcgcgggctggcgtatctccacgagtccagcccgcggcggttcgtccacggcgaggtgaagccatcgaacatcctcctcgacgccgacttcaccgcacacgtcgccgacttcggccttgcccgcctgctggccgtggccggctgcgcccccgacgggccgccctccacgggtggtgccgggctcctcggcggcgccatcccgtacgtcaagccaccggcgacgggtacgggtccggaccgtttcggcgccggcggcgggtaccgcgcgccggaagcgcgtgcgcccggtgcaaagccgacgcagaagtgggacgtgttctcgttcggtgtggtgctgctggagttgctgacgggccgaggcccggccgccgaccacgcgtcgccgtcgacgtcggcgtcgttctcggcgcccgtgtccgggtcgacggcgacggaccggtccgggagcggggagcacgggggtggcgcggtgccggaggtggtgcggtgggttcgccgtggcttcgaggaggacgttcgccccctggcggagatggtggacccggcgctgctacgaggccccgcgctgcccaagaaggaggtggtggcggcgttccacgtcgcgctccagtgcacggagagcgacccggagctccggccacggatgaaggccgttgccgacagcctcgaaaagatcggctaatgagtcacaaggtcatgctagcgtacacaacgccatgcatgctcatccaaggtcattgttatttttattaccttttccgtctcctccccgattttctctctcttgtaattcagtcttttttttaatttccttgctgtgctctcttgcaattggtcgtttgtaattgttggctattcttttgggtgcaattcatgttttccgt

SEQ ID NO: 34431 - DNA, 1289 bp, Zea mays
  Clone ID: UC-ZMFLMO17266F06_FLI
ggccacctcaacgcttacacgtcgcgggagcagacgacctactacgccaaggtgcttgacaaggacgtgccccgtgcgatggaggtcctcgcggacatcctgcagaactccaatctcgaccaggcccgcattgaacgtgagcgcgaagtgatcctacgagagatggaggaggttgagggacagtctgaagaagttatatttgatcatctccatgcaactgcattccaatatacatcccttggcagaccaatcttgggttctgcagataacgtcaagtcaatcaccaaagaggacctcgagaactacattgcaactcattatacagcttctagaatggttatcacagctgcaggcaatgttaaacatgaagacattgttgagcaggcaaagaagttgttcagcaagctatcaactgaccctacaacaacaaacatgttggtctctaagcagccagcctctttcactggttctgaggttcgaatcattgatgatgacatgcccctcgctcaatttgctgttgctttcaatggagcatcatgggtggatcctgattctgttgcactgatggttatgcaaacaatgcttggttcatggaacaagagtgctggtggaggaaagcacatgggttcagagcttgtgcagagggcagcaatcaatgacatcgctgagagtgtaatgggattcaatacgaattacaaggacactggtctttttggtgtctatgctgttgctaaggctgattgcttggatgatttggcttttgcaattatgcatgagatgagcaaattgtcataccgggttacggaagaagatgttatccgtgcacgtaatcagctgaagtcctctatccaactccaccttgatggttcaactgctgttgttgaggacattggccgtcagctgctgacctatggacgaagaattcctacccccgagctttttgcaagaatagatgctgttgatgcaagcactgtgaagcgtgttgcaaaccgcttcatctttgatcaggatgttgctattgctgcgatggggccgatccaaggacttccagactacaactggttcagacgccggacctacatgctccgttactagattaatcagccggtgtacccatgtttaccgtctgcaaaagacaagataaaatttgcctcttttagcgtcagtatattaaggcctcagcactgcacattacgtgctgcgatggaggaattttttgagaatttgttttatttcttgtcgtgtccaaaatccacaaatctgtcaataatgataggcaggttcgactg

SEQ ID NO: 34432 - DNA, 1285 bp, Zea mays
  Clone ID: UC-ZMFLMO17266F11_FLI
cgccggcgccggcccccgcgggcctccgcgggcgtgtgccggtgcaggcgcacctcccgcgcggcggcctcggcctcgccccccgccgcagcagccgcgcgctccgcgtgcgcgcgtcggtggcgatcgagaaggagacgccggagagcgagccgcccccgacgttcctccgcgaggacgggcacgggtccgggtccgtgcgggcgcggttcgaggccatgatccggcgggtgcagggggaggtctgcgccgcgctcgaggaggccgacggcggcggcgcgcgcttcgtcgaggacgtctggtcgcgccctggcgggggcggtggcatcagccgcgtcctgcaggacggccgcgtcttcgagaaggccggggtcaacgtctccgtcgtctacggggtcatgccgcccgacgcctaccgcgccgccaaggcggaggccgccaagaacggggccgccgccgcggatggccacaagcctggccccgtgccattcttcgccgcggggattagttcggtgcttcaccccaagaacccatttgctccaacattgcattttaactaccgttactttgagacggatgcaccaaaagatgcacctggtgcaccaagacaatggtggttcggcggtggtactgacttgactccttcatacatcattgaagaggacgtgaagcatttccattctgttcaaaagcaagcatgtgataaatttgatccaagttttcacccaagattcaaaaaatggtgtgatgattatttctatattaagcaccgtaatgagcggcgtgggctaggtggaatattttttgatgaccttaatgattacgatcaagaaatgcttctcaactttgctacagaatgtgcggactctgtacttcctgcgtacataccgatcatagaacggaggaagaacactccgttcaacgaggagcacagggcatggcagcaattgcggagaggtcgttatgtggagttcaaccttgtctacgaccgtggtacaacatttggcctaaagactggaggaaggattgagagcatacttgtgtcccttccacttacagcacgatggcagtatgatcataaaccggaagaaggaaccgaggaatggaaacttctggaagcctgcataaacccgaaggattggatctgattagccgttattcttgagatcttttgttagagttttcccttctgtagggctaagaccacgtgcagtttcattatatattttgcatctgtagaatcgtgaataaatatgatgtagtgatgttgtagctgtttgtatct

SEQ ID NO: 34433 - DNA, 2127 bp, Zea mays
  Clone ID: UC-ZMFLMO17266G06_FLI
gcgcggcgaatgtggaaggacagagtcaggctgaggaggatcaaggagcggcagcacaagcttgccctgcagcaggcagagctgcagaagttgaggcccaagcccatatccgaccaggccatgcgcaagaagatgtcaagggcacacgacgggatcctcaagtatatgctcaagctcatgcaggtgtgcaatgcacgcgggttcgtttatgggatcatcccggacaaggggaagcctgtcagtggcgcttccgataatatcagagcttggtggaaggagaaggtgaagtttgataagaacgggcctgcggcgattgagaaatacgagtctgacaacttagtatccgctactgcccagagtggtggaactaagagccagcacagcttgatggatctccaagatgccactcttggttcactgctttcctcattgatgcagcattgtgatccaccgcagcgcaagtacccattggagaagggtgcttcacccccgtggtggccttcagggaaggaggaatggtggaccgccctgggtcttccaagcggccaagttcctccttacaagaaaccacatgatcttaagaaggtctggaaggctggtgtgcttacaggtgtaatcaagcacatgtctcccaattttgataagataaggaatcatgtacggaaatcaaagtgtttgcaggataaaatgactgcaaaagaaagcctgatttggctgggagttctacagagagaagaaagccttgttcacagaatcgacaatggcgtatcggagattactcagcgcagtatgccagaggagaggattgcagacacaaatagcagcagtaatgagtatgatgtgtatggttttgaggatgctcctgtttctacatcatctaaagatgatgaacaagatctgtctccagttgcacaatctgctgtggagcatgttccgaaaagaggaagggaaagagcttacaataaacgccctaatcaaatcgttcctggtaaggcaaaagaaccaccaaagagaaaaagaacacgccacagctccactgttaccgagccagatgcacacagagttgttgatgcaccagaaaactcaagaaatttgatccctgatatgaatagattggatcaagtagaaatcccaggcacgtcaaaccagattgtcacctttgaccatgggggcaccacaactgaagctttacaacacagaggagatgctcaagtacaggtccatcctcctggtgctgaggttaatagcttctatagtgctccaactgcaaaccctactcctataagcatatatatgggtgaccagcctataccttatcaaaataatgacagcacaaggccgagatctgaaaatagttttcctgtagatgctcatactggtttaaataatcttcccagcagttatcagaacttacctccgaaacaatcactaccacttcccatgatggatcatcatgtggttcccatgggtatcagggcacctactgatagcattccttacggtgatcatatactaggtggtggaaattcaacttctgttcctggagatatgcagcaactcatagattttcctttctatgctgaacaagataagtttgttggcagttcctttgaggggttgcctttagactatatcagtatcagtagtccaatcccagatattgatgacttgctgcatgatgatgatttaatggaatacttgggaacataacattcggtcaggatgagtctgctagcatttgttttcatccattttagtctcactggagtcatcatcctaacttaagtatggagggctaaacttctcattttgttgccggtcttgtcattggagaccaaccatctgttgtatgctgagtgatgacttgtattctttggcaataatgtgtcatacagtgacacaattgcacatgtggaaggtgaacatggcctaagttaaatatgatatctttctggagataatatctgttgaagaaagggctagatttttttttatagttttagaatccttgagatatgattgttttcctctgtcatcctatctttgtctatggcttttgccatctacaaaaacatcgggaatccaacactgtatatgcaataaagaaatgaaaaaaatgattttgcc

SEQ ID NO: 34434 - DNA, 858 bp, Zea mays
  Clone ID: UC-ZMFLMO17266G08_FLI
gtagatggaagcaggcggcggccacggccacgaccggcagcttgtcaccgtaacagcagcggagggcgaggagccgccgatctgacctattcctagttgcgcgcgtgtcccgtgaggcgggagctctggaggccatggagagggagccggcggtcgaggaggaggacgacgaggaggaggaggtggcgtgcgagtgctgcggcttcacggaggagtgcacggcgccgtacatcgcgggcgtgcgcgcgcggttcggcgggcggtggatctgcgggctgtgcggggacgcggtgggcgaggagctggggcgcgcggggaccccgcccatctcccccgccgaggcgctggaccgccacgcccgcgcctgccgcggggcgtccgcgccgccgtcgcccgcgggcagccccgacggcctcatcgctgcgctgcgcctgctgctgcgccgcaggctcgggtccccgccggcggcgaggaaggcgcggtccacgccgagcagcccgacgcgcgacgccgccgaccccggcgtctccgccctcgccgcgggggcgtcccggagctcgctggcgcgcacggggagctgcttcgccgcgctcgtcgaatgagaaggggaaacgaggacggactgacggaaggggaaaagatcagggtagtctctctctctctttttgccttcaatgtgtaatgtatttctgctcgtttctatctatggaggagtgcgtaggtagtagtactagaggtgccaataaacatccgtgtatatatgatggggaggaagatcgacgacgatctgtgttatttataatatagtatatatacttgtatgaggaaaaaggaagtaattccatgtttttctcaggc

SEQ ID NO: 34435 - DNA, 1605 bp, Zea mays
  Clone ID: UC-ZMFLMO17266H05_FLI
ccgcacgccccgcgcgtgggcaccgcgaactgctccctctcgtgatgcccgccgccgcgcgccttcctccttcctccccgcatcccgcgaactgctccctcccccgccccgcgaactgctcctcccgcccgcgcaccgcgaactgctccctcccacgcgcgcccactgccctcaccctcgccctcgccctcgacggcgctgccctctgtgatggcgggatccacggacgcatatcagtcaggcacccactatctgtcgatggaaggtgaggcacccactatctgtcgatggaaggtgatcgacgcagtgatggtctgcggtcaacatcgcaggcatcctcgccccacctccaggtcctcccgacccccgtccccgcgcgagtccgccgtcgttgttcccgaccgtcttccccgtcctctcggccaccgtcccctcgtggcctgccctgcagatgggaaggcatggcgtgtaggggcggcggtctgggaggtggggaggtggttgccgcgatgtaggatagccgccgccaccgcgagggccagatgctcgatatccgcaaggccaagcacgatgaaagcctccagaagaagcgtcacgattcctcgcatctgccgctggcgtcgtgctgctgatgggcagcacctccgtccccctgcctccacccgggtctccacgccgcgccgtcagaagacaccagcgcctccctccccctccctcccttcacccgctctccacgactgcaaacaaaggcagaaagggtgcttccgcgacatggagcccggtcgcatcccatggaggaacagtctccagtggaaatacagaaagagatcttccctgatggcatctttccaactggtggaaagtcagagatagagggcaaaaacaaatactttgagttgttccagttcaataagggcgcaacactttcggcccttttgatagactaccaaccacagtgcaggcaagtcaaagaaaatcccaattttagttgatgccaaaaagagggaggggttggacgagcttcttgattttacatcttagtgactgcatctaaactgtgagatgtggtcgaatcagatgccatgtccatgtaaccgaagaatttggttcgtggaagttttaatcataggaagtcttgcttaggctttctcaaaccttgaagcctttggtaaaggaaagaattgattatgagaatgccttgatcgtactcctagaacttgtttctgtatggatatgaagcattattcaacttccttggcattcttgggactgccttattccaaggttagcgatggatcaaggtgctccactttagatatgtgtgcaccagcgcctacgcttctcgcttctgatcatagatcgggtctcccttagtgttcagccatcgcaacttgtcctattcagattcacagctactattcattccatctactgaggttcttgtcaagtgcttgttttttattgcactttgtgcatagtccgagatcatattctcaaattattttgtgctcccaccacccttgtctttctagctcctcaagcacatctggtgtatataaggtttggatcttgctagctatcttctatcaaaatattttcatgtcc

SEQ ID NO: 34436 - DNA, 938 bp, Zea mays
  Clone ID: UC-ZMFLMO17267A01_FLI
atattcggccactaaacccatcgaagcacacctcgcctcatgggtatttctaattttaacttcctatgcaaactaagcgtcttatttcacgatcataaaatctatagtaaaaatagtgatttggctcaccgttatcaaattgattcagtgttggcgggaacgacgatagtcttcgattgaagtcttcgatcgagcagctgacgagtatagcacgaagcttcactttctcttccatccacaattcttggaatcttttcatattaagtagaactccacataaacggtgatgattcttgttctggcctttcgccgaccacttgaacatcgatcaaaggcttgcttctctacatcttcttggaattcttttgtcggcgtgaacatacgtcagagatgtcacgtagggactggcatcaagacgagacgacgaaacaatcgagtgcggtaaggagctggagaacgacgacgggccaagcagaggagttcgcgcgcggccaacagatagcttgcgcgcagggacttcacggcgcggtggagctgagcgccggcaagcatcccaggcgcgcgacgagctgagggggcgagctgcgcgtgtacagaggacagggaaggcgcgggccgggctcggccatcggcgcggcaatccgaagcttcggccagcaggacaccgagcagaagttcaacgcgcgcagggagatgctccatgtcgaggagactcggccggttcaggaaaacggagcgccggccatgggaaagggaggacaacagggcgcgacgctgggagatccggccgggctgggagagcgacggccgtaaataacagaggcacgacgttggggcaggggcaagcgacggctggccagagggtgggcgggagctcgagacgagctcggcagggaggaaaacgcgtcagagggctgcgcgcagaggagcagggcgag

SEQ ID NO: 34437 - DNA, 2057 bp, Zea mays
  Clone ID: UC-ZMFLMO17267B02_FLI
acgacagctcaggaatgcactgacatggtttacagtgaacatatcctgtacaaaaacagaatagagaagcaaatgaattcacatgccaaagaagatattaatcaagacctaatcttgcatgaacaaaatgatgagaaaacaaattctcatgaggcggagactcctgtagctgagtcaggtgactgtgattctccttccaaagcaattgctagctctgagaacatcaattttcagggcaaggtcattgaggtatctgcaagcagccatctagaaacagtatgctcaaaatatgactcgccgtctggaccaaacatgcacaaagaaggaagttcttctggtccagctcgaatatctccagagctggaggaaaggcaccatgtggaggttcaggtaaaagtcgacacagagcatcatttttctgtcagtaatgcaaacctagagatatcttttgatggtccaaatccaactgaatgtgacaaggaaatctctgccattggtcatgggagtcaagactatattcaatcttcgcagtcacatcaactctcagcctgtgcaaaaccttggagcttggactcagcgaaaacaaaatcggatactgtcagtattcaagctcaacttcgaaaccagttggagaatgctcaaacatatcaatctaataacctttcacaaaacatgcaacaacaagagcttacaatgcctcacaatgttcaaacatctgcacaaattcaagatcaattgcttgcacagcctaatcacagaaaccaacagtatctccaaatgatgcaagggtatgcaacacaaatgggggaatattaccaacaacaactgtattacctgcaggctcagcacaatcaacagatgcagagtctgcaacagcaacagctcccgactgagcatcttcagcaaacttttatgcagcaagtacagcagctgaaccagcaattggtactttggcagcaacaagtgcaacagcagccacaagtagtactgcaacaggcactgccagttcagcaacttcctgacgaaaaacagggtcagtgtccttccggggatagcaaacacggccaaaataaacagcagcaacaagcacctcaaatggatcaacaaagccagcagttgcagcaacaacagcttctttatcttcagcagcaacaacaaatgtatcttatacagcagcagcagatgtatcaacaacagcaagctcagcagcaacagctcttacagcagcagttaatgcaacaacaacagtatgtactgcagatgccacagcaccagcaagactcagttcggcagcaacaacagcaactgtttgagcaacagcagcagcagatgatgcttcttcagcgacagcaacaacatattatgcaacaacagatccaaccgtacgtgcaacagcaacaaaaccaacaagggcccaaggatcagacttacaagtcaaatcatcaggatggaaggaacaggcaaatggagcatggacaactgtctgaagcttcacagagcgatggttccaaactgcgcagcggtgagcaatctgagttatcctacccgtcaactcctcagtcagaacgctcaaatcactaaggccttgttcggttattcccaatacacatgaattggatgagattggaaaaaattaagaagtttgacttgtttgggattcaaacccatccaatcctactcaatccacatagattgagagctaaccgaacaagccctaaatcactcaggatcatgtatcaaggaacatacttaagaaacatggaagcatgcatccatttccttgccctgctgccagtggaggctgattccatactgtgtcagagtgatgatgatgtgctgaccttcccgaatggtgatgaagctccatctccacggtgctctcttctttctaaattataaggcatttcaactttttttgagagtcaaaacatctcaattataatgccagctatggtttgatagcttggtattagattctcagtaatgctcgcatgtaaggggcgatgtgatgtgttggagacttcagtcaagcagttacatatcaagaacatatttgg

SEQ ID NO: 34438 - DNA, 1853 bp, Zea mays
  Clone ID: UC-ZMFLMO17267B11_FLI
gagggactagggctcgattggagggaaaggcgcgatcttggaggttcccatgggcggatgcctctcgcaggaggagcaccggctccagagcaggccagctgaagctgctggagcagatggattgcggaagtctaaatctgattctaaagctgtagcaagtgttcttgctcctccaaaagatgtggtggacctgcaagtagaaggatatggaaatgtgaatattttcacatatgacgaattaagagcagccacaaaaaacttccggccagatcaaattcttggagagggtggatttggagttgtttacaaaggtgtaattgatgaaaatgttagagcaggtttcccatcgagacaggttgctgtgaaagaactaaacccagagggctttcaaggggacaaggagtggcttgcagaagtcaactatcttgggcaacttagtcatccaaatcttgttgaattgattggctattgctgtgagggttcacatagactgcttgtctatgagtacatggcttgtggaagcctcgaaaagcacctttttcgccgggtttgccttaatatgccatggtcaacacgcatgaagattgcattgggtgctgcaagggggctcgagtaccttcacggagctgagagatccatcatttatcgagatttcaagacatcaaacatcttgctagatgcggattacaatgctaagctttcagactttggtctcgcaagaacaggtcctagtggagaccaaacccatgtgtcaactcgggtcatgggaacttatggatacgcagctccagaatatgtcatgactggccatctgacggcacgaagtgatgtttatggcttcggagtggtgcttctagagatgattatcggaagaagggctgtggacaagagccggccaagccgtgagcataacctagttgactgggcacggcccctcctcgtccataacaggaagctgttccgaataatcgatccgagaatggaagggcaatactccaccaaggctgccactgaggtggcaagccttgcataccgctgcctgagccagaaccccaagggacgaccaaccatgagccaagtcgtcgagacctttgaggccgtgcagaacatgcctgaatgccaagacatactcctccagaacagcatcacaggtgccgtgacgctctatgaggtccccaaggagcctgcagacagagttgagctggagaaggccaagcaggaaccggcagtaaagagcgccgcgatgccgcccatgaacggaaagccagtcccccagagcaggcggacgcggcctgggaatggccggagcaagagcgagccatcgttggagtgcaagatgtacatcccgtcaccggactctgatggacaccagctcggcctggaggcagtcgcatccccagatggaagcataagggaccctcctgatgaggatttgtacaagatataacaccagggcagtttttcttcaacaacgaggggcagatctggcgcagtgttgagttgtgggttttcaaaccagcctcttcgcatttagggaggaagatttgcatctgtttatctctttctcatacctcatttacgtgggagcctcgatctgcctttttaacgtgagcccgcgttgctcacctttggcgccgccactcccgttcttaaagatcaatcagctgtaattttttctctgatggccactggccacggtagcgttcatattcttccgattagcaattgtatgtagaggagagttgtgatggaaagcatgtgtgtgtttgccatgacgacgctgtaaaaacctgaaacacttatttctaggggggtttccactccaaaatggaagtggagagatgtgtcctgat

SEQ ID NO: 34439 - DNA, 1024 bp, Zea mays
  Clone ID: UC-ZMFLMO17267B12_FLI
cttctctatccgccagagggaaatacccattgatctcatctcatgccctgttgccgcgcctgctcctccttccccatccgcacccaccgccgcccctccggcagccccgccacgcgcccacccgcaagcttcccgcacggccaccgctgcctggtatcaatcaaatcatcagtcgtccgtcctcctttccttcaaatcaagtccatttgcactccctgtctaccctctccctcgtctctggtgggcggtggcctcgcctccctttccccgtcgccctgatggctccctctgcagctctcgctccggtggccttccgctccgccttctcgactccgctcgcgtcgaaccctacccgtaatagaataaacatagaaggcactttctgtttgccgtgttccgcaaggaagagagctagttatagatctttccgagtgtacagtttatttggagggaagaaggataaagatgagaatggcgatgaagcgccatcgaaagcagggatttttggaaacatgcaaaatctctatgaaactgttaagaaggcccaaatggttgtccaagttgaggctgttcgggtgcagaaggagcttgcagcgactgagattgatggttattgtgaaggtgaactaatcaaggttacactttctggaaaccagcaacctattagagttgaaatcacagaagctgcaatggagttgggtgctgaaaaactttcggagctggtcaatgatgcttacaaggatgcacatcaacggagtgtccaggccatgaaagagaggatgtctgacttggcacagagcttaggaatgcctgcgggccttggtgatggtctcaagtgatgctgcgattcgggaagcctttctaataatttttttttgtccctcaattttgtatacgaagtcacgtagtaagaagtgtactcgtgaccagctgtttcgttcagcgttagctgtgattttgttttgtacaagcagatatatttgcactaaatcgtggtaacgtcgtcctctggagcttggatgtc

SEQ ID NO: 34440 - DNA, 1210 bp, Zea mays
  Clone ID: UC-ZMFLMO17267C03_FLI
agggactaaagaagtaaagagtaaagaaatacttgtgccctttattttattttttttgttataataggttttattgtactgctactttttccgtgtaaaagaacttttgttttggatacttctcttttcatgtaggcatatatcagtatatcaatctatgtttcatttactcttagttctttcttccttttgaccagcagctcttgtctttgtagtctgagctggaatatctatccttcatgtacgttaaccccactggttttgctggagtaagaaaaagagttgaagacttgtacaaggcccatgaacaagaattgcaagattacgatactataacaccacatctgcttgatgtagtgttgtgctagcatgctctggtgttccctatatatttcttacacagttttctaactcatttcatatgggatcgtacaattaaccagtctgctacacattttcattagttccaaaatttgatggtggtattttaattcattaggctgatgcctatagggagctttacaattagctgcatgtaacaaggttcttagataactgtaggatccgagataggcagcttggacttcatggaggcgtcgtgggacgagcccgtcgccttgcactttgggattgagtttcacggagggagacaacccctttgccgcatggagaagcttacgaaggcaaggcaacaactcagcggatgtcgttgcacagcaggcagacacctgtgatggagcagtatatagccgaggccggagcaggcgtccccagcgtccccatacgtgtttctcgccccaccccgacagaggccgctcacccgtggtgcagatatcgcccttcatcttctctgccttgggcatcgccgtctccatcggcgtcttcgtcctcggcatggcatggtgagtcacagtgtgcctccacaccctgtgtcgccaaatctgcacggcgttggaggctccagtggtgtcctccatggaagagacataggtcaaagggccatacttcatagctatttccccctcgatgtttcaagtgaaagggcctaagagtattggagcactctatgttacctgcttggcgccaactattcaaaatttactctagggtactagataattttccttgtcgagttttattttggtatatgtaactttgtaattgggcctaagcgtattggagcactctaagttaacaggtgcttgaagct

SEQ ID NO: 34441 - DNA, 1794 bp, Zea mays
  Clone ID: UC-ZMFLMO17267D11_FLI
agctaaatataatcatgtgacattcatcattcgctcagttcttttttttcacgaaagccaaaacaccgaatttcatatccttgcctttttcttctcaaaatgtatctccgtattccctttaccagtacaaaaaagtatatagaatcaacgacttgacacaagccagtggcttagctccttgcctttttcttctcaaaatgtatctccgtattccctttaccagtacataaaaaatatagaatcaacgacttgacacaagccactgttggagtggcttagcattaatcttctccatttcatgggtggatttggagtggataagaggttgttcttcttaatccatcagcttgaccggtttattttccatctacgtacccttcttcctcctactagtactttttcactgtttctgtcaatttcccatcttttgtggtcggtgatcatggttagactgtacgaagtctcctttaagctcaagattcaactcaacaatctcttcatcgatcttgtgtgcctcaggattagatctctcttgtcatcaatatcacccattgaatatctctacaatacatctcctttaagctgaagattcaactcaacaatgtctccatcgatcttgtgtgcctcaggagtgagatctctcttgtcatcaatatcacccattgaagatatcttggtaaacaagaatacaaatgtagacactgcgatgcaattttctggttcaatgaacgcaataaatccatgacgagacacaataatcaggaaccaatatattcaaactgctgcaaaaatggcaaaatcagaataccaaaatataaagaacccccaacttttcttaatgaattaatacaccagaaaatggatacaagatgtaaacattttctacaaaagataagacaatataatagcatgtttgcatttacttccatggggggaaatattgataaaaaaattaatgatggtgagggaccatatgtgtttcgtgtcaatggccaaatacatcatcgaataggatcattactacctttaccagacaattgccctaaatttgcagaactatatatttttgatacaaagaatgaaattagtaatagaattagggctctaacaaatgaagaaccaggtgagcaagacatagatccagaaatagtgagagggctaaaaaaaatgctcgacgaatataatccattagtaaaaatattccgccaagctcatgattttcttgaagaacacaaaggcatagatataagcattagaatagtaggcgctgacaaagctgatagaattcaatatgagatgccacatcaggaagaattagctatgctgattgtaggtgacttatcccttgagaactacaaacgagatatcattgttagcacacaccaaaatagccttcaaaggatatctattttccatccagcatatatgcctctacaatacccgctcctatttccatatggcgaacgaggttttcaactaggtattaaataccatggacaaaacattaatcaaaacatagataactccaagagagatagagtaactttgcatgaatttttgaaatatcatgtgcactatagacctaatcagcctaatccctggttatgttatggccgattatcaaaacaagtagtagtagatggtcgagcaatggaggatgaagacaggcttgattatattgttagaaatcaatcaaaattacgatctgaatatgtacaaggtatttttgatgcagtagaaaaaggaatatatgacgccagtcgaataggcaaaaaggtgttattaccatctagc

SEQ ID NO: 34442 - DNA, 437 bp, Zea mays
  Clone ID: UC-ZMFLMO17267D12_FLI
gacagggcgcagtcaagcgatgcgatgccatgcgatgcgggcggctagcacgaggtccgcggctcggggcttttggccttcttttagcgttggaatcctcgaaatcctgctgcgactgggatgcgtcgcattctctgcggcccttttgttttccgtcaccaaaaccggctgctcctgagctcgctcgttttatggtcacaattcggatccttcagcgagtatcttagcttggctcgttaatgtaattgagctcactcgctagctcgaatcaactggcatttgtcagcaaagcaatgattgcacttgtattagataaattaataagtgatgtactgtgttaatttggtgttgaatttatgtggcacacgaaattgtgagtattattatacttttttagtgttattttaatttgaaactaaatagtaattgattatagt

SEQ ID NO: 34443 - DNA, 1891 bp, Zea mays
  Clone ID: UC-ZMFLMO17267E03_FLI
gaagaggtgccctctatgctcttggtttgattcatgccaaccatggtgaaggaatcaaagagtttcttcgtgagagtcttcgcaacaccacttctgaggtggtccagcatggtgcttgtctgggactcgggcttgcagcattaggtacatcagacgaggaaatatgcgaggacataaagaacattctttacacggatagtgctgtggctggtgaagcagctggtattggcttgggtttgctcatggttggcacggccagtgagaaggccacagagatgcttgcctatgctcatgatacacagcatgagaaaattatcaggggcttgtcacttggaattgcattgacggtgtatggcagggaagaagaagctgacaccttgatcgagcaaatgacgagagaccaagatcccatacttcgttacggcggtatgtatgcattggctctagcatacagagggactgcaaataacaaagccatccaccagcttctgcattttgctgtgtcggatgtgagcgatgatgtgcgaaggactgcagtgttggctcttggctttgtcctgtacaatgagcctgaacagacacccagaattgtgtccctactatcagaatcatacaatccacatgtccgttacggggcagccctggccgtcggaatctcctgtgccggatcaggattaagcgaagccatctccctactggagcctctgacatcagacgtcgtcgacttcgtgcgccagggtgctctcattgccatggcaatggtgatgatccagaccaatgaatcttacgatccacgcgtcggagcattcaggcgccagttggaaaagataatccttgacaagcacgaggacaccatgagcaaaatgggcgccatactggcttccggcattctcgacgccggcggcaggaacgtcggcatcaggctcaagtcgaggtcaaagcatgacaggctcactgccgttgtcggactagctgttttcacccagttctggtactggtacccgctgacctacttcataagcctcgccttctctccgacggccctcatcggcctcaactccgacctgaaagtgccgacgtttgagttcctgtcgaacgccaagccgtccctgttcgattaccccaagccagcgactcagcagactgcagccgcatctgtcaaggtgccggcggccatcttgtcgacatatgctaagtccaaggctagggcaaagaaggacgcagagagcaaggccaaggagaaagcagatgactcttccaatgcttctacttcgatgcaggtggacggcgccgctgcggagaagaaggctgccgaacccgagcctgcgttccaggttctgacgaacccggcccgggtcgttccagcccaggagaagttcgtgaaattcctggaaggcagcaggtacaagccggtgaaggctgccccctcgggattcgtcctcctgcaggacctcaagcccacggaggccgaggagctcgccctaactgacgcgccgtcaaccgccgccgccacgaccaacgccctggcatccagcgccagcgagccggctgccatggctgtcgacgatgagccccagccgcccccggccttcgagtacacatcgtaagggtgatggtcctcggatcaggatgcatgggttggccggttgggttgtctgtagcaacttcgtgttgttggatggcggactcgggcgtatcgctaattcatttttttaactccatataatacctttcctcaagcatttgtcgcgtgaagaaaatatcttgctacctgagttttctgctgaatttgcagcaaatcaggaagccatgtcaagaataataaattcgaacctttgtccccatattgtccatatattatgaaaaaaaaagagggaacaagttcgaatcc

SEQ ID NO: 34444 - DNA, 1548 bp, Zea mays
  Clone ID: UC-ZMFLMO17267G05_FLI
ctcgctttctcctcccacgattccatcgccagccgccccttttcccttcctttttcccttgctcgcccgcccgcccgcccaggactcgtccttcgcgcttcttcgccagctcgtccttcgcgcttcgtagccagccgtcggcgagagagggtgagaggatcctacgtgccttgtacgctcgctcgggagccggccgggatcgcgccgcgccaccgtaccccgccccggacatgtgcgtggaggggctggacgacgcagcagggaggctcggcttcggagaccaggacaccgacaggcgcgccggtgatgcgatggagagagtttgtgagaacacagtggctgttgacttcaagcagactaagctgaacaactttgtcccattcatccggtcaggggagtggtctgatattggaggtcgcgattacatggaagatgcccatgtgtgcatctctgatctggcaaagaattttggctatgactcagtcgatgatgaagtaatttccttctatggggtgtttgatggccataatggcaaagatgctgctcattatgtccgtgataacttgccacgggtcatcgtggaagacgctgattttcctcttgagcttgaaaaggtagtaaagaggtcatttgtgcaaactgatagtaagtttgcagagaaattttctcatcacaggggactttcttctggaacgacagcacttacagcaatgattttttggaaggtcccttctggttgccaatgccggtgactgcagagcggtgctctcgcggcgtggcactgccattgagatgtccaaggaccacaggccttgctgcatgaatgaaaggaagcgcgtagagtcacttggcggctacgttgacgacggttacctgaacggtcagctggcagtgaccagagcgctcggtgattggcatctggatggcatgaaagaggtgggcgagccaggagggcccctgagcgccgaaccagagctgaagatggtcacgctgaccaaggacgacgagttcctgataatcggcagcgacggcatctgggacttcttctcgagccagaacgccgtggacttcgcgcggcggaggctccaggaccacaacgacctgaggctgtgctgcagggagatcgtggacgaggcggtgcggcggggcgccagcgacaacttgacggcggtgatggtctcgttccactcggacgcccctcccccgagccgtgccaacaagaggaccggcagggtcacgcggagcatatcggctgaggggcttcacagcctcagagtgctcctggaaggccagtgacgtcgcccggcggcgccattgctgcccgttcgtccctgatgctgtgctacgttgctgatgaggtgttaactgtaagtagcggtttccggtatcttggtgcttgctcttcttcttccgctgagggcgggcgactattcttgtccttcctccgacaataaaccaacgggcctgagatctcactgtgagacgctgtaaataaggaaatatggaagttggagctcgtcattaaggacgagttagcggtgtgcatcc

SEQ ID NO: 34445 - DNA, 2048 bp, Zea mays
  Clone ID: UC-ZMFLMO17267G09_FLI
cctagactatcatgcatattatcgttccagactcggtcccttcttgtatggacacaatacgcatttccgcaacaattatctattggacatgtagtcttttgtaggccaacattctgcaccgtacaacataaacttgtcttttagcttttgtggtactctcttgtcacatataacactagatggttgtcgccactttatccaccatgctttgattctatggttaatatcttcatcaatatccctgtctctctgtagcattgatactaaatatcgaaaggtattcttactagacactacttgaccttccaaactaacatctgcctcctcatgtgtagtagtgtcgaagtcacatttcgtatatttagttttaattctaaaaaactcgtctgaggagggaaagaccgccctcccggtattatattaagaagagactgaaacatggtccccgccgagaaaatcctcgaaccctgccccccccccccccccatcactagcggaacgtcaccgcccactctgcaacagcccagccagtgggtggcgcgcaggacgtaactcggaaacgggcggggcacaacgagggtttttttaaccaagctagaaatttgcccccgggggggattgaacccgagacctggaggtgctacttgaaagccttaaccattatgctagagaccctttctcttagttttaattctacaaagtctaaactaaaacctttgcactctagtatcctgccacaactctaccgtgcatttggttgcaatgacaggatgtgatgagacgcagggccgtgccagcaaaaaccgaggccctgtacgaaactattgaataaaggcttttctcatcaaatcactagaaaaataaaacgataacaatatagataaataaaataatcaataaattatttcattaacaaagtaagcaaataaatatgcatgcataccgtaagatattgtaggtaccttgtaatttgattggttttttcttaagtacctttgaacgtttaccatcaaagcttgaaagttaacaccttatagatgctatttgagtatctaatgaatctagataggataggataggatcaatgtgtttctgtagagtggagacatacctaggtctagggacctgccgcctggatgtatctttgatcttttcctatatgtaccgttccatagatgtgcaatgacgacactatggcagagcgagcaagatcggtgcagaacgataggagcgtgctggcggcaaacgaagatgatgcatcaagtattttaggttcccgctatatcctaatgacctaatcactaataggccttcatagatggaagtttagggggcccaaaaaaatgggggccctgttcagaaagttgaaccaaacacaccctaagcagtgctccttgttgaatgtgtcagagctttttccgcctttgctatcctaattacccctaaatgttttttttaggttacatcaccctatggcaatactgtgcatcataatgaaaatgctacaacgggccagtttgcattcaccacttcagaagctggaaactaccttgcatgtttctggatagacagcgtggagaaaggatcaggaacatctctaaatcttgattggaagatagggattgctgcaaaggactgggatactattgctaagaaagagaaaattgagggcgtagaactagagcttaggaaacttgaagctgcagtcgagtccatccatcataacttgctgtatctcaaagcaagggaagcggacatgcgaacagtgagtgagagaacgaattctagagttgcctggttcagcatcctgtcactgggagtctgcgttgccgtctctgtgctgcagctgtggcaccttcaagggttcttccggaagaagaagctcatttaaattcacgttttatgagtgtgtacttcccgtgttaactaccttaggaggacaactgtcaaatttattttaaaaagggaactcgtatgatggacaaaacaggtcgttgatacaaactagcaacctatattccgtggaattgaggtcgaccttccatttt

SEQ ID NO: 34446 - DNA, 3693 bp, Zea mays
  Clone ID: UC-ZMFLMO17267G12_FLI
cttgcagtcgcagtgggggtcgctgtcaatggatcaatgcagtttccgccggtacgcctctatcgccggtagcctcccctcggcagacagcctcgcctcgcttgcttctattgctgtgctccaccatggagctctaggtggagctacgaaccccgtgatccccagcggtgtggcaccggagctcgacggcgacggcgggcacatccccctcatgccctaggtggagcaacgaaccccaccgtgctcaacatagccgccaagaacgcgactctcctcgccgcgctgctctatctcggggacctcgcctagcattgccccttgccccgcgtcgacgaggtggagtcctccctcacccgcaccttccggatgatccaggtgctactcgaggttgtatgcattgtgggaataagggatatgtagctgcttacattttgaagagatttgattataccttaagcacgattgcaactgaaactttggctgtgggtgatgggttctgctattttggtatgttattattcatctctatgatagagcagattcagaatggtgagtttggcaggggttaattgtttcaatttgttagaatttttcaaacgaaagttgtctcaatttttggatcattcttggttttatgacgaatgcccaaactacagattatcgaatggtcaaagtgaatatttgttttatagcaaaagaactatctagaaaattacctctttcatgttttgttcagcggcggtccacgcggctaccaatagggatgatacaggttttgctattcttttatttattaattggttcaattggagaattacctcaacttgttgggattaatgtgctttgttctttgatgaccccttgttgagtgaaaaatacatgtgtatgttacaaaataaactacttgtatgttaaaaaaaagtttctccctgccattacattgacatctcaaactcctcgcacctgttgccttttggaacataggcgttataacccacattttgcattgtgatttctctactaccaacaccaattttcttagaaggctatgtagcagtaatttttgtactagctacaagaaacccattctatgcaataaatatccatattacgtaggtctgcagattacgacatattgctttcatttcaaagctttgagaatcatgtagtcatgcattagattcacatgcaccaaatttaagctaactggaaagtgggatcatatttttttatctcgtgcaaataactattaagctgctcaagtttctttatttggtaattaattaaatttttcaaccatgtcatattgcatatcaattgccaactttttctacacagatgcacatgctcaattatgataatgtcatatggtctgtcaaccatatgtggtcaatgcaaactaaattgttttattctttatatgttttgatttgattttttgtatttgtcactgggatcatatttttctctcaacggttttgctggttgctgtttcaattcaggtctgcactgctaagatgaatttgagtgacgagattgatttggaagattatgtttgcagaccgggtaagatcagtgttgatgatgttgagttggtttcatggtgcagaccaagatttttatgcatttgttgttttctaactattgtattgccagggtacttttgtcctgccctagccaaagcattctccattcatttccataatactaatgctcttattcattcttacaagtaatttgtctcacggaatacattaagatttgcatgacttctaatagaatatgtttattgtattagtgtgttggaaggggtgaaaatgaatcgtggtatcttagatctgggttgcttcctgtcatagaatttggttacaatgtatcttttggtggaaatcatttttttgctatttgtgttccaaattctgcatgttgggtgagttagccaagtttgtttcatctatttatgagttctgacattgaaatgtttaccatgaacctcctcgctgacacgtcgccccgcccccgagccgacttcccgatgccaccctcgcacaagatcccaatgtggcaatggcgaccagcgacgggcggtcaacgccaccgcgccgcctgtgaacccatggtgagaagtgtggtatcgatctagagccgaaggacttccccaacaccccttcctccatcggcgtgacatcggccagctcatctgcgacgacgaggcatcttcgaccgacttcccgacaccccattctccatcaatgcggctccagtaccccttcctccatcggcgcatcaacatccaattcatctacgacgacaaggcatcttcgacaaaccacgccctactacaagtggtgtcagtccatctcagccgatgtcgtgcgcatgtgagatctagggagaggaagaggaggaagggttgtggggaccgagggtgcgagatggcggattcacttgcaactacaagaaaataaagagcgagagatttacagaaacctccagagccgcggaggaggaggagattaggaggatctctacggcgctgacggattagttaaggaacgaaagatcacatcgtgtccggtaaccagattcagatgtgggcaccatgcgtgggtgcagggccaggccgaggtgaaagagattcgacgattgagaatacatcaaagaataaaaatgtggaactcggattttcagatgaagagcgtgaccaagaacttcctgattttccatcatttattccattcttacctcctctgagtgcagctaacctaaaggtctactatgccacacgtttcaccatcatagttgggataatggtgttcgatggttttcatgcaccaatcaagttaaacttggtctaggggcacatcttatgaagactccatccgcagcattcatctgtcgatgtagttgagaagtgcactcaggttatacatccagtaaagagcaagacatttgaaagcttatgggccagctgtgttgctattgatgcaagcgaaagttggctgatgaattctctatgcctacttctagagtgatgttcaaagaggttgacgctccttcaccatccccagctttgtgaaatggaccacgggtagccatttaggatgacaaagccacaagggtgtccttcatcaaggctatgctagaagcctcagacttgtgtctgaggaaaattcataaaaatggtacacagaaggctgggaagaaagtggaagaggaatttagcacttgccctctgtcggtcctaatgatgagcgttaagaacaacaccaagatactgaaagcaaacatggcttgttcaatcgggcagcggcagcagaggggtggggccaatgacggagacggagaggagaacccatcgatttggtggcataagtgggagctcatcgaggccggtgcgtttgggcaggtctaccacaggatttatttgcccttctagggatcagcagatcccacacctattacatgatctgtccttctagaatagaatctgctctctatcttctgaaccagtactgccttcttcaatatcagccaccggccggtccacctcttcaataatcgtccttcatcgcccttcagttgtgagttgtgacatactatttatattcggatctgatctattacaaatatacatgcatattatagggtgtgcatctgcatattacaaatttaactacaacggctggattt

SEQ ID NO: 34447 - DNA, 474 bp, Zea mays
  Clone ID: UC-ZMFLMO17268A04_FLI
gtcttgggtaaacctgttttgatccctttgcgaatgcactgactgcgccatatcaaatgctgtgctgtgtttttgtagcgttaagatgtctggctggtcaagggtgattcgtgattctgcagatagggatcctcgtaacattgcatgccgtcgtccgcaaattactgctccctcaggttgttcagtaatgtgctggttgggcactgaggaatccatcaggttgcatccttttgtctagacgtcgatttgtgttgttgaagtggtaaacattttcatcctgggctgtatcgtcatcatgtatagataggctcgagtctctctctttttttttggctccacaattttttggagatataaaagcggcaggagttatgacatgcccacagtcggccctccttgtagaaatcctttggatgtaacctgtctctttcttatacatactgaaagtcaaggcagatatcccgtgtttcgagt

SEQ ID NO: 34448 - DNA, 841 bp, Zea mays
  Clone ID: UC-ZMFLMO17268A06_FLI
gggttcgattctttcacggttccacctctcccctccctctcgtgctcgatccatcgccgctgcctaatccccatggcctcagcgaacaacgacaaccgcgaggcggcgggcatcctgcggctgctgatggggatggcggcggcggcgcccgcctcggcattgcctcggggcggcggcggcggcggcggcggcggcctgatggtggtgcagcacgtcatcctcgacgtcgacggggaattgttctcgggcggggtcggcggcggcggcgtgccgccggcgtcgaaggccgcgatcgccgcgctgaaggaggtgaaggccggggagggcgagggcgagggcgaggacgcgctgggcgagtgcgccatctgcctggacgcggtggagggcaccggcaaggagatgccgtgcgggcaccgcttccacgggcgctgcctggagcggtggctcggcgtgcacggcaactgccccgtctgccgccgcgagctgccagcgccggccaaggaggaggaggaggacagcgcggcgtcggcggagggcggcgaggaggagaggcggaggcccagggccgcggtcgtcgtcagctacctcgtgttcggaggcgggcgggcggaggcgcagcaggagccggagagggaggagccgtggaacattagaatagaggatgtggattagcattggtcgccttcccattggttttcagattggtttgatggcggaggaggttatgtacatactagtaatgtcatgaacgctggaaatgggcgaagggggaatttgtgaatatttcgggagttcaatctgttgatcaatgcttatattgccattaagcactattcttttg

SEQ ID NO: 34449 - DNA, 202 bp, Zea mays
  Clone ID: UC-ZMFLMO17268A11_FLI
cgtgtgtgttgttgacatgtgagattgttctctctgcctcagagagagagagagagagagagagagagaggaaggagagatgtcggtcgtctggttctagggaagagatgaggactgtggccagttttctgaagagaaaacaaggcctctctcatggttgctgtgccttgtgcctgtaaaataattttgttttgtttcatcc

SEQ ID NO: 34450 - DNA, 1561 bp, Zea mays
  Clone ID: UC-ZMFLMO17268C09_FLI
cacaggtgggcgctggggaggagctgccgtccgagcggagtcggtcagggagcttttcttcctcgtcctcgtcgtccgggactcctggtgtatcaagtgagccaccgctgttgagttttagtgttgataatatcgatacagttaaactgttggaacttctaggcccagaaaaggttgatccagttgatgtcaaggcaattaaggaaaaactctttggttatacgacattctggttgacaaaagaagaaccttttggtgatcttggtgaaggagttcttttcattgggaacctccgcgggaagagagaggaaatctttgcaaaacttcaacggcaagtacgtgaacttaccggtgataaatacaatctttttatggtggaggaacccaattcagaaggggatgacccacgtgggggaccacgtgttagttttggtttgcttaggaaggaagtttctgagccaggacctactacgctatggcagtatgtcatttctctgttacttttccttctcactatgttctcctgcattgagctaggaattgcgtcaaagattagcagtcttccaccagaaattgtttcatatttcactgatccaaatgctactggaccccctcctgacatgcaacttctgctcccatttgtggagtcggctttgccagtggcttacggtgtcttatctatccaactatttcatgaaattgggcactttttggcagcatttccaaaaaatgttaaactgggaattcctttctttattccgaacttcacccttggaacttttggtgcaattactcagttcaagtccattcttccggatcgaaagacaatgtttgacatatcaatggctggtcctgtggctggagctgcactttccttttcaatgttctttgttggcttattactctcttcaaatcctgttggggcaagtgatttggtggaagtacctagtcagctgttccagggttcattgttgcttggactaattagtagagcaacgcttggatacagagctatgcatgctgctacagtttcgatccaccctcttgtgattgcaggctggtgcggtttaactactagtgcatttaatatgcttcctgttggttgtcttgatggtggaagagcattacagggtgcttttggcaaggatgctttgtttggatttggcctcacaacatattcgttgcttggactaggagtgcttggagggccactgtctcttccttggggtttgtacgtgctaatatgtcagagaacacccgagaaaccatgcttgaacgacgtgagcgatgttggaagttggaggagagcggccttgatagcttcagtatttcttgttgttttgacgctcattccgttgtgggatgaacttgcggaggaactaggtgtagggcttgtttcttcgttctgagatgcggtgcttaccgatagaattaggccgtgatgtagttcagttttgtgttgaaatgtagcttcccacggtggaattgttgtaaaggtatgtggaatttccggattaggtgagcaatgatatcgcttatgcgagtgtaatgaaattgtgcc

SEQ ID NO: 34451 - DNA, 1586 bp, Zea mays
  Clone ID: UC-ZMFLMO17268D10_FLI
ccccgtctccctcgctcgcctcgcgcggcgtgttgcctttccgtgtgatctcttctcgccccaggcttctccaccccccaccaccatccacacctccttcgctcgcccgctccttctctccttccctcccctccgctccccacccagacgagcgcgcgcggcgacccggacccagtcagccggactcccatcccctcctccccaagcgagccgagctgcgagcgctgctcgcgcggtcggcccatggcgagcggcggcggcgggggcctgggtgcggctggcgcgggaggccggatgcccacgtggagggagcgcgagaacaacaagcgccgggagcgccgccgccgcgcgatcgccgccaagatcttcgccggcctccgcgcgcacggcggctacaagctgcccaagcactgcgacaacaacgaggtgctcaaggcgctctgcaacgaggccggctgggtcgtcgagcccgacggcaccacctaccgccagggaagcaagcccatggaacgcatggatcccatcggttgctccgtgtcaccaagcccatgttcctcgtaccaaccaagtccgcgggcatcatacaatgcaagccctacctcgtcctcattccccagcggcgcatcctcccccttcctccctcccaacgaaatgcccaacggtatcgacggcaatccaatcctaccatggctcaagacattctcgaacggcactccgtcaaagaaacacccgctcctcccaccgctgctgatccacggcggctcaatcagcgctccggtaacccctcctctaagctcgccgtctgcccggacgccccggatgaagacggactgggacgaagcggccgtccagcctccatggcacggcgcaagcagccccacgatagtgaactccacgccgcccagccccgggcggcccatcgcgcctgacccggcatggctcgccggcatccagatctcgtccaccagtccaaactccccgacattcagcctcgtctccaccaacccgttcggcgtcttcaaggagtccatcccggtcggcggcggcggcgactcgtcgatgaggatgtgcacgccggggcagagcggcgcctgctcccccgcgatcccaggcatgccccggcactcggacgtccacatgatggacgccgtctcggacgagttcgcgttcgggagcagcaccaacggcgcgcagcaggccgccgggctggtgagggcctgggagggcgagcggatccacgaggactctgggtccgacgacctggagctgacgctgaagctctagggcaggcgtccgggcgctgatggttaacgtagctaacgcgaggagttgctggtggtgttgtttttttagtgtacctgttattgttctctagttgctgatggaaagccggatcatgtggcctcggttcggttagattcacatctgtggttgggtaattgtggtgttattttaactactcgaattgtagcccggcggagctgtgttcggctagctgttggactccacttggctggtgcattaagctccttgtttgctgttgttgtgacaagtgtaaattaatgtcagaaaaccattcggaaatc

SEQ ID NO: 34452 - DNA, 971 bp, Zea mays
  Clone ID: UC-ZMFLMO17268E10_FLI
gtgagttagaggaggtgctggaagctacacagccagcagagtttcagaggtgtatggtgccacttttccgtcagattgcccgctgtttaagcagttctcactttcaggtggcagagagggctctctttctatggaacaacgaccatatcgagggtttgatcaaacagaacaacaaggttatactgcccataatcttcccagcgttagaacgaaacacgaaaggccactggaaccaggccgttcaaagcttgagtctaaatgtccggaaaatattcatggaccatgaccccgcgctgtttgaggagtgtcacaagaagtttgaggaagaggaagcccaagaagctggcgtaaggtcaagacaggaggctagatggaggcgcctagaagaaatcgcctcgtcaaattctcctcagtgaagtagcgcgttctcctgaggctgtagttcttcatcagtagagttcttctagctatcttgtcttggggactttgcatattagcagctcttttggacaggatcaagtaaatgctgatgatgtagttgctggatgtcttctttccacttgttacttgtgaccgaacgttctacaggccgacatgaaaatacgaggtacatgatgggctgtgaagcttcaaccgagcctcggcgggttctctttgctttgtgatccactgatgacagtgtcggtttcatcatcataggacaaaggaaaggaggtaaaatggtccttttccgggtcaatgtcttgatccaaggactgttaggagcacttgaaagacgaggaaggaggcaggtagcacttgcccttgctgatggtgattttgctgaaatgtaatactatgctttatgtatgatgcatggtaacttgaagccatgtctggtgataatatgtaatcctggtgtacatgtcttttccttcctttgatgtatacagaaatttggaatgaagctctgattgaaggctgttttctac

SEQ ID NO: 34453 - DNA, 161 bp, Zea mays
  Clone ID: UC-ZMFLMO17268F07_FLI
tttgtttgaaccctttcttggtctttttattggtttgttgtgaacttttggcacctgtaaaacttataatctagagcaaactagttagtccaattaatttgtcttgggcaattcaaccaccaaaattcatataggaaaaggtgtaagcctatttccctttc

SEQ ID NO: 34454 - DNA, 550 bp, Zea mays
  Clone ID: UC-ZMFLMO17268G07_FLI
agcagctccaggagcagaaccagcagtatcaggcatcgagtggttcattgtgctcaaagatcattggcaacagcataatctcccaaagtggccccacctgcacgccctcttctggcactgcaggtgcttcaacaggctgccaggaccgcagctgcttgccctcagttggcttccgccccacgacgaacttcagtgaccaaggtcgaggaggcttgaagctggccgtgatcggcatgcagcagcgtgtttccaccataaggtgaagagaagtgggcacaacaccattcccaggcacactgcctgtggcaactcatccttggctcttgaaactttgaatatgcaatcgacatgtagcttgagatcctcagaataaaccaaaccttcagttatatgcaagccttttttgaggttgctgttgctgtacctgagaactgtggttaggttatgagtttgttcctcaagactgacccatacatgacatgctaccttgtgctgagtttctgagacaaagccatcgaaacatgatcttgtggttcagtaccttgctgcc

SEQ ID NO: 34455 - DNA, 1344 bp, Zea mays
  Clone ID: UC-ZMFLMO17268G10_FLI
ggggaggcatgcagatcttcgtgaagaccctgaccggcaagactatcaccctcgaggtggagtcttcagacaccatcgacaacgtcaaggccaagatccaggacaaggagggcattcccccagaccagcagcggctcatctttgctggaaagcagcttgaggacgggcgcacgcttgccgactacaacatccagaaggagagcaccctccacttggtgctgcgcctcaggggaggcatgcagatcttcgtgaagaccctgaccggcaagactatcaccctcgaggtggagtcttcagacaccatcgacaatgtcaaggccaagatccaggacaaggagggcatcccaccggaccagcagcgtttgatcttcgctggcaagcagctggaggatggccgcacccttgcggattacaacatccagaaggagagcaccctccacctggtgctccgtctcaggggtggtatgcagatctttgtgaagacactcactggcaagacaatcacccttgaggtggagtcttcggataccattgacaatgtcaaggccaagatccaggacaaggagggcatcccacccgaccagcagcgcctcatcttcgccggcaagcagctggaggatggccgcaccctggcggattacaacatccagaaggagagcactctccacctggtgctccgcctcaggggtggcatgcagatttttgtgaagacattgactggcaagaccatcaccttggaggtggagagctctgacaccattgacaatgtgaaggccaagatccaggacaaggagggcattcccccagaccagcagcgtctgatctttgcgggcaagcagctggaggatggccgcactctcgcggactacaacatccagaaggagagcacccttcaccttgttctccgcctcagaggtggtatgcagatctttgtaaagaccctgactggaaaaaccataaccctggaggttgagagctcggacaccatcgacaatgtgaaggcgaagatccaggacaaggagggcatccccccggaccagcagcgtctgatcttcgccggcaaacagctggaggatggccgcaccctagcagactacaacatccaaaaggagagcaccctccaccttgtgctccgtctccgtggtggtcagtaagtcatgggtcgtttaagctgccgatgtgcctgcgtcgtctggtgccctctctccatatggaggttgtcaaagtatctgctgttcgtgtcatgagtcgtgtcagtgttggtttaataatggaccggttgtgttgtgtgtgcgtactacccagaactatgacaaatcatgaataagtttgatgtttgaaatt

SEQ ID NO: 34456 - DNA, 1510 bp, Zea mays
  Clone ID: UC-ZMFLMO17268H09_FLI
ggcaggcaagccagccgcgtgaaagacaccgagcgcagacaggttggagttggacataacctctccctctcctcggcgcctcagccgggcatggcgtgcggcggcaagggcggcacggggtggtcctctctgccggcggacctgctgctcagcatattcgccctcctccctgccgacgctcaccgcgtccgtttccgcgccgtctgcgcggactggggcgccgccgccgccgcgtggcgcccgcgcccttggctcgtcggctcccgcaccgaccgctccggccagggcgccagcgaaatttcgtcattctggctcgcccccagcgtcgccctcctgcccttcgccgcgaacgtgccatcggggctggagtacctctcctcgtcccacggctacctcgcgctctcggacccgaggatcagccccaaggtcatcctcctcctcaaccccttgacaggcaggcgcgtccgcctcccgcccatcggcttcttcaagaagtggctcgacttgaccaccatcgtgctgtcgggcgaccccgccacggccaccgagtgggccgcggtggccgtcgggttcccgacgacctgcctcgcgtactacagctccgtcactggggcgtggacgcggctcgatttcagcgtgaccggctacgccgctgtcgagcactacagggggcggttctatgtggccttcaagtcctcgatctgcatctgcgaggtcgacggggacgcgcccgcggtcatcccactcgagcacgtcgacgcgaacggcgacgccgtcgtctcggacaacgacaagctccctggcgaagggaggcgcgtcgtcgagacgcacctggtggagtgtgaccgccagctgctcctcgtctcggtgcacgacgacgtcatgtacaactcggacgacgacatggcgggcgtggacgacgggggcatcaagatcggcagcgggttcgcgcgtgcggtggaggtgcacagggtggattggctcggggataggacggtgcggctggtgcgcgtggtggacctcggatggaacagtctgttcctggggcggaatcgcgcgttcgcgctctcgcgggcggagttcccctggtaccgcgctcgcgtcaatcgcatctacctcgtcgaccgtggccacccggacggggtcgtcagggtgttgggcatggaaagacagcgggggcgccacctggagatcttgaccatcaaacctgacgacggccggcgagaatcggccgggtgggcgcgccgtggatggttcttccccaactactagccactgtggtcattttgtctctatgggtgtttttttcatagccgtctaagggcttgttcggttattcccaaaacacatggattggatgggattggaaaaaaatgagaagaggtttgacttgtttgggtttcaaacccatccaatcccactcaatccacatggattgagagctaaccgaacaagccctaagcctggatagctaaaccgtggtttcggcaatgcaagttacacttgtttg

SEQ ID NO: 34457 - DNA, 1021 bp, Zea mays
  Clone ID: UC-ZMFLMO17269A02_FLI
atcgaaaaccatgaagatgaatggcgctactttgtccattatctcggttggaataagaactgggatgaatgggttgcaaatgaccgcttgttggaattgacggaggaaaacgtgcgcaaacaacaagagcttgataagaatcaggtagttgacaaaacaatgaagtctggacggtcaacacagcataaaccaaaagtctccaatgcggatgcaaaagctgataaagatgacactaagagtctcatttcagtgaaggggaagaaacgtaaaagtcagcttgggactgagattcaggacaaggaaaaaagatcatcacatagtctactagtgttgcagtttcctttgccactgaagaagcaacttgtggatgattgggagtttgttacgcagatgggtaagcttgtgaagctaccacgatcacctactgttgatgatattctaaagaagtacttggaacaccgggcaaagaaggatggcaagataaatgactcctatgctgagattctgaaaggattacgctgctactttgataaagcattgcctgcaatgcttttatataagaaagagcgagatcagtatgctgaagaagttaaaggtgatgtctcaccatcaactgtatatggagctgagcatctattgcgcctttttgtaaaattgccagagctacttgcttctgtcaatatggaggaagatgcgttgaacaagctacagctgaaactgctggacgttctcaagtttcttcagaagaatcagatcaccttctttacctctgcgtacgatggttcttgtaaaggtgcagatgaggataaaaccaaatgattgcatgtgaacgttttatatcatgtaacatctttcgatggacttgtctggcactattgttgatatgaatgtcgcttaggacaacaatcggtttatgtaggatagatgctgcagattcctgaaagacggtacttgaactgcccggagcatgttgtattttcttaagatgctggaactaagacggcttagttgaattttcact

SEQ ID NO: 34458 - DNA, 1609 bp, Zea mays
  Clone ID: UC-ZMFLMO17269A06_FLI
ctcgaccatatcaaggagctgatcaagtggggaacagactacatcctcaaaaccttcaattcatctgctgacacgatagacaggattgtcgctcaggtgggtgtaggtgacacctctaaaggcagcagtcagcctaatgaccattactgctggatgagaccagaggacatcgactacaaaaggccagtcaccgagtgtcactcttgctcagatctagcgtctgaaatggctgctgccctggctgcagcttccatagtgttcaaggacagcaaaacctactccgacaagctcgtcaaaggcgcaaaagccctgtacaagttcggaaggctgcagcgcgggcgatacagccccaatgggtctgaccaggcaatcttctacaattccaccagctactgggatgagtttgtgtggggtggtgcgtggatgtactttgccacagggaacaattcatacctcacggtcgccacagccccaggaatggcgaagcatgctggagcctactggtttggaagtccaaactatggagtatttacctgggatgacaaacttccaggagctcaggttcttctcagcaggttgcgactcttcctaagtccagggtacccttacgaagaaatactgaggacattccacaaccaaaccgacaatgttatgtgctcatatctgcctctattcaattcattcaacttcactaaaggaggactaatacaactcaaccatggaaggcctcagccacttcagtatgctgtcaacgcagctttccttgcttctctatacagcgactatcttgaagctgcagacacgcctgggtggtactgcggacctaacttctacaccacagaagtcctccgcaagtttgccaggtcacagctcgactacatccttggcaagaacccattgaagatgagctacgttgtgggtttcggaaacaagtacccgaagcgccctcatcacagaggcgcgtcgatacctcacaacggcgtcaagtatgggtgcaaaggaggttacaagtggagggacacaaagaaggcaaaccctaacatccttgtcggagcaatggtggctggccccgacaggcgcgatggctacaaagatgtccgcacgaactacaactacacggagcctactctcgcagcgaatgctggtctggttgcagcgctgatctctatatccgatatcaaaaccggacggttcggcatcgataagaacaccatcttctctgcgattcctccgatgttcccaacacccccgccgccgccatcagcatggaaaccatagaggcaatacctctgaatgtttttccaaagcatcgaacagggaagtggagcaaacgtgtgatcatttggtacagcgaaggccagagacaggaaagctgacagcataagtttatagagcttctatttctgtaccaatatgacagatcagtataagatcctctgtcagacatagatcggaagctgtgtgcatcgcgtggagctaatttttgggggtcttgttgctattggcactccagctcatgtgtgaagttctttttgtagaaatggtacctttacaaattgttttataggagtgacttttcattattatagtaaagaatgcgtgtgatctc

SEQ ID NO: 34459 - DNA, 3013 bp, Zea mays
  Clone ID: UC-ZMFLMO17269A09_FLI
gagcagagcacaccatcctcgcattattcttttcggatttgctccacccctccacccccatgcccgtgtccatctcaggctgcgtcacatcatcgccgccacacccagcaccagcaccagcaccagcggcggcgcaccaccaccggtgccatcgccagcgccagcgctagcgccggcgcaagcggaggcccgggcgacgcggactgggcgaagttactggccttcttttcgtcagcggcgttccttgccatcaagctaaggtcttccagcaaggttacgtggagtttaccaatgggtctggataatacttatggcgacctatctggcatgttctatggaggcctgtcttatgatggctacacagaccacagcagcgcaaacgattacttcagatttgccgatccacttcctgccactgtgccccagatggcagcagaagcctgttcaaatccttcctccactgtgtcaagggccaatactgaaactgacaacccagaggattgggaattcatctcagatgagtccctcgactatatcagccggatgctcatggaggaggatattgatgagaaagttagcatgtaccaggcggagtcagcagcactgcgtgctgctgcaaagccgttctatgacattcttgggcacaagtttccaccgtctcctgaccgccagctgatctcttggtccatggacagccccagtgagagtagcagtagcatctgcacacaatctgtggcaagtactgtcactagcagcagtgttggtggcacagtggatagcaacaggcgctatgacattggacttagtgagcagctggaagcttaccgaggcttgtgtggtcaggcttcgaatccacttgttggtacatcaagtgatgcttccaatgcagtggatgtgctagaagaccctttgatcacgaacggtcagatccctgagtatttgtttgagagccttccaacttgggatttcaggagaggtattgaggaagcccagaagtttcttcctattaacaataaactagtcattggtttagaagctggtggtattgcaagaccccaagaggcaaggaaagatgttcctttgaatgccaaaaaggcagatgcattgaaggtcaagaaaaatagacagagtgaagaccttgacgtgattgaaggccggaacattaaactgtctgcattttgttccgatgaacctgattggattgaaatgtttgatgatctgcttcttcaaaccgagaagaaggccacagatctgcgagagctgatgcggaatgaagcttccaagaattctcaggtcacccagacgaaaggaccaagtggaccacggccacggggaaggaaaccaacaaagaaggatgtggtggaccttaggaccatcctcatccactgtgcacaggctgtggcagcagatgaccgcaggactgctaatgaattgttaaagcaaataaggcaccattccaagccaaatggtgatggaacccagaggttagcacattgctttgcagatggtcttgaggctcgattggcaggcacagggagtcagctttaccgcaagcttatagcaaaacgtacaactgcctcagacatgcttaaagcttaccacctttaccttgcggcatgcccatttaagaggctttcacattttctttccaatcaaacaatcttgagtatgactaaacatgcatcaaaggtgcatatcattgacttcggcatttatttcggcttccaatggccatgcctaatcaggcgtctctccaagagggaaggtggtccacctgttctgcgcattactggaattgatgtacctcagccaggtttccgacctactgagagaattgaagagactggacaaaggcttgcagaatatgctgagaagttgaaggtgccttttgagtatcagggaatagcatctaagtgggaaaccatccgagttgaggatctcaaagttggcaaggacgaagttgtgattgttaattgcctatacagattcagaaacctgattgatgaaacggttgctgtagacagtcctaggaatagagtgctcaacaccataaggcaagtaaacccagcaattttcattcatggaattgtgaatgggtcatacagtgttcccttcttcatcacacgtttccgtgaggcgctgttccatttctctgcattgtttgacatgctagagacaactgtcccacgggatgatgcacagcgtgcactcatagagagggaaatgtttggccgagaggcactcaatgttattgcatgtgagggctcagacagagttgagagacccgagacatataaacagtggcaggtgaggaacctcagggctggatttgttcagtccccgttaaaccaagaaatcgtgatgaaagccaaggacaaagtaaaagacatttatcacaaggactttgtcatagatgaagacagcggatggctcctgcaaggctggaaaggaaggataatctatgcaatatctacctggaagcctaagaataactaggttcttggtctcacatgttacgtttcctattccattgatggtagcagctaattaaccagtcctgctatgttatagcatgtggaccttgacctgtgaacctgtctgatcaaggaaatggcttgaagacggataatgatcaacatggagctttgctagcttcacatctgtccagccagtactctgatagactgggtgtagacctctctaccttggtgttggtaccattacttctattaaatttcgtagttttcttctttccatttacttctatgatcggcctggcgtcctattagcaataaccagatcactgcttctagttaattggttagccaaactacctactatcttgagcttagtatttttgacttgtatccatccatgttgaacattatttggttttcagcaccagcagataaaaaattccccaacgaggaagcatgaagcatctaaatttgttatacgagaatggacgctgctgtttgtgtggaatgtagtatctcatggagtgctttgcctt

SEQ ID NO: 34460 - DNA, 2186 bp, Zea mays
  Clone ID: UC-ZMFLMO17269B04_FLI
cccacacgtccgcccagtgtaggtcgagcagtgagcttggttcctggtttggagagcctcgggagatcgagagggctctagaggctggaaggccctggagattgggagaccgagagagtctcagaggtcctgagggccccgtgatctagtcccccggtatggagggtgcttgaggcggaagagcttcgagggctagagggcctcgggacctggtctccgatgtggagggcgtctgacttatctggagccgatcaagacccctttgggcacagggccttagggacacatggttgggtcgagccctgattgagcttttctctgttgatgggatctttgataggcatattgtcagtattcgagggtatggtcttccccggacgctgagagtaatcattctagatgaactactagtagctgccgcgcgcattgcgcgcgccgtcccagccggctgaggcttgcgacgcactgaactggagcgcggcggtcggtgaatttgcccgaggcgagggcggaggcatcggaggaggagggctgaaacatcaggaggccgggacattggatcggcggttttctcgccgcatggcgctggccagcgtctccatggcggcggagatctccgacgctgggctctcggtgcctcctgtctgcttctgacaggagtcggtgaatggaccgtacctggagtagctttctcgctgtaactttcgtgtcccgtctagaaaccgccagacgcttggagcaaataaaccgtgaagaagaccgctgcgcttcctgacgtgtgttgctggccgttggaggagcatcgtgcggcaaaaacatgaagagccgacgtggacaaacgggatgggagatttgctcccgtggttaatatatagaatgcgtatatacatggacattggtgaaaatatagctatatactaacataatggactaaaatgatgcaggttgagaaattaaaggtattggcgacttcccttgctaattcatcctccaaggcagagaagcgtattttggatcacagacgccagaaagaagaggctcttaactttcgtgctaaaaaggagaacgaagtgattgcttttgaaaaggatttgactgctgagatttctgaattggagaagcaaagggatgaacttgaggctcagttaaagaaggtcaacatttcactgaatgctgctgttggtcgactaaagcagacaagagaagagagggaccagtttcatgaagcaaacaatcagatgatatttactttacaagcaaaggagaatgacctgtcaaaatctattgactcatgtaacatggaggccagtgtagtcaagacttgggtaaatttcctcgaggatacatggcaacttcagttgtcatacaatgaacagaaggaaactaaaacgaatgacgagctggagagatgcacaagcagttttctgagttgaccaagcatcatctttcctatttcaaggaagttcttagcccatcaattgagcggatacgcacatacgtggataatttggcagtcttaaactctagggaggagtcaatagaacatggaggggatgatgagatttctgagcagacaagtccacaaaagtcccttgaggaggaatatttggaaactgaaaagaagatcgtgactgccttcagcattgtagatcgcatgaagaagatgttttattctgagcaagcggctaattctaggcaagatgatgcagaggtcaggaccttattttctgagattgagaaactgagggaagtgtttgagtcggtagaaaggccgacactagacattgaagtccgcaaggcaaaggatccaatgaaggacaagtctggatcgaatcgttcagccaaagacaaatctgaatcgagccattcacctgttcaggtgccctcttcacctaaagatgtgcccgtggagtctccgaaatctccagtgaaacctgagcagacgctggacccagattcagagtttgcaaagttagagctagaattcggaaaagttaacagagaccatgaggagataggcggttgggatttcgacgagcttgaagaggagctgcgagctgacatatctaattcaaccaatccaaaataaccacgctcatcccgacatctgtgaactttccttgtgctggcttcttctgaaaatttgtagactttgaattgttgaatgtacatagtattgttgtttc

SEQ ID NO: 34461 - DNA, 687 bp, Zea mays
  Clone ID: UC-ZMFLMO17269C02_FLI
cgacggcgaggccaccgatcctatctatatatattcactcgtaccatggaggaggaattccaggaggccgaaatcctatggccggcaggcgtggacggcggcggcgaggcggcgcctgcttgctcggtccgtcatcgtcccagggcagccacgccggtcgacatctctcggcagaagcggcggtgccgcccctgcccggtgtcgtcgtcggagcattattacgccaccacgctcgacgaccaggaaaccgacgacgtcggcgatggtgcaacaaaagggacgactgcgaaccacggctcggcggtcgtgccgccgcacgtccttgtcgcgcggcggaggaggctggtgcgcggccggacggcggcctactccatgtgcgctggcaaggggaggacgctcaaagggcgagacctccgcgacgtccggaacctcgtcctcaagatgacaggcttcatcgaggagtgaatgaatgcgtgccgtcgcatcgcatggatccagaggattcttttcagcaagccaatggaagaagcacccgtagcagtctagcagaaggatatacaactatacaagaagatgacgactgttcacgcgtaataatttattaatttgctagcttatgtaataattaattaatgtacatagctagctaagaagctgagggtgaaataagttgaaaagagtaaattt

SEQ ID NO: 34462 - DNA, 1491 bp, Zea mays
  Clone ID: UC-ZMFLMO17269C12_FLI
ccgaacgccaacaacgaaaaactccgcagcagtccacccagtccaccagacatccgacaggaattgggaggggttgataggactcatccgcctaattcttgtagtggaattcaaccaattgattgctatttgggacagcggatttgtgatcctgttaccacagtcttcttgcgggccagaaacgcgaatcacgatggttccaggaatcgccaccaagacggcggcgcgaccggtggcctgggcacctcagcctcggaacatgttcgtgttcggcgcaggtttcgtcggccgctacgtctcggagcgcctcctcgcgcagggctggcaggtctccgggacgtgcaccactgtcaccacgaagagggagctagagatgctgggcatgaatgcttccgttttcgatggcacagaggacagcctggaaaatattcacagtttacgacaagcaactcacttgctcatctccatcccacccatccctggagttggtgatcctctacttattaatttagatgaagatctgaggagaatactcggccatggtaatcttgaatggctatgctacctttcgtcaacaagtgtgtatggtgattgtggtggtgtattggttgatgaggagtaagggactcgttggttcttttctcgtccatgaagtacattttaatagaaagctaaatacactgctgtgtatgcagccatacagtaaacccaaagagcgagtctgccaaattaagatataacgcagaaaaaggatggctgaatcttattgatgatccaaaactgtcagcttttgtattccgtttaggtggaatatatgggcctggaagaagtgctttggacaccttagcgaagagcaaatctttgtcacggaaacagaagttgcgagaatctaagcaatatactgcacgaatccacgtggctgacatctaccaggctgtcttggctagtatgagcatcagatgtgcaaggaaaatatttaatgtggtggatgacgaccctgccccaagagctgaagtttttgcgtttgctacgagtttgatacagaggagatatcctgatatgataactgaaaccattgatgccaagcctgcaggcttagattatcaagagatgatcgtacctgcagagaaacgggtttctaatgctcggatgaagcaggaacttggtgttaatctgcttcatccaacttatagatctggtctgcagagtatccttgatgcttggcaaattcagcctccacttcccaatacaagtcaatgatgatttagttttgaaaggcatataggtgtatgtacatgtatttgtgcttgatttggttcttgtataaaaaagaacggagtgaataataatttagtgacgttgtagccttttttggcggagttggtctggtgctcgtgttatttttagcattgtttacgaattatatagtacaatctagtcgccatggatctgactagacgattaatcgtgatgagattgattagtggagcc

SEQ ID NO: 34463 - DNA, 1243 bp, Zea mays
  Clone ID: UC-ZMFLMO17269D10_FLI
ccgaactgagcagttcgaccaggcagccatccacctccaaccccccttcgcctgcgcaaatcgttaccatcccagcgagaaagatggcgcgcgtctccaatgccaagaagcggcagggcgccaagcccgcctccgcgctcagcagcaccgacaccagcaccgccgcaaagaggaaggccgaggacgaccgccccgtgcgcgtctacgccgacggcatcttcgatctcttccacttcggccacgcccgcgccctcgagcaggccaagatgctgttccccaacacctatcttctcgtcggatgctgcaacgacgagctaacctaccgctacaagggcaagaccgtcatgacccaggaagagcgatacgaatccctgcggcactgcaagtgggttgatgaggtcattcctgatgcaccgtgggttctcacacaggagtttattgataagcatcagattgactatgttgctcatgatgcgctgccttatgctgatactagcggaacagcaaatgatgtctatgaatttgttaaaaagattggaaaattcaaggaaacaaaaaggacagacggggtttctacttcagatctcataatgaggatcttgaaggactataaccagtatgtcatgaggaatttagcacggggctactcgaggaaagatcttggtgtgagctatgtcaaggagaaacaattgcaagttaatatgaagatcaataaactgcgggagactgtgaaggcacatcaggaaaagttgcaaacagtggcaaagactgctggtttgaatcatgaagaatggcttgctaatgcggatcgctgggttgctggtttcctagagaagtttgagcaacactgccacaatatggaaactgcgatcaaggatcggatacaggagaggctagggaaacagttgagcaaaggaataatcgctggtcttgtgcaggaaccggtgacagcctaaaacaggtgatgctgtcaatgaaacgcactgatgcttttcagatcatcctcccgatgtggttctggtgcgaggcttgtaagggtgcaacgcggttgctgagacgttttaattttgtggtgcatgtgaactcttcccgtatacaaatgtctataggagaggcgtttggtgttttgggcatcgtcgtgggcgtgtttctttgtatctaacgggttagattaaccttttttttgtatcgagattgatgttctttcgtggttataataataataaataataataatattgtc

SEQ ID NO: 34464 - DNA, 557 bp, Zea mays
  Clone ID: UC-ZMFLMO17269E02_FLI
ctttatatttacaaaccatggaagacaatcctctgtaccatcttccctgcttacatattttccaaactatccaattccagcatccaaacagacacggtatgtaactccttgtttaatattatttgcaactttttacaaacatattatatgactataacctaatgaaattcatttgctaggcccgacgattgctaacatatcccgatgtgccacaaagtacagagctgatgaacactaaacagaccagcttaacaataatgaactatcgtgaccactgaaaaggatgaagcacaaccaagttgacaaagcctgctagattccagaaatccatgaaaataaagcttgttacatcctcatgaaatgcatgaagggatttgcttttgcatatttatcgaggagggcttcatcacttttaatgaaaaatgcatctatgtatatataaaccacctgttgaagcctgtcactccatgtgtgttgatgcaacatctaggaaaaaacaatgctattagttgttggcatatgctactttaatactacttaatatgtattgcagtctc

SEQ ID NO: 34465 - DNA, 442 bp, Zea mays
  Clone ID: UC-ZMFLMO17269F10_FLI
gggcgagatgctgcgggtgatgccagagtgcaggcacaggttccacctcacgtgcctcgacgcgtggctgcgtcgtagcgcgtcgtgccccgtctgccgttcgtcgcccatcccgacccccgtcgccacgccgctctctaccccactctcggagcttgtcccgctgtcgcagtatgccgccgaccgtcgccggagcaggtttgggtgattaatgggtgatggagatgtgaactgttcggctagagctaccataactaggacaaaagtttttgcttgacagcagtacattattggacccaggaggaagacatgcagtgtacatacattgttcttctgttctaagatagtgtctatcaagtgaggttacctgtgatcttatagttgtacgcggaagattgttctatgaatcatcttatttcatccatgacttgcattgcagtgt

SEQ ID NO: 34466 - DNA, 1831 bp, Zea mays
  Clone ID: UC-ZMFLMO17269G08_FLI
gcgccggcgccgccggcggcggtgggaagaagctgcccggaggagcgggggagatgacggaggacgagctcgcgcgggtccccgggaggttgtgcggcaaaggcgccagcgcggtggcgtgcctccacacgcagcagggccggaagggcaccaaccaggacgccatggtcgtgtgggagagttttaattcaagcgacagcatcttctgtggtgtgtttgatggccatgggccatacggtcattttgttgcaaagaaagttagagattcacttcctgtcaagttgcgcacacaatggcaaactagtgctaatgggggctctagtcctcatcaaaatggaagcatcaactccgaagaaacagggtctattgttgacgatgaatggggtgatggtgatgacactgaaaagctccctgagatgtttcttccactgaagcaatcttacctaaaagctttcaaattgatggacaaggaactcaagctgcatcccacagttgactgtttctgcagtggatctacggcagtaacattggtgaaacagggattggaccttgtaatcggaaatcttggggactcaagagcaattatggggagaagagacgcctctaacaatctaactgctctgcaactcacagttgatttgaagcctaaccttcccagggaagctgcgaggatacaacaatgtaaaggacgggtctttgctcttcaggatgagccagaagttgccagggtatggttgccaaataatgactctcctggattggcaatggcaagagccttcggggacttctgccttaaagattatggtttaatatctgttccagagatatcatatcgccgccttaccgaaaaggatgaatttataatactagccaccgatggggtatgggatgttctctcaaataaggaggctgtcgacatagtagcatcagccccatctcgtgcgacggcagccagggcccttgttgactgtgctgtcaggtcatggaggttgaagttcccaacatccaagagcgatgactgtgctgttgtctgcttattcttgggtcacgagaagtcggccgactcggttcaagggagtgaacccaatgtggagacagcagaacccaccgtggaggtttccagttccacacaggattccagtgcaggggttgacgaagacattgcagatgctggcatgcatgtatctagtgcagtgcacatttccgaggccacgctgcagcactccaccacgttaagggaggtcgacgagattgtaccggtcgacgaacctacagcctcgaaggagcctggaaggtgcgggtctgctcgcagcctggcagattgcatatcgacaaacgaggaagaggaatggtccgcgctcgaaggcgtgacacgggtgaattccctcctgaacctccctagactactgtcgggcgacaagcgatcgaccagctggaggaagcggcggtgaccggtgaggaagctctcctacaattctttgccgagttcaggtgggggttcatgcagaggcgcgtgcaaaatcctttagggcttgttcgtttacgtcggattgcacccggaatcgttccagctaatcaaagtttatataaattagagaaacaatccggctaagaatcgttccgacccaccaatccgacacaaacgaacaaggccttagtctctgggaatttgttatagctgatttttaggcttccccagattgttttgccggcaggcgcgggcgtttcagattgcttcttcattcttgtgcctttgccgggaggtgttcccagaaccattcttgggcttctctgtgtccgtttgtgcataaggaagtttttgttctgtgag

SEQ ID NO: 34467 - DNA, 683 bp, Zea mays
  Clone ID: UC-ZMFLMO17269H06_FLI
cctgtaacgagtccaaccaagagaacgagtccgaccaagagagcacacgcaggttatagattatatgatgttgagctgactgtccaaagaagctacaagggtcatcatgtgccccttgtttccctcatcagtaaatggacaggtaaaccaattgtggggtatcctgtcactgtggaggttttggaggatagtcgtcccacaacaagtagaaatgagcatcgcccgccgatgggtagtctcggctccttaccaaagagcagagttgcagaaccaaggcaagcaagatcttcacccgcatcacgatcaaaatcaaaacccagtggacgtaaaaaggcctcagaacatgatttggacaagtcttggcggccccatatcaagaaaccagcatcttcgccgaggaaaatgcggaggctgtcatctttcgccggcagccggagagagagtgcagaccagaagcctgtagttgtgaaggctggcggaccagcagtcgcgtgtgtcccgcttcgacttgttctgagtaggatcaatgaagcactaagcttcccgttgagacaagaaaaccccacctgaggctgtggcagttttgcattgctgagatagaatgtgggcaggcatatacatttgctaggttttctttgtacattagttaccatattatctgaaagcgtattgcctggcatatt

SEQ ID NO: 34468 - DNA, 2553 bp, Zea mays
  Clone ID: UC-ZMFLMO17269H11_FLI
cttttttggcgaaagggcctctagccgagttggttaggtggtctgagtagcactccttaggtcctgagttttaatcccagtgaaagcgaatttcaggctgagattaaaaaaaggttactcgctggttcccctggtcatgtgcacacgagatagactggcctatgggggcggatcctcgtgtaggggctgggagagcttaaagcacgagtaaagatctggcttatagggggtggaccctcatgttgcatgggggaccagctttcgtgacctttctcggtcggggattcgattgagcttcttctttatataacaccgtgggggcagtctttcccctactggccacatttggcttttttgaccatatcctcctggtgcaccactgtcattttggttccagcttcaccgctgaactagacttgcaatctgcaaacaaatctaaggccatctaaaagacatatatcaagcaattaaaagaaataatgaattcacacaggacctaagcatttacttactggaaacgtccttatccacagctcaaaagtgactattgtgtttttatttcttcttctgagaagctatggttgattatagtctccttattctcgaaaatagaccctgcaaactaaaatcagttgatgagtctatcccgacttgcttgggactaatatgctttgttgtagtttttgcatggatgagttgatgaaacatcttggaagttggaatttaagtgcactacaggtggcattttcatgctaataacatgtctgagtctaactttttttttatccttttacacattttacaattttaaaataaattagagtattagactagtataagctgtgagctatatactggtgcgagttatttatttatttatttatttagcttaaactatctgaaggacaggcttggcacagtggtgagaagcctttccactgagccgaaggtcctgggttcgacacaacctctttgcaaaaatgaaggggtaagggttgccttggttatcacttccttagaccccacttatgtgggaaccgccagcactgagtctgtcctttatttatctcaaactatctatattcacttgtagcgtttctcaatagtcatactgtcaagagtcagattaacttgtgtgttatgttgctttcatagatactgaaaattcaacagctgtatgatggttcatcatgtattttctcccatggtcagcagcggtttcgtcttttgcgccattggttggatgtcgacggagtaccatggggtgaagtgcaaattattgaagaagatacacctcaaagaactccaagagatgcttttgcacagttagctgcacctaacagtttcaggcaatgtgcttcatcgataatgcccagtttgcatgtgtattgttctacacaacttgatcatgtggattctgatatggacagggattcactatcacccactagcacttcaagtgatcactcaataacagataaaagaatataccttttaggttcccgctccagtgatttggtaaggtgtggtattgcggatgaatcctcaaatgaaggccaaaattctgtacatgaacagtcttgtcagagccatgactctgttaaagaaattgatgggtatggtcagccagataagaatacaaacacaggagatgaggataatctttgtttcatatcctccaaatcctttcagagaacaagaaagaaagataccaaacagcagaaacactacttcacaacgaaaaatgcttcacaggctccattgtcattttggcctcactgggcttatgagatgtatgattcgtattcactttccaggagagctgcagatttgtggagacaagtaattttaaacccaagcatggatgatcatgtgagaaaaccaaattatttgtcatattgcattggaagcaaacttcctatctcagaatctctgaggcaagaattgcttgagattgatggagtctcatatcgactacagcgggagattcagctgctcaaagccttcaatatcatacgatgtagaaattgcctgatccatattgcaagacgaagtgacatggtggtgacgtccagtgacagccctatgtctttgcacagcaggcctcacggttttgtgaaagagattattacagtatacaatgccactggccttgcactgcgtggcgacccttccaaaactcacagctggtttccagaatacacatggacgatcgcgttgtgcaatgcctgccagtccagtataggttggctgttcagagtcgatgacaagaacctgcatccgggatccttctgggcgatacgcagttcccaaatttcagacgatacacagtcaagagatagaactgatcagaccatccatgtataagctgcgtgaccatttgttgaaattccaacaatccattaacatctgccttccattattctctgcgagattcaatttggctgcatggtgtccccaagtggctaaggtttctagtaaaatgtaactgaaaacaaagatactgagatcataagcttaacccgcgacatgggcacctacgtttttttgaag

SEQ ID NO: 34469 - DNA, 2216 bp, Zea mays
  Clone ID: UC-ZMFLMO17270B01_FLI
gcagcttcaagttgaagagtcaaaggccatggtagttaaggagagggaagctgctagaaaggcaattgaagaagcacctccagtaattaaagagactcctgtgctagtcgaagacacagaaaagattaactcactgacgaccgaagttgaacaactaaaggctttgctgctaactgaaagacaagcaacagaagctgcaaaaagagaacacgctgaatctgaactgagaaatgaagaactaattaagaaatttgagagcgcagagaaaaagattgagcaacttcaggaaactgtccataggctggaggagaaagcaaccaacatggagtctgagaacaaagtgctccgtcaacaagctgttgcaatttctcctacgtcaaaatcattagctgcatatcctaagtctcctttccagctgaaaactccggagaatgggaatgctctaaatggagaagtgaagtcatcaccagatatcacccctatcttaccaaaccccaaggagcttgaggctgaagagaagccacaaaaatcacttaatgaaaagcagcaggaaaatcaagacctactgatcaagtgtgtatcacaagatctgggattctccagtggcaaacctattgcagcttgccttatctacaggtgtcttctacactggagatcattcgaagttgaaagaactggtgtttttgaccgtattattcaaacaattggctctgctattgagtcccaggacaacaatgacaagttggcatattggctctcgaattcatccacactgctgctgctgctgcaacgaacactgaaaacaactggagcagctggattcactcctcaaaggcgcaggtcatctgctgcatcttttgggagggtgttttcggggatgcgagcctcaccacaaagtgctgggcgtgcttttatgggaagtcgcttgattggaggtctaggtgaccttcgtcaagttgaagccaagtaccctgccctgcttttcaagcaacagctcacagctttccttgagaagatctatggaatgataagagacaatttgaaaaaggagatatctcctttgcttggcctttgcatccaggcaccaagaacatcccgtgcaagcctaattaaagggtcacgttcccaagcaaatgccttagctcagcaaactctgattgcacattggcagagcattgtgaaaatattgacaaattacttgaatgttttaaaagcaaattatgtcccttcagtcttaatcagcaaagtgttcactcaaatcttttcatttattaatgttcagttatttaatagtcttcttcttcgacgggagtgctgttcatttagcaacggagaatatgtgaaagctggattggcagaattagagcagtggtgcatttatgcaacagaagagtatgcaggttcttcctgggaagaattaaaacatattaggcaggctgttggattccttgtgattcatcaaaagccaaagaaaacattgaaagaaatcaccaacgatctgtgccctgtccttagcatacaacagctatatcgaatcagtacaatgtactgggatgataagtacggtacccacactgtttcatcagatgtcatctcaagtatgagagtaatgatgacagaagattctaataacgcggtcagcagttcgttcctgttggatgatgattccagcattccgttttcggtggacgacatctcgaagtcgatgacagaaatcgaggtaacagatgtcgacatgccacctctgatacgggagaattctgggttcaccttcctacaccagagaaaggactaacagggtggtccttccagctgcatgtccctttttgcacattcttttctccgctcaacctgtgcataactcgtgtacatacgctcgtgccttttgctctctggccagggcttgttagatgtattgtctttggtttgattggttggttctttcatcaatcctctcccaattttgttgggcgaagggtccacatctatgtttctccatactgtagtgaaaaggggccggatgcccctggtcagttccccgagctgcttttggaaaagctcgtggtcattaaacagttaagcgtgtggaaaaggttctccgcatctaccgagtcgttcgttgtgtcgccttcttcatatggatcatcgccatattgtaaattgcaaagacgattatagttgaaaaaatagatattacagtgatattacatatggat

SEQ ID NO: 34470 - DNA, 1025 bp, Zea mays
  Clone ID: UC-ZMFLMO17270B10_FLI
cttccgctcgctcgcggagggcgaggaggtggagttttccgtctcggagggtgacgacggccgcactaaggccgtcgacgtgaccggccccgacggatccttcgtcaggggcggcggaggcggaggaggaggcggcggcggctacggctcccgcggcggtggcggatctggcggcggcggtcgcagctacggtggtagctggggcggcggccggagatccggcggcgggggcggtcccggcgcgtgctacaagtgcggcgagcccggccacatggcaagggactgccctagcgccgacggcggaggcggctatggcggaggcggctacgggggcggcggctacggaggaggaggaggaggcggtggctgcttcaagtgcggcgagcctggccacatggccagggactgctccagcggcggcggcggctacggcggtggcggcggcggtggtggtggcggctgctacaactgcggccaggccggccacatggccagggactgcccaagcggtggcggcggtggcggagggaggttcggcggcggcgggggtggaggcgaccgctcctgctacaactgcggcgaggccggccacatcgcccgcgactgtcccacgtgaggtgtgtccgcgtccgtccagccagccagatcggatcggatcgctccaccacctgctggtctgatggcgccgcccccttctagatctcgcttaaaaaaacatccccctctcgctgtgtgtcggagtaccgctttagttttgccgatccgggcacgagtgcccgctgcctctttcgtaagaggatcccgtccgccgttttcagatttcgttcggttcgtagaagaactctcaagttaagttaagttatcatggtgtgtgcttggtcgtcgtccgtcgttcgtcgtcgtcgttaaggttttaagagatgatttggtcctgtgttgccgaggggaagtccaatctgcttttcttttcttttttgtggtttgttccatcagactgaggaaggagatgagatgattattctccc

SEQ ID NO: 34471 - DNA, 1556 bp, Zea mays
  Clone ID: UC-ZMFLMO17270C10_FLI
ctgaaaaccgcttcacaacctaaagctgacgagcttcgcagaatgcaagagctggatggcatcatatctagtgagcaagctgaactagataggctcacaaagtgttccagcaaacttaaagatcaggcttcggaacttcaacagaaagttgaaaatgctggagggaagaagctgaaggaccagaagacaaaagttggcaacatccaatctgaacttgacaaaacaagttcagaaatcaacagaaacaaagttaacgtaacttcaggtgagaagttggtgaaaaggttaaccaagggcattgaggagtccaagaaagatagagaaaaactttctgctgaaacagagaagatgatgtctatgttcaaagagattgagaagaaagcgtttgttgttcaggaagagtataagaaaacacaggagatgatagacaaccataaagttgagcttgacaaaactaaggaagaatacaccaaactaaaaaaagcaatggatgaattgagagccacagaggttgacgctgagtacaaattgcaagatacaaaaaagcttgccaaggagtgggaaatgaaggtgaaaacattcaagaaaaggcttgatgaaattcagataaatgttgttaaacacatggatcaaatccaaaaggatgctgttgatcctgagaaactcaaagcgaccctaggtgatgagcaactaaatgacacatatgacatgaaaagggcaatggagatggtagcattgttagaggcccagattaaagatttgaacccaaatctggattccatagcagagtaccgcataaaggcttgcttgtacggtgagcgtgttgatgagttaaatgctaccactcaagaacgtgatgatcttaaaaagttgtacgatgggttaaggaagagaaggctggatgaattcatggctggattcaacataatatctttgaaactgaaggagatgtaccagatgattactcttggaggtgatgctgaactggaacttgttgattccttggacccattttcagaaggtgttgttttcagtgtgaggcctccaaagaaaagctggaaaaatattgccaatttatctggtggtgagaagacacttagttcgctggctttggtgtttgctcttcaccactataaacctactcctttatatgttatggatgagattgatgctgcgttggactttaagaacgtatcaattgtgggacactatgtgaaagataggaccaaagatgcgcaattcatcattataagtctgaggaacaacatgtttgaactagccgacaggttggttggtatttacaagacggacaattgcaccaagagcataacgatcaacccaggaagctttgccgagagcatgaaagtagtgtagcgtgctcaccatggatccttccgctaaatgtaacctccctagtgtcctaagcgaaactaaccactctggtgtccttcagctaaatgtaaccgttgtagtgtcctcgtggaaccgaggttcctcgggcattgtggtttgccgtgcactctacaaagcagtatgctatgattaagtccggcttg

SEQ ID NO: 34472 - DNA, 1360 bp, Zea mays
  Clone ID: UC-ZMFLMO17270F03_FLI
tccctgcaaatcctgcagacaccaccgctcgtttttctctccgggacaggagaaaaggggagagagaggtgaggcgcggtgtccgcccgatctgctctgccccgacgcagctgttacgacgacgtggtcggcctggtgctgcactcgtcgctcatggtgccctacttctcgtggaagtacagccaccggcgccaccactccaacacggggtccctggagcgcgacgaggtgttcgtgcccaagaagaaggaggcgctgccgtggtacaccccgtacgtgtacaacaacccggtcggccggctggtgcacatcgtggtgcagctcaccctcgggtggccgctgtacctggcgaccaacgcgtcggggcggccgtacccgcgcttcgcctgccacttcgacccctacggccccatctacaacgaccgggagcgcgcccagatcttcgtctcggacgccggcgtcgtggccgtggcgttcgggctgtacaagctggcggcggcgttcggggtctggtgggtggtgcgcgtgtacgccgtgccgctgctgatcgtgaacgcgtggctggtgctcatcacctacctgcagcacacccacccgtcgctcccccactacgactcgagcgagtgggactggctgcgcggcgcgctggccaccatggaccgcgactacggcatcctcaaccgcgtgttccacaacatcacggacacgcacgtcgcgcaccacctcttctccaccatgccgcactaccacgccatggaggccaccaaggcgatcaggcccatcctcggcgactactaccacttcgacccgacccctgttgccaaggcgacctggcgcgaggccagggagtgcatctacgtcgagcccgaggaccgcaagggcgtcttctggtacaacaagaagttctagccgccgccgctcgcagagctgagaggacgctaccataggaatgggagcaggaaccaggaggaggagacggtactcgccccaaagtctccgtctacctatctaatcgttagtcgtcagtcttttagacgggaagagagatcatttgggcacagagacgaaggcttactgcagtgccatcgctagagctgccatcaagtacaagtaggcaaattcgtcaacttagtgtgtcccatgttgtttttcttagtcgtcgctgctgtaggctttccggcggcggtcgtttgtgtggttggcatccgtggccatgcctgtgcgtgcgtggccgcgcttgtcgtgtgcgtctgtcgtcgcgttggcgtcgtctcttcgtgctccccgtgtgttgttgacttgttgtaaaacaagaagatgttttctggtgtctttggcggaataacagatcgtccgaacg

SEQ ID NO: 34473 - DNA, 1857 bp, Zea mays
  Clone ID: UC-ZMFLMO17270F10_FLI
gtcggagcgcacacacacacaaccagatctcccccaaatccacccgtcggcacctccgcttcaagatgcagatctttgtgaaaaccctgactggcaagactatcaccctcgaggtggagtcgtctgacaccattgacaacgttaaggccaagatccaggacaaggagggcatccccccagaccagcagcggctcatctttgctggcaaacagcttgaggacgggcgcacgcttgctgactacaacatccagaaggagagcaccctccaccttgtgctccgtctcaggggaggcatgcagatctttgtgaaaaccctgaccggcaagactatcaccctcgaggtggagtcctctgacaccattgacaacgtcaaggccaagatccaggacaaggagggcatccctccagaccagcagcggctcatctttgctgggaagcagcttgaggacgggcgcacgcttgccgactacaacatccagaaggagagcaccctccacttggtgctgcgcctcaggggaggcatgcagatcttcgtgaagaccctgaccggcaagactatcaccctcgaggtggagtcttcagacaccatcgacaacgtcaaggccaagatccaggacaaggagggcattcccccagaccagcagcggctcatctttgctggaaagcagcttgaggacgggcgcacgcttgccgactacaacatccagaaggagagcaccctccacttggtgctgcgcctcaggggaggcatgcagatcttcgtgaagaccctgaccggcaagactatcaccctcgaggtggagtcttcagacaccatcgacaatgtcaaggccaagatccaggacaaggagggcatcccaccggaccagcagcgtttgatcttcgctggcaagcagctggaggatggccgcacccttgcggattacaacatccagaaggagagcaccctccacctggtgctccgtctcaggggtggtatgcagatctttgtgaagacactcactggcaagacaatcacccttgaggtggagtcttcggataccattgacaatgtcaaggccaagatccaggacaaggagggcatcccacccgaccagcagcgcctcatcttcgccggcaagcagctggaggatggccgcaccctggcggattacaacatccagaaggagagcactctccacctggtgctccgcctcaggggtggcatgcagatttttgtgaagacattgactggcaagaccatcaccttggaggtggagagctctgacaccattgacaatgtgaaggccaagatccaggacaaggagggcattcccccagaccagcagcgtctgatctttgcgggcaagcagctggaggatggccgcactctcgcggactacaacatccagaaggagagcacccttcaccttgttctccgcctcagaggtggtatgcagatctttgtaaagaccctgactggaaaaaccataaccctggaggttgagagctcggacaccatcgacaatgtgaaggcgaagatccaggacaaggagggcatccccccggaccagcagcgtctgatcttcgccggcaaacagctggaggatggccgcaccctagcagactacaacatccaaaaggagagcaccctccaccttgtgctccgtctccgtggtggtcagtaagtcatgggtcgtttaagctgccgatgtgcctgcgtcgtctggtgccctctctccatatggaggttgtcaaagtatctgctgttcgtgtcatgagtcgtgtcagtgttggtttaataatggaccggttgtgttgtgtgtgcgtactacccagaactatgacaaatcatgaataagtttgatgtttgaaatt

SEQ ID NO: 34474 - DNA, 967 bp, Zea mays
  Clone ID: UC-ZMFLMO17270G06_FLI
ccaaaacctaaagtgccttccacaaaaagtgagtttgaggaactggttgctgttcctacatctgctgctatagacggcccccttgaacctccgccagcgtctgccgctgtagtccttgatacccctgatgaatcattaatcagttacttcagtggcgctgctagcattggaagtgtatcaaacgcacaaccgtctggaagagtgcacccatctactgagagcatcccatcttcccatgtgccattgatcgttccatctgctgcttcaacacatcaactgcccccttcagtagcttcaacagcttcaccattgcccgtccatggaactaatgcccacactagccggccaacaaatcttgtgacaccagatttctttgcgcctccaccatcctcttcagctccactggctccgccgggtgcatctgtggttcctactgcgccacctcttcatcccacttcggcggcatctattcaacgttctcagtatggcaccccactgctccagccctttccaccgcccactccacctccttcccttaacccctcacacagtgatagacttactgttacaagggatagagtcaaagacgctctacagagacttgttcagagcgacgagttcgttgatctggtgtgccgggaattgcagagatcacttgtataggctgcttgcttagtcttgtcgggagttttctggctcgtggcaagaatgtgcctgtaattttcctttgacttttttgcatgcttcccttcccgtactattgtataggtttgtgttagtgtattggtgtagagtactataggaatggttggtagtatctgtggggtcccttggttccaaatatccgtgttggcagtgtgagaagcggaagtaaaactagcctgttcaagaacgttggaatttgatgtgctttggcgtggacaaattacagcactgagattctagaagtttttttttaattcttatt

SEQ ID NO: 34475 - DNA, 471 bp, Zea mays
  Clone ID: UC-ZMFLMO17270H02_FLI
tggggagggtactgaggaagaagagtattcaaaagatcgggtaattgttgcagtgcggcaagggaacatcctcgcaactgctttccacccagaattgacatcagactccagatggcatcgtttcttcttggacatggataaagaatccccagcaaaggcgttttctgcgctctccctgtcgtcatcgtcaagagacactgaaggcctgccaaagaataagccgtttgatctgcccatttttgagtaacgctacagacaagacaaaccaaaagattgaaggaacgaagaaactgaccgtatttattatcgatcatcatttagccggttacaaaaacagccagctgagaatctgtcatactcagccgaaaaaagtgttgtctggtagctaacttgtacgggtcaaaaataatcacgctgtgtgctgtacgcaattctcttcagataaagcgaaacattgtttttctggtgacc

SEQ ID NO: 34476 - DNA, 975 bp, Zea mays
  Clone ID: UC-ZMFLMO17270H06_FLI
ggccacggctccactcgcttcctcgcccaccacctccgcggacacggagcggaggaagcacgaactgctgcgcgcggttcaggaaacgcggcgcggattcgcagcggggcccgaccaacgcgctgccatcgaggaggccgtcgtggccgtggaggagcgtggtgcggggaagggaacgccgatagatctcgcggcgctcgatggcacctggaggctgtgttacacatcggcatcagacgtgcttgtgctgttcgaggcggccgagaggcttccactcctgcaggtgggccaaatataccagaaatttgagtgcaaagatcgatcagatggtggaactgtgaggaatgttgtaaggtggagcatcgagaacttgctggaggagcaagaaggtgcaacactgatggtctctgcgaagtttgttgtcctgtctaaacggaatatctttcttcaatttgaggaggtcgctgttgaaaatatcaagatcagcgagcaactgcagacactaatagctcctgctatacttcctcggtcatttttgagccttcagatattgcagttccttaaaacctttcgaactcaagttcctgttagtggtcctgaaagacgatcacctggaggattatattatctgtcttaccttgatcgtgatatgctcctgggtcgttcagttggtggtgggggaatatttgttttcacaaaggcacaacctcttacataaaggttttctggtaaccgagggcatatcatctgatggcatgacagctgtccttgagcttgccaacttacaacgggtatatataccttgcaatgcaaatatgtgattatcacctcattctactttttaaagagattgccatgatctactttgaattcgaagagtttacatgcaacatgttttcttttacacaccagttgtggtgcatatgtctggctattggctgtggatatataaagcttcctggatagttctatttc

SEQ ID NO: 34477 - DNA, 535 bp, Zea mays
  Clone ID: UC-ZMFLMO17271A02_FLI
gggctggcaaaggcgagccggccccggagacgaagaagggctcccctgcgccggggaagcaggacgccgcggaggaggctggcgcggacaagcccggcggcggcggcggcggcaagaagggcaagaagaacaagaatcccaacaaaccgctggactgcggcggcgaggccccggccgagaagcaggcgtcgccggggcccgagagcccgcacgtgcacggcggcgccttcccgtactacgcggcgcacccggtgctgagctgctacaacgtggcgcacccgagctcgagcgtgtcgtactacgcgcccgccgccgtggtgccgtacggcgggttcccgcccatggtgccggcggagttcatgtacggcccgccgggcatgcaggagtctagcatgctcaacgaggacaacgccaactcgtgcagcctcatgtgatgtctgtcacgcacgcgccgccgctacctacctacattgtcaaattaggcggtcaaagctcttgcttgttgaccagagattaattctttgaattgctcatc

SEQ ID NO: 34478 - DNA, 754 bp, Zea mays
  Clone ID: UC-ZMFLMO17271E11_FLI
ggatgatatgagaagattagatgtgtctccaaatattgttacttataacatgctgataaatgcatgcgtccgtgatggtaagctgcaagaggcattccaactgcatgatgagatgctcagcagtggagtcgtgcctgatgatactacatatgacatactccctcggaccaataatagttgattttccacctgccaggattgcttgctgcttgttcaagcctccagtctgacacagtgtattaccaaccagagggaatacgagttagcttgaaacttttggaagcaagtcctgcagatgctgaaaatcatgtttcaattctgccagtaaagtatgaagaaccttaacatgcgattcagcagattgaaatttaggaaacttgcactgtaaatgaagtgaactccttgtcagttataatttttcctttccaatatatctctacccctttaaagcacgactttgacacgtcgcgcactcccatggtgctgggaactcccgcacttccctcagcctcctctcgcgtggtgctcggaagtcggaaccctcaacctcctccctcgtccctcggtgtttgaaattactgtgcttcccttagcctcctcccctggttctcgaaactactagagatggatttagatctttatttaaatgttattttttttttgtcttctttctttgattgtaaacaagtaacatatataatttactgtgtaaatttatatttttattttcaatattgaatctattaatatttat

SEQ ID NO: 34479 - DNA, 2300 bp, Zea mays
  Clone ID: UC-ZMFLMO17271G11_FLI
ctccgttgggcctcgcttccgatgcgccggagctcgcacgcgatgggagcgcaagggtttcggctgctgctgcttctgctgctcgcggcggcggcggcggaggcgcgcttcgttgtggagaagaacagcctgatggtgacgtcgccgacttcgttgcggggacgacacgacagcgctatagggaacttcggaatcccacagtacggcgggagcatggcgggcgccgtcgtctaccctaaggacaacgccaaggcttgcgacgatttcgacggcaggcaccccttccgtgccaagcctggcgcgatgcccacgttcctcctcatcgaccgcggtgagtgcttatttgcgaagaaggtttggaatgcacaaaatgctggtgcctctgcagtacttgtagttgatgacaaggatgaaccattgataacaatggatttacctcgtgaagatgacgaggcttcaaagtatatacaaaacataaccattccttctgcattaatagatgaaaaatttggtgaccagttgaagaaggctgttaaagatggggaaatggttaatgttaatcttgattggagggaggctgttccacatccagatgaccgtgttgagtatgagttatggacaaacagcaatgatgaatgtgggcctaaatgtgatatgctgatgaattttcttaaggaatttaaaggagctgcccaactacttgagaaaggtggctatagccaattcacgccccattacattacttggtactgtcctcaagcatttgtgatcagtaaacaatgcaagtctcaatgcataaaccatggaaggtactgtgcacctgatccagagcaagattttagcataggctacgaaggaaaggatgtggtggtagagaacctcagacagttatgtgtgtttaaagttgcaaacgaaaataagaaaccatgggtctggtgggattatgtgactgattttcacataaggtgtccaatgaaggagaagaagtacaataaaaaatgtgcagaaactgtcatcaaatcactaggtctggatgtgaagaaggtcgataaatgcatgggagacccaaatgctgattctgaccacccgttacttaaaatggaacaagatgctcagattgggaaaggttcaagaggagatgttactatattgcctacacttgttgtgaacaaccggcaatatcgagggaagcttgagaggaaagctgtcctcaaagctatttgtgctggttttgaggaaactacagaaccaaatgtttgcctgagtgatgatatagagacaaatgagtgtctgaatgacaacgggggctgctggcaagacaaatctgctaatgtaacagcctgtagggacaccttccgtggtagagtgtgtgaatgccccactttcaatggcgtacaattcaaaggcgatggctacagcaattgtgaacctgctggaccaggaaaatgcttgataaaccatggaggatgttggcatgaaactcgcaacggaaaaacattctctgcttgccaggaatctggagatgggaaatgcctgtgcccagctggtttccgaggggacggcgttaaaaaatgtgaagacattgatgagtgcaaggagaaaaaagcttgtcagtgtcctgaatgcaactgcaaagatacatggggtggctatgactgcacttgcagtggtgaccttttgtacatcagagagcatgacacctgcataagcaagacagcagttcaggctaaagcagcatgggctgcagtgtggggtatcttgatagttgttgctgttgtggcagcgggaagttatgttgtgtacaaatacagactaaggtcatacatggactctgagattagagctatcatggcgcagtatatgccacttgacaatcaaggagaggtcccaaatcatacacatgacgaagatcgttcataagtgtgcagatcattacgtggtgggcccatatggcctaatctgacaccaatgcagatcgtcctgagctctacaaacagaaactacaggccaataatagcttaatttttagagtacaaaaatctgttatttgcctgatagtttatctggagcagtttcattttacatatgactgtaatttgtgagaatgtacatcttacgatttttgttgaccagtattcataggtttttagttagcaatgtgttgttggcccgttgctagtccttgtaatacaagcccacctgtttttttttgcgcatggcaagacttaacctggaaacattttgtagtacattttattttgtatcacctgctctatacacgagttttcttggaacatcgg

SEQ ID NO: 34480 - DNA, 1421 bp, Zea mays
  Clone ID: UC-ZMFLMO17272D09_FLI
gtgcatatgggtactacttccatatggctactgcagacggacttctcaagcgagacaaggggaaacatagaccctttgttttgtcaagggctttctttgctggaagtcaacggtatggtgcagtctggacaggcgacaactctgctgattgggatcacctgaaatcttctatcccaatggtcttaattcttggtcttactggtttgcctttctctggcgcggatgttggtggattttttggaaacccagaaccggacctgttggtgcgttggtatcaagtaggagccttttatcctttctttaggggtcacgctcaccatgacaccaagagacgtgagccatggttatttggggagcgaagaactgccataataagggaggcgattcatatgcggtattcactgttgccctacttctacacgctgtttagagaggctagtgtgaatggcattcctgtcatgcgtcctttatggttagaattccctgaagacaaagaaacatataacaatggtgaggcatttatggtcggaccaagccttttagctcaaggaatatatgaagagggccagaaatcagtgtcggtctaccttcctgggaaggagtcgtggtatgacttgagaaatggatctccatacaagggaagtgtgacacacaagctacaggttttagaagatagtattcccagcttccaaagggctggtacaattgtgccaagaaaggacagattcagacgcagttctactcagatggtgaatgatccatacactctggtgatagccctcaatagctctggtgctgcagaaggcgaactttatatggatgacggcaaaagctatgattaccagcaaggggcattcagccatcgccgatttgtctttgcagacaataagctaacttcattcaatatcgcacctgacaatttgagcaagaaatttacaagtggttgcgtgattgaaagaattatagtcctcggtttacgatccggagtgaagaaggctattattgagcctggaaaccaagaagtagaaattgaatcagggccaattagtttaaggagtggttccagcccagttgtgccaacaatccggaggcccaatgttcgcatcgcagacagttggacaatatggatagcgtaagaggttgtccattcacgtctggagcctgatgtctcttttgtttgctgtcaggttgcgaagttaggccaatctttagaagtttagttgtggcctcgatcattgcgcatatcattatggttttgtggcctcaaaatatttacatgtaactggtacttaagctgttccaactgccaattttgacagaaatactgagagagattgctgatgtatatttgtagctttcatacatgagtatttgagtttattatcttgcaaaaatgataaacagttacaaattccgagaac

SEQ ID NO: 34481 - DNA, 1598 bp, Zea mays
  Clone ID: UC-ZMFLMO17272E12_FLI
taaaaccctaaccctccgccgcccctcggacccccaaccagcagctgccgcggccatccgccggcgagatggcgctgtacctgctgttcgagtcggcgtccggctacggtctattccacgcgtacggcatcgatgagatcgggcagagcgtggaggccgttcgctcctccgtgctggacctcgatcgcttcggcaaggccgtcaagctcaccgccttcaaccctttctcctctgccgtcgatgcactcaatcagtgcaacgctatatccgaagggatcatgaccgatgaactgaggagtttcctggagctgaacctgccgaagcccaaggaggggaagaaggccaaatacagcctcggggtcgtcgagcccaaggtcggttctcacatctccgaggtcaccggcattccctgccagagcaacgaattcgtccaggagctgctccgcggtgtccgcctccacttcgaccgtttcatcaacgagcttaaggattctgacttggagaaggcccagcttggcctggggcatagctacagcagggccaaggtgaagttcaatgtgaatcgtgttgacaacatggtgatccaggcaatctttctattggatacgcttgacaaggacatcaattccttctccatgagagtcagggaatggttctcatggcacttccctgagcttgtcaagattgtgaacgacaattacctatatgccaagcttgctaagtttatcgtgaacaaatctgatttgacggaaaaagatattcctgctttggctgatatagttggcgacgaggacaaggctaaagaaattgttgaagcagcaaaggcttcaatgggccaggatctgtcaccagttgatttgatcaatgtccagcaatttgcccaaagggttatgaatctctctgagtatcgcaaaaacctttatgagtatcttgtgactaagatgaatgatattgcacccaacctgacatcgttgattggtgaagtagttggagctcgcctaatctctcatgctggcagtctttcaaaccttgctaagtgtgcagcctccacccttcaaatacttggtgctgagaaggccctattcagagcactgaaaactcgagggaacacaccaaagtatgggcttatattccactcctcctttattggccgtgcttcaactaagaacaagggcagaatggctcgttacctggcaaacaaatgctcgattgcttcacgcattgactgctactcggaggctagcacctctgtctttgggcaaaagttgcgtgagcaagtcgaggagagactggaattctatgacaagggtgttgcgcctcgtaaaaaccttgatgtgatgaaagccgctattgacagcatggtcaatggcacctcaatggatgatgatgatatcgagaagaccgatgcatctcccaagaaaagcaagaaaaagaagaccaaaaccaaggctgatggtgatgcaatggacgtggataaaccctccaacgttgctggtggagaagctgagcctggaactgagaagaagaagaagaaaaagaagcataagctggaggaggaggcacaggaggagaacggtgcagcagatactacccctaag

SEQ ID NO: 34482 - DNA, 704 bp, Zea mays
  Clone ID: UC-ZMFLMO17273A03_FLI
agcccaaaccccatacccaaacctagagctcgttattagggggagttgttgcatcttctgtgtgatactctgtatatatatccccggcagtgggctgttgcgagttctgttgagggaggagaagggggtggccaaagaaagcaggggcagaggaagcagagtagtagagcgaaggcgagcgtatcaatgatggggcctctgcctctccgccgccgcgtgggcgtcctcctgttcctggccctcgtgctcctgggcggcggcggcgcggacgccggcacgacaagctcgtacaggcggaagctggaggcgacggtggagatgccgctggacgccgacgtgttccgcgtcccgccgggctacaatgcgccgcagcaggtaccagattccctccccgccgccgtcgctcctggccactcgcgtcgcatgcctcctttttctccttttttttttctcagcaaccgatggatggatggatgggttgggcatgcgcaggtgcacatcacgctgggcgaccaggagggcacggccatgatcgtgtcgtgggtgacggccaacgagccgggcaacagcaccgtcgcgtacggcgaggacccggcgaggatggagcgccgcgccgacggcgcccacacgcgctacgactacttcaactacacctccggcttcatccaccactgcaccctcagaaacctcaaggttcacttgtt

SEQ ID NO: 34483 - DNA, 2068 bp, Zea mays
  Clone ID: UC-ZMFLMO17273A07_FLI
ttgagtcactaatgctagccagccaactaagaagtgaaattgcatacagagattctgatatatcaagcttcgtgattttggaagctatgacaacacttagatgctgtgaggacttctctatggagcgattagagttattgggggactctgttcttaagtatgcagtgagtgcccatcttttcatgacatttcttaataagcatgagggacagttatcgtccagaaggcaagaaacaatatgtaatgccacactttataggcttggtattgaacgcaggatacagggttacatacgtgatgctgcatttgatcctcgtcgatggcttgctcctggacagctgtccagacgtccttgtccttgtgaatgcccagtaaattctgaggttgtaactgaggatattcataggattgatgacaagtctataattataggcaaggcgtgtgacaagggacacagatggatatgttcgaaaaccatctctgattgtgttgaggctctaattggggcctattatgtcgaagggggattaaaagcagcttttgctgttctcaaatggttccagattgagactgaaatcgaggaagagttaattatggaagctctgtcgagtgcttcagtgcgaaactatcttccaaaagttgatgtagttgaattgcttgaagcaaaactaggctacacttttcaaatgaaaggtttgttaatagaggctctcacccactcatcacagcaagaatctggagcaacatactgctaccaacgcttggagttccttggtgatgcagtcttggatattttaataactcgccatctgttccttagtcataaagacacagatgagggggagctgacagatttacggtctgcatcagtaaataatgagaattttgcacaagttgcggtaaagcacaatctccatcagtttctacaacattcttcggggttcttacaagaccaaattactgaatatgtgaatagtcttgaaagttcgtccatggacagagccagccttttatccagtggaccatgttttaggtgatattgtagaaagtatagcaggtgctattcttattgacagcaaacttgatttggatttagtttggcgggtttttaaacctcttctttcaccaattgtcacacctgagaatttggagttgccccgattcagagaacttaatgagtggtctgacaagaatgggtactttattggaattaagtgtgaaaatcgaggagacagcacaatggctatccttaacttacaactcaaggatttgcttcttgtgaggcaaggttgtgggaagaataaagtagatgcgaaagcacatgcagcttccttattgcttagggatctagaggaaaaaggacttataattccaaggaatgcaagcagagtggaacaacttgaaaagaattctggtactgtaaaacattgcaacaacgtgcttgatgttatggacacacaaaacgtagcaccacctaggcaaaaggaagtagctgtgttaagtaccaccactcctggctctgttcttgataagccattggttgtgaaggttaagttgagcaaaggaggacctcgtatatcattgtacgagtcgtgtaaaaagcttcagtggccaatgccgacctttgaattcgtgaaggtcgaaccaagcgtgtgctcctcttcctgtggttcgtcacaaaaggttgcgccccaaggattcgcatttgcttcgacaataacgttgcatataccgaacggcgatgtcatcagcctcacaggagatgggcgtgcggataagaagagctcacaggattctgctgcgttgctcatgctctatgagctgcagcggcaacgtagattccaagttcaagaagtatgaggaatcacctcgtggttccatcaccaaagatgcaatgttaccgccaccggcgattattgcttgggcatcttggagtaatgtcaccgccaaatcagtctttagtcgtcagccgcacgggggtgtaagaaaataatgtacttcattctgattctaaattataagacaccccgaattatgtaatctaattatcataatgtcctataatttg

SEQ ID NO: 34484 - DNA, 3687 bp, Zea mays
  Clone ID: UC-ZMFLMO17273A12_FLI
ctcacacctttccttcgccacttccaccttcccgaaccaccaccgattgggtggttgactccggggcctccttccacactacccccaccactaattcgttactccactcccatccaccccacccctcacatcctacctctatcgtcgtcggcaacggttccaccctcccggtcacctcagtaggtacatcggttcttccaggaccattctgccttaacgacatccttgttgctcccggactgactcatcccctcctttcggtgcgtcgcttcactagtgacaaccagtgctctatggagttcgacccctggggcctcaccatacgtcaccttcccacacatgctgtgctcgctcgttgtgacagctccggccccctctattctcttcacttgccctccactccccacaccagagtagcctcatctcctgtacttactactaccaccacctcctccgccatttggcaccgtcgcctcgggcaccctggacctgacgtcatgtcccagctttccggccactccgacatatcatacactcggggctcttctgagcgcctctgtcatgcttgtcagctcggccgtcactcccgtcttcccttttccacttccacgtccagggctgttcaagcctttgatcttgtccactgtgatctctggacatctcctgtccttagcctctccggctacaaatactacctggtcattctggatgactactcccatttcctttggactttcccccttcggctgaagtccgacacgtttaccaccctcactcacttcttcgcctgggtatccacccagtttcggcgcccggttcgtgccctgcagtgcgacaatggtcgcgagttcgacaacaacgcatcccgctctttcttcctcactcacggcatccagttgcgtctctcgtgtccctacacctctgctcagaacggccgggccgagcgcatgattcgcaccaccaccaacatgatccgctgccttctctttcaggcgtctctccctgccacctactgggcagaggcccttcataccgccacacatctcctcaaccgtcttccctcgaaggcggtgagccaccctacacctcacttcgccctgtacggcacaaccccttcctacgaccacctgcgcgtgttcggctgtgcctgctaccctaacatttccgctaccgcccctaacaagctttctcctcgctctactcgctgcctcttcctcggctactcccctgaccacaaggggtatcggtgcctggacctcacctcccaccgcatcatcatctctcgtcacgtcgtcttcgatgaagatgtgtttccccttgcaggctccaccccacccaccgatcttgactccctcctcgagtccgactcggtttcccccctacccctggcgcctcgtcttgcgccgttacctgctcctcgtgcagccacgacgccacagcacgcgcccatttccgtgccacgcgcggccctgtcgaccccgcctgcgccacgcgcggccacgtcgatcatgcctgcgccatgcgcggccccatcgatcctgcctgcgccacgcacggctccgtcgacctcgcctgcgccacgcgcgaccccgtcgatcctgcctgcgccacgcgcggccccgtcgatcccgcctgcgccacgcgcggccccgtcgaccccgcctgcgccacgcgcggccccgtcgaccccgcctgcgccacgcgcggccccgtcgaacccggctcgcttcgccaaccccacgctcgtctaccaccgccgcggccacgccactacctcggcgtcccccgactcgggcccgtcgacgagcgcgacccgcttcgccgaccccgccgtcgtctatcaccgccgcgagctggccacacccgccgctctcgacgttccggcggtccactccgagccgtccgtataccacccggtcgccatccaccgcgaccccggacacgtccacccgatggtgactcggcgcgccgctggcgttcttcgccccgtcgaccggctgatcctggcagctgacacgtccagcactccacccgacgcttccccggtgccctcctccgttcgcactgccctcgccgacccacattggcgtcgtgctatggaggaggagtacgcggccctcttggccaaccacacctgggacctggtgccgtgtccaccaggcaccaatgtggtcaccggcaagtggctatttcgccacaagctgacctcggatggctccctcgaccgctacaaggcccgttgggtccttcggggcttcacacagcgccccggagtggactacgacgagacattcagccccgtcgtcaagttcgccactgttcgcgccgtcctctccctcgccctctcccgcgactgggcgatccatcagctcgatgtcaagaatgccttcctccatggcactctgacggagactgtctactgcagccagcccaccggcttcgtcgacgctgaccgtccggatctggtctgccggctgaatcggtccctgtacggcctcaagcaggcgccacgggcttggtacagtcgcttcgcctcctacctggcctccatcggcttcgttgaggccaagtcggacacgtccctgttcatctaccggcgcggcgacgacaccgtctacctcctgctctacgtcgacgacattgtgctcacggcatccaccgccgaccttctacaccgcacgatcgtcgcccttcagcgggagttcgcgatgaaggacctggggcccctacaccacttcctcggcatcaccgccgagcgccggcctaagggtctcttcctccaccagcgccagtacgccatcgacatcctggagcgggctggcatgtctgactgcaagccctgctccacgcctgtcgacactcaggcgaagctctctgaggacgacgggcctccggtcgccgacacgacgtcctaccggagcctcaccggcgcgctccagtacctcaccttctccaggcccgacatcgcctacgccgtccagcaggtgtgcctgcatatgcacactccgcgggagccccatctcaccgcgctcaagcggattctgcgctacctccgcggctccctagactacggcctccttctccgaccatccccgacgtcggagctcgtggtctacaccgatgctgactgggctggttgtcccgacacgcgccggtccacctccggttacgccgtgttcctgggcgccaacctcgtctcttgggccgccaagcgtcagcccgtcgtctctcgctccagcgctgaggccgagtaccgtgctgtggccaacggcgtggccgaggcctcctggctgcgccagctcctccacgagctccacagtcccctccagcgcgccactctcgtctactgcgacaacgtcagcgcggtctacctctccaccaaccctgtacaacatcagcgcacgaagcatgtggagatcgacctgcacttcgtccgcgagcgtgtcgctgccggtgacgttcgggttctcagcgtccccaccacgctgcagttcgccgacatcttcaccaaggggttaccgtcgagtgtatttttggactttcgatccagtctcaacatctgtacaggatagagttgtgactgcgggggggtgttagatacccgtctcttgtaatgggcctggcccagttatttggtctattaatacactgcccaaccctattctagggttagggtttttcccattc

SEQ ID NO: 34485 - DNA, 1409 bp, Zea mays
  Clone ID: UC-ZMFLMO17273C07_FLI
gtttgctttcttcgataaacatttattggcaagacagatgaacctctcaattgacaagcgatgcaggataaataatttgtccacaagcatgattgcattaacccaggtgcttatgaaagtttttaccttttcttcaatatgaagtctgaatgtgtggtgtggcctgtctgatctatctagcaggtttagtggtactcacatcagctaaaccttaaacttgttttcttcttaatgtaatataattatacatggttctactacttgtttgaaaaaaacttaaacttatttctacatatggaatcactaaatggtcgtgttttccaatactaattgcagatcccttcgttttgataagtaaacatgagaccccttttgctaggatgtttgtatatcttctgttttaaactatattatgtaaacagtgcaagcgatgagtgaagggtgactaataggcttctttaatcagtgctgcagtatcttttgttgaattaacctatactcacttcattttatttatataatacagtccatttagctaattttgtttgatgtgcagtgacacgaccttgacagtcaagatgctctttcaggttattttctcctttctcctgaaaccacttcttttgccatctcctaatgttatggtcctagttacatctccattcattgcaggagatggtctcagttaacttacatggttctgttagacacaatgaagccatccagatatgcttttaaaaatcctgctagtcattatggctttaaagtgtaccatgtatgttctattttcagctaggcagagcatgttctatttacagcaggccagcagacaccaggcagtaaggtgatgtatgagtcaattatcaggtgacaaaatggttatgtttaatcatgcatgttatcttcctggctctctatgtttctttgaggcattcaactacttgtagtatcagtgcatcactgatatgtatatatgtgttgatgttcgtcatccaagatcaaatacatcctgctaggtcattacttgctaatgtgcatctgattttgctgttgctaggatggaaatgttttttggcagctttctcagtgaatcagtatcaccgcataacctttttggacacccagatgttgagagatgcccattcctgaggaatatcaatggagctacaaccttttcccctcacttctgctttgccagtagctgctcaaggaggcaagggtccaattttttaggaagggtcaggctttgagtcagcattcaagcttttccatggccgagatggaatagttcccctttgagaaagatcatatgtatctgatgaaaaccacaatttagagtacacttatgtatgagttatttgacaatacttatttatgagatattgaatgttatttatctatattatatt

SEQ ID NO: 34486 - DNA, 2175 bp, Zea mays
  Clone ID: UC-ZMFLMO17273D01_FLI
ctcgtccgatcaggaaggacggtggatgaaaaagcgccctgcacgcctgaacgatcggcattattgttcactatctccttttgttttccctctcccgtccatctctctcctctttggccttcctttccttgcgacgacgactgggacgaacgccccccgcgcttctgcaggcgagcaccccgccaccagtcggagatgaacgcgtccaggaaatccagccatctctccagcaaggacagtgcagagaccgcgagggatatcatcaccacgtccggccaaatccaacccctcaaaatcccggacgctgttgctgcgctcgcacaggctgctgcaaaggcaaatgatcttccagggtggccgttgttctcgcctcctaaggtgcagctggacaagtgtaccaagtgctccagagaattctgttctgcaatcaacttccggaggcacacacgtgttcatcgtagatccctcaagatagatagggattttccaaagaatagagaccttctcgctgcattctggaataaactcactgtggatgatgccagcaaaattttgtccttgacaggtgttgttattgagggtgtaactggttcatcaattttgacagcactgtcatcatggatgtgtaaaccagggtatgcttcgttgccagttgcatatgccagagctggcagtgagcttctggatctaattcaagcaaagccttcaatgcatctgcctgtttcatcggatgaactatttagtttgctcgatgaagcaagtgaaaaaacatttctttgcacaaatacagctgcttgtatacagaagtttttatttgatggagaggtagaaaaaaattgcaactgagttgaaaaatgttgtttcgttcgctagttacatgcttgaacaaaagctgcttgaagcatggtgtgctgataagactgctgaagcattaagatgccagaagttgctggaggatgaagaggaagctgctcagaaaaggcaagccgaactgatggaaaggaagcggatgaagaaacttaggcagaaagaacagaggttaaaaaacctcaaggatgaggatgcgacagttcaatcacctgaaatcatggatgatgcgacatgttctactgccattcaaagtgtgaattccatttatgatcctgactgttttgagcaagaagaatcgcagtatcttcaatttccagcactaattactttggaaactgacaatgattttaatgtggacctaccagtagaagatatcagttgtgatttggggcctgaaatggataaaggtgttgtatcaaggcaacaagttgtttcaaggcatcatttaggcagaacggagaagcttgctgaaagtagcattttatctggttccgtagttacttcaaaacattcagctttagcaaggccttcaaattacaaggatccaaatgtctgttctgcaccaagtagaaacaaaacttgtgaattgaaactacggtctgagattgaagaacagtgccagaaacatgagttagatgtagatgaacgtggcatgggtcctagcaaaaactctcgtgtgctaataggatctataattgtcgcaattgaagatggtagtgaacacttgctggacttaggttccaagaatgacccagtacctcccaatttaaagacaaagaaacatgcatcagtcaaggtggtgcaacaagttacccatgagggaaacagaaatgaaggtgttcctgatagtgataaccgttctagcctcagtgttactacagatgaaatcagttattcaacctgctgcgatgcagatttggcagtggatgaacatttacaatgcaccacgttttccagtgaagaagcgacagcctttctttctcaaagatggaaagaagcaatagccgccgatcacgtgaaacttgttgtgtcctgaaaactaaaggaatggcagaataaagaaattctgttgagggcaacagcatggaagctccggccgacttgtcgccggatcccacagccctacaacataggtggttcttatctagcctgcagggtgctatgaaagtttggatgtcaagtttgtgttgcggcatgaatggttgtaaaatggcaggtgcattttgcagctgatttgagattgaagcagagggttctagttttacaaggggacagcttgtgtgatgggatctgtttttggtaagg

SEQ ID NO: 34487 - DNA, 1309 bp, Zea mays
  Clone ID: UC-ZMFLMO17273D07_FLI
cgcctcctctccactcgcacactcgcaccctgcgtccgcctgccgcctaccccaggcggccccctcccatcgccatgcctccgttcgccgccgccaccgccgccgccttcctcttcccggccgtcgcgatcccctgccgcgtgttccctcaacggcgggcgaggagcctcgccgtccgtgccgtcgcctcccctccagccttcgcggtcaagcccgccccgctgccctccaagactggaaagtgggagtggaaattcgagaacaagccggtaaacatatactatgaggaacatgagcaggaggttgctgagaatatgaagaacattctcatgatccctacgatctctgatgtgagcactgtggaggagtggagggtggttgccaaagatattgttgggcggaaaggagaacttggctaccgtgttacaattgtcgattggcctggtcttggttattcagataggccatcactgaactacaatgctgatgtgatggagagctttctggttgaactaatgaattcaccaaacagtccagtcgcaaatgcagatgatgaactgatcattgttggaggtggtcatgcagcaaccatagctgttcgtgcagctggtaaagaccttataaaaccatctgctgttgctgctgttgcacctacttgggctggaccccttcccatcgtatttggccgcggttctgatatggaaactaggtatgggcttctacgaggaaccctcagggctccagccctgggctggatgatgtacaatgttctggtgagcaatgaaaagtcgatccagtctcagtacaagtcccacgtctacgccaaccctgacaacgtgacgccagctatcatcgagagccgatacgagttaaccaaaagaaaaggcgcacggttcgtccccgcggccttcctgacaggcctccttgatcctgtccaatcgagggaggagtttctgcagttgttcgccaagttagacggagacgtaccagttctggtagtgtcaacggtcaatgctcccaagagatccaaggccgagatggaggctctaaggggctctaaaggggtgacgaagtttgtggaggtcgcaggcgctcttctaccgcaggaagaataccccttggcagtcgcggaggaactctacagcttcctgcaggaatcattcgcagcaagaaggtgaatgtgcgtgcgtgcgtgcgcacaactgtgccagaagacaggttctcaagtcccacacatcgtgagtaaattcgttagcctgctacagtgtactggaggtttttagcaacaataaagcggcatcactcgttc

SEQ ID NO: 34488 - DNA, 1340 bp, Zea mays
  Clone ID: UC-ZMFLMO17273D12_FLI
tccagcgggtcaatcatcctgttagtagtctatatttactcatgcaaatttgttagtcatttttatgcattgtgatatggctgatattatattaacttgtcatttaaaagggaaatctggacaaggcctcacctaatgcaggctatgttttgctaatgttttaccacttgtatgatggcaagagtcgaagagaatttgaaaatgaactttatgaacgttttggctcccttgttaagatgcctctcctgaagccagatagagcgccattgcctgatgcggtgaaagccatcttagatgaggggattagcttgttcaagatgcatcggagcaggcatggaagagcagagccatcaaaaggttcatacgctaaagaatgggcacaatgggaacaaaggttgcgtgcgaccttgtttgggaatgctgatcatcttaactcaattcaggttccttttgactatgctgtgaaagcagtactggaacagttaaaagctgttgcaaagggtgatctcaaaacacctgatactgggaagcggaagtttggaaatatcatgtttgctgctgttcgattaaccccgcctgatatattgggccttctccgtaaggtggcagagaaggacacggctgtcgacagttttgtgaacaagataagactggaggacaacctaacgaaggttcacgtcacccttgcccacaaacgaggccatggtgtgtctgcggtcgcaagctatggcatctaccagcaccaggaagtccccgtgtcattcaacgcattgtactacactgacaagatggccgctctcgaggcacagctgggagcagtaaacgatgagccgatcaattccaggaacgagtggccacacgccactctgtggacggctccaggcgtcactccgaaggaggcaaacatgctgccgcagctggcttcagaaggaaaagcagaacgggtgccgattgaccctcccatcaccatatcgggggtggtggacttctactgatttgtctcctcggttttaggatacggatgtgcagaggtgaaggtggaataaagaataatttgctgctgcgggccttacgttattagctgattgtggacaagacaatcgtcgagtcttacaccacataaatttttgatactataggactgacctggactgctgcatttctacttccatgttttccaataagtgcaagataccatcgattttttaagccagcacttagcactagaggagataattatctgtatagcaagcacatcattctactttctagtgtatttttgaatttccagaggccgtttgacaggacagttgaccagaaataaagttcgtgttggtggt

SEQ ID NO: 34489 - DNA, 3345 bp, Zea mays
  Clone ID: UC-ZMFLMO17273E11_FLI
gataagaggtcgagatgctgcttttttgggcccagatgataatcaatatgctattctggaggaagatagaactggtctgaatctctttagtctcaaagctgtagctacaaaggaagctcttgaaaataatgctgctgtgcttgaagaaaacacttttgctgataatgctgctagtgctacctcaacggaacgtcaaggtcctctacagtttacttttgaatcagagggatataggctgtctgcagacaacgggctatccattacaacaaaaactgatgggaagaagtttattaagttgaaaccaaatgagactgttcttcaggcccactggcaaacaaccctaagaggtcctgtggtaggaatattgacaaatcagagggtgctaattgcttctgctgatcttgatatactatcaagcagctcaacaaagtttgatcgtggtctcccatcatatcggtcaatgttgtgggttggaccagcacttatcttctcaagcgcaactgcaataagtatgcttgggtgggacaacaaagtccgatcaatcctctccactagcttccctcgctcagtattacttggtgcattgaatgaccgcctactgcttgtaaatccgacggatataaacccaagacagaaaaagggagtggaaataagggcctgtttagttgggcttcttgaacctcttctcattggatttgctaccatgcagcaacacttcgagcaaaaacttgatctttcagaagtcctgtaccaaataacctcgaggtttgatagtttacggatcactccaaggtcattggacatattaactaaaggacctcctgtttgtggagaccttgctgtatcattatctcaagcaggacctcagtttacccaaatcatgcgctgcaattatgcaatcaaagctctccggttctctactgcgctgtcaattttgaaagatgagttcctgcgctccagagattatcctcaatgccctcccacttctcatctgttccagcgtttccgagaattgggatatgcatgtataaagtatggtcagtttgacagtgcaaaagaaacttttgaggttattacagatcacgagagcatgctggatctatttatttgtcacctgaacccaagtgcattgcgacgccttgcacaaaagttagaggaatctgctacagattctgagctgaggcgataccttgagagaatattaagagttcgttcgactggatggacacagggtgtattcgccaattttgctgctgaaagtatggttcctaaaggccctgaatgggcaggaggaaactgggagatcaaaacacctaccaacattaagaatatacctcagtgggagcttgcaggagaagtcatgccttatatgaagacaactgatgctggtatcccatctgttgttgcagatcatattggtgtgtacctgggtgtgatgaaaggaaggggtaatgttgtggaagtaagtgaaaagagtttggttaaagctatagctgcagctagcagtgagaacacacagccggtgtcttctgcatcagcagagaaaagtaaggcaattcctcgtggtgattcggttggtgatactttggcaaggcaactgggagtccagattgcatcttctgatgaacaggcaaaagctgccgaggacttcaagaagactttatatggtgttgttgatgatggaagtagtgatgaagacgagtcaacctcaaagactaaaaagatacatataaggatacgtgataaaccggctgcacctactgtagatgtcaacaaattgaaagaagccactaaacagctaggcttgggtcctccgctgagtaggacaaggtcattatcagggacacctcaagacttcaatcaggctcctacacaaccaggaggtccagccgcagctgtttccccagcaatgccaaattctgcgattgatttatttggaacaaatactttagtgcagccgcaagcaccctctagttccacaggtcctgttattgcaggcatgggagtgacggctgggccgatccctgaggacttcttccagaacactattccatcgcatcaacttgcggctcaactacctcctcctggaatagtcctgtcacggatggctcaacccgctcctggcattgaacaaggccgaccagtacctaatcaaatgatggctaatgttggtcttccagatggtggggtgccaccacaagcaccaccgcagcagtcccagtttcctccgcagcagtcccagtttcctcagcaaccaggcattcctatggattctattggcctgcctgatggtggtgtccccccacagagtcagccacttccttcacaaggccagtttcttccttcacaggcacagggctttcaacttggtattcctgctccatcacaaccaattgatctcagcgctctcgagggtcctggagcggcgaagcaagctgctcgccctccagcacctactgctgtgcggcctggccaggtaccacgcggggcccctgctgcagaatgctacaagatggctcttgctcatcttgagcagaatcagcttaccgatgcactatcttgtttggacgaagcattcttagcccttgcaaaggaccagtcacgtgaagccgacatcaaagcgcaggccaccatttgtgctcagtacaagatcgcagttgctctgctgcaggaaattgctcgtctgcaaagggttcaaggagctggtgctctcagtgcgaaggaggaaatggccaggctatctcggcaccttgcttccctgcccatccaggccaagcacaggatcaactgcatcaggaccgccatcaagcggaacatggaggtccagaactacgcctacgccaagcagatgctggacctcctctactccaaggcgcccccgacgaagcaggacgagctcaagagcctgatcgacatgtgcgtccagaggggcctgacgaacaaatccatcgacccgttcgaggacccctcgcagttctgctccgtgaccctcagccggctgtcgaccatcggccacgacgtgtgcgacctctgcggcgccaagttctcggcgctctccgcacccggttgcgtcatctgtggcatggggagcatcaagagatccgacgccctcgctggtgggcctggacccgtgccgtcacctttcggctgaaggtcgagtctgctcctttcgtcctccatcggtcctgatattgtatctatagtgttcagtttgcgttcattacattcgattcgttgcagcttgtattgtatgtagcctttttgacgtgtagcacgcttggtgttgagagcaatgtacacctgtactgttgggttggttgtgattatacacgcggttttttttgg

SEQ ID NO: 34490 - DNA, 1544 bp, Zea mays
  Clone ID: UC-ZMFLMO17273F09_FLI
caacgagttgggcagtatgagcataagggacgacaaggacgttgaagatattgtagtcaatggcaatggggcggagcctggtcatatcatagtgaccagcattgatgggagaaatgggcaggcaaagcagaccattagttacatggctgagcgggtggtaggtcatgggtccttcggaaccgttttccaggccaagtgtcttgaaactggtgagaccgtagctataaaaaaggttcttcaagacaagagatacaagaatcgtgagctgcaaaccatgcgagtgcttgaccacccaaatgtggtggctctaaagcactgtttcttctcaaagactgagaaagaggagctttacctcaatttggtgcttgagtacgtaccagagactgctcatcgtgtcatcaaacattacaacaagatgaaccagcgcatgcctttgatttatgcaaaactgtatatgtatcagatctgtagagccttggcatacattcacaacagcattggagtgtgccacagggacattaagcctcaaaatctcctggttaatcctcatacccatcagctaaaactgtgtgactttggcagcgcgaaagttctggtaaaaggcgaaccaaacatttcttacatctgttctagatactacagagctccagagctcatatttggtgctactgaatacacaacagccattgatgtttggtctgctggctgtgtgctcgctgagctgcttctaggacagcctctgttccctggagaaagcggtgttgatcagcttgttgaaatcatcaaggttctgggcacacccacacgtgaagaaattaagtgcatgaatccaaattataccgagtttaaattcccgcaaatcaaagctcacccgtggcataagatattccataaaaggatgcctgctgaagcagtagatctcgtgtccaggcttctgcagtactcaccaaaacttcgatcgactgctttggaagcattggtccatccgttctttgatgaacttcgggatccaaacacccgcttaccgaatggtcgttttcttccgcctctcttcaattttaagccccatgagctgaagaacgtgccggcggatttcatggtgaaattggtccctgagcatgcacggaagcaatgtgccttcgtagggtggtgatctctggataagaggatgacggctcgatgattagctgaggaccaagttactgtctgttagaaactgccggagatcgacattgccagatgtggtgtggtataagataggcaatacgtgtgattattttttgttcgaggttatcacccccccttgccccagaaaagatgagaagatgtcgatgtaacaagccctctgcgcttctgtaagtagatgagtgttgctgcatgccccctgggtacatgtatcggtttgagcagaattctgtttgcctgaatcgtgccatcaccacgcagggatccatcccttgtgtgaagatgttcagcccaacatttgtttatggattcaggctattcgttcatttgtactcctcgcatcatatggatgcttaagc

SEQ ID NO: 34491 - DNA, 2253 bp, Zea mays
  Clone ID: UC-ZMFLMO17273H12_FLI
caccattccttcctcccctggtcgcccccgcctccatggccctcgcgtgcgcgcccataccgctcccgagtccctagggcgcggcacgcacacttctcgcgggcgggggcgcgggcgcgggcgcgggcgggggcgcgggcgcgggcgcgggcgggagcaggcggcatggcgtcgcaggtcgctgggtcaaccccggcggtggcggcgcttgggttcctcctcccgaccttctgggagatcgaggtcacgtgcgccgccgcgatgatcctcgtggcgctttacgttgcctacgagctcctcaacccgcgctcctcgcaggcggcagcggcgggcgacgccgacgagctcctcgtgcgggggctggacggcgccgacaagttcaaggggggtgtgagcggcccctctgcctatgtagtgaagctcgaattgttggctgcaaaaaatttgatggcggcgaacttaaatgggacatctgacccatatgcattgatcacttgtggtgcagagaagcgtttcagctccatggtccctggctcaagaaacccaatgtggggagaggaattcaatttttttgttgatagtcttcctgtaaagataaatgtcacgatatatgactgggacattgtatggaaaagcacagtccttggctcttttactgttactgttgaatctgaggtaccgagtggaccaatttggcatacacttgacagcacatcaggccaggtgtgtcttcatattaaagtaatcaaggttcatgaaagttcctccagggcaataaatagctcagctgaggctggtgctcgtagaaggatttccttggataagcaaggtcctactgtagttcatcaaaagccaggtcctttgcagacaatttttgaactgcctccagatgaggttgttgaccacagttattcatgtgcacttgaaaggtcatttctgtatcatggacgcatgtatgtctcttcatggcatatttgctttcattcaaacgtcttttcaaagcaaatcaaggttgtgattcctttgagagatattgatgagataaggagaagtcagcatgcagttattaatccagctattacaatttttcttcgaatgggagctggaggatttggtgttcctccattaggatgtccagatggaagagtcaggtacaaatttgcatcgttttggaacagaaaccatacatttagagcattgcatcgagctatgaagaatttcgtaatgatgatagaggctgagaaacaggaacgtgctcagtctgcattacgtgcacacagtagttcaagaaaaaatagcaagaaggagataaatgtaccagaagattgtgctgcattaacagggcagttacaaccttttgtcaaagaagaagttttggtccctgtattcaatggaacttttccctgtactgcagaacagttcttcagtattcttttaagtgatgattcaaattacataacagagtatcgaacggatcggaaggataaagatataaatctgggccaatggcacgttgcagatgagtatgatggccaggtgagggaacttaattgtaaatcaatatgccatagtccaatgtgtcctccttattcagcgatgacagagtggcagcatatagttctttcagctgacaaaatggatctggtatttgagacagtacagcaagtacatgatgttccatttggttccttctttgaggtgcactgtaggtggtgtgtgaaaactatcagttctaactcgtgcagtctcaacataagtgctggtgcgcatttcaagaaatggtgcatcatgcaatctaagataaagagtggtgctgtggatgagctgaagaaagaagtgaaggtgatgttagactttgcgcaggggtatatgctcaaagttagctctcctgaccaagagaacagtaacctcgcgcagcaagacaacacggcgccggatgcgccttctgatacagggtgacagccgccatcacatgacaaggaatcatgccattacgatgttatacacagaagggcaggtggaccagtaactagtagtccacatgaaccacatctaacatgttaagctgacttccaaaagaatgggtggaccgtgtgtagcgtgttaagttcgtttcctgccattgctctatccgtttttggcagtttggctgatgtatatatatagctgtaaacacacgcaaatataaagtggtggctgtggcaggccagtgtgttgtttgagtataaaaacaaagaaagaaacggaagagag

SEQ ID NO: 34492 - DNA, 977 bp, Zea mays
  Clone ID: UC-ZMFLMO17277C02_FLI
cccttccctccctccctctccccgcgggccgccagaggcaatttcgccctcgattcgaccccgattcgtccgcccgcgaccgggattccctccgccaagcgcggatctgaacgctgcgctccgtgtcgccgctcgaatccgccatgaagggggccaaatccaagggcgccgccaaggccgatgccaagctggcggtgaagagcaagggggcggagaagcccgccaagggcaggaaagggaaggccggcaaggaccccaacaagcctaagagggctcccagcgctttcttcgtgttcatggaggaatttcgcaaggagttcaaggagaagaaccctaagaacaagtctgtcgctgcggtggggaaagctgctggcgacaggtggaaatccctgagcgagtcggacaaggctccctatgtagccaaggctaacaagctcaagctcgagtacaacaaggccatcgctgcctacaacaagggcgagagcactgcagctaagaaggctcctgccaaggaggaagaggaggaagatgaagaggagtctgacaagtccaagtcggaggtcaatgacgaggatgatgaagagggtagtgaggaggatgaagatgatgacgagtgatggagctcctcgagacaatggaccgtgcttcatccaacaatggagcggctacacaaggccccgtggcgatcacaaaaaaggagcctatatccatgtactagaattattcagtttcactccacatcgtgatgttttatttttacttttgtcgtgctataacggatagcgctcctcgttggcgccactggcgggtggttctgcctctggtctggtgtgtttgtgtgtggtcacacttgccagccagcagaggcgcctgcttgtacctagattactgtttccattgtcgtcatcatcggctaacattgtcataatgtcagtttgggtaatgttagattaagtaattattgtgttctgtattct

SEQ ID NO: 34493 - DNA, 690 bp, Zea mays
  Clone ID: UC-ZMFLMO17277D05_FLI
ccgagaagcaagcactgcgccgaacgagcagcgagtgtgttgaggcaggcaggcagtcagtgacagtgggagtaggagacaaggctaccgagatgaagggcctctcgttgctcgtcctcgccctggtcgcgtccgctgcatgcctcgtggccgtccgcggcgcgggcgagtgcggggcgacgccgccggacaggatggcgctgaagctggcgccgtgcgcgtccgcggcgcagaaccccagctcggcgccgtccaacggctgctgcacggcggtgcacaccatcgggaagcagagcccccagtgcctctgcgccgtcatgctgtccaagacggccaagaagtccgggatcaagcccgaggtggccatcaccatccccaagcgctgcaacctcgtcgaccgccccgtcggctacaagtgcggagattacactctgccatgagctgcgcgagagctgcttgagcacatgtgcatgatccgtgtcggagttagcacgacgtccgcaggaagtgacggtgacgtgtcagtgtatgtgtgcgttggtaataaacgtcgcggcacttgttgtgattaccatacatgtggaagtccagtatgatatgagtgtctcgtatcgtatgtaagtgtcagggttccagagatgctgtcctgcatcctcgaaataaaacttgtcttcttggacagatttggtt

SEQ ID NO: 34494 - DNA, 1918 bp, Zea mays
  Clone ID: UC-ZMFLMO17277E04_FLI
cctctgctgaaaagtgtacaatggcgtcaggagccaccttaagctgggttaaaaccccatttgacacccgaagatttcatgacctatctagtctaagtttccgctgccgaaacccttttggatcaattcagccctggtggctgcaaactgatcaagactcatccctaatcaaggttcgtgtggctgctgattattcagactcaatgccagattcaaagtacacgagagatcggggttatcaccctcttgaagaagttaaagagcgtccaaagaagaaggacctgttgctgacagatattgaaacagctagaacagtagtagaggcaaatagcaaggggttgcttgtatttcctgctagggtacacaatgaacctcatggacatgtttcttggtcggagtttcaatatgttgttgatgaatatggagacattttctttgaagtacctgacagtgagaacatcctggaagatgatactgcaaacaatcctgtgacagttttgattggaatggatggacccattattggagaaagtagtgtggcgattagtgatttcagtgattacatggatggtgaaaattttatggacgttcctgatgagcaccacaccaaggtttgctaacaagttattttccctgctttcatcagattgatacagaaataactgatattctcatagagtgggggatgccttcaacaatgcgtgcaatacatccgatttactttgccaaatgtttgacaaaggccattcataataataatggggagaagatggatagtccatcaaatggtctctctattgtaggatatctgagacctgctttcatagaggaagagtcttacttgaggagcatgtttcatggtgacaatggtggttattcatctgactggaaagtaaatgaaaccgatgaatacaacagagacactcggccagtttcgggaaccagtcgcctcattgatgatgataaatcaagatttgacttcaatcatgctgaaactagaactgattcaatgatctacaagctggagataatgacaattgaactgttttccatgtatggaaagcagtttaagattgatccacaagattttcaagattcagaaccagatattcttgcaaattctgcttcatcgataatagaacggatcaaagaaaacagtgatcagtgtgcagcggctctcaggtcgctctgtcgccggaaaaagggcctcactgtcgaggaggcaagcttgattggtgttgacagccttggtattgatgtaagagccttttctggcttggaagctaagactgttcgattttcattcaatgcacaggcgctctctgaacgttcagctgaaaaaaagatcaggcgaatgcttttcccccgttaccagcgtaaaaacgtgaaagcctctactgaagatgagtcttaacctatcagctgtttttcctgagcaagcatgcaaacacctggttcaaagactgtgtcaagggaatcaacacaatatcatcttatgcgagtttgctaggagatagcgcacaacctgtcgactatgaggatgaccaaaagcatcagagtaataaggtttgccatgcatggtctctaacatgcttccaagaatatagtttggtttctaacagataataaaaaaacgaataaggtgccagttcgtgtataaaagatgaactgcgactttatgctggcggaaactgattagctgaccaagctttgtcagctacaaattcccagtaataataacgactgcgaggtgaaagggcagagtaataaggtctcgttggcctaaatcagttcttagtttcttacccgcaacctgtaacttaactttgttgtccttttcatgtagacataaatgtcatgtaacgcaactgcgattatggcattgttttgttgaactatacataaaagaaaacttgat

SEQ ID NO: 34495 - DNA, 1620 bp, Zea mays
  Clone ID: UC-ZMFLMO17277G03_FLI
agatgttgttcgaggcgttcccctcctccacgcaaccttctcccctccagatccaggattgccgggctccttgactcgttacctcgcgcgccctcggtgagctactttgtttcgatttagcgacaaatcagtttgcttcatgttgcgcaggcttagatctgaatgccggattcttcgtcttacggcttgaatcgagctgggaggctgtggatctgagcacgggaggtacaacaaatccgcgtgtatgacgagttggatcggcaccggttagtctctgaccgcaagattttgttgttgtgttgggctgatctgccgcgttgttttgcttcaggttctagagctagcgaaatcgcaaggctattagggttcctttcggagcgcgtctgaagcgatgatggctgaagtcggcggtgggatcgggatcttctctgccctgctccactcgggatgatgaatctgctgcgctgataattattggatgaatttcgataattattagatctaagagatgcgccgacttgaagaggcgaggtaaggtgcaacatgtataagacgtgacatgctatagaggcctttgccatggtgggtgcgctcgcatggcaggccacggtaataaaagaagatatttttgtgtcctgggggtggagatcgcacgggggattgttttttggccccgggttctcctccctcgtggtgttccgtgtccctatgtgcattggtctttgcgtggtttgcgatctcagctcacctacacgcttcggatttctgcatctaacacggagatctacaacaaaaacaaacatggagctacaacgagattcttaaggtacaatcgttaatttactgtaacaattaagtttcttttctcatctctgacgccacacttgtatccttatgttctctctctgcacattcaaagaaaccgttaaacccccatgaataatgacattcgacgtccactttgcccagctgtgttgaatttaatagttcaacaatttcagactcccatgaactcagtgaaacaagcgttactgatgtcctaagtgaaattttatgtcgcacttaagatggcgctgcgtctttatttcgttgtatattttattttcaacaactccaatctgattatgtcgtggcatttcatttgtatttatcatgtcaattgggatatttggtccttgtaagcttttggcatgtttgttagttaagccattgcaattgttggacttgtggagggttgcaaaatcgcagtgattctactattcatcatgtcatcatgtgaaatcttctaccacggagcacgtcaatcgtggctgggctgatggacgactgtgctgatggaactgattcgttacgtgggttgaagattttgtgccaaatatgcgatctggttggttactccgccctgctgacgttgttttagcccaggtgtttctgctgctcattccttgcattttttatggcactgtacatacaattggacaacctaatttttggcagttcaactcatttagaagttagaagggtttgagaaacattctcccctagaaatacatggaggtgtatctgatgattgttttttttgttacaaagtttcctagtttaatttgtatgatattctgg

SEQ ID NO: 34496 - DNA, 908 bp, Zea mays
  Clone ID: UC-ZMFLMO17277G04_FLI
cacaaactcacgcctaataacactacacaaccagctataggggcctaccagctttgtcaagggctgaagaagaccatggccagagccatcgtcctcgccgctcttctcctcgctgccactgccagctccacgacggcgaccacgctgaccatccacaacctctgccctcacccggtgtggcctctggtgacccccaactcaggcctcccttccatctccgacaacaccgcgcgactagaccccaacgcgctgctcaccctctccttcccgcccaccttctgggccggccgggtggccgcgcgcacgggctgcgacgccgccgcgtccggctgctggacgggcgccgcgccgcccgccaccgtcgtgcaggtcaccgtccacgacggcacgaaccaggaccaggccgcctacagcgtcagcctcgccgacggcttcaacgcgcccgtggtggtcagcccgcaggcggccggcggcgggcagtgcccagcgctggggtgccccgtcgacctcaactgcgactgccccccgcagcagcgcgccgccgagggcgccgcgtgccgcggcccgccggagtacttcaagagccggtgcccgctcaccaggaccacgcccaccgacgtggagcccgtgccgcagagctgccgcgcgccgggcgagctcaaggtcgtcttctgccaggcgaccatcgtcacaggcggtgtcgccgctgccgccgaagccgagatggccatccgaaccgtcgtcgccgacagctagactactggccgagacagacgtccagctccactggccccgcttcgttgaatcgttatttgtcacgctttttgctttcgtgtgtttgttagcttaggcttcgacgcgtgtaacccggtggtttttaagcaaaatttcaagtttaaattcgtatt

SEQ ID NO: 34497 - DNA, 3532 bp, Zea mays
  Clone ID: UC-ZMFLMO17277H01_FLI
cacggccctgccagcgatggccacattggcgccaccggcggtggaggtggagccggaggccgatgccatggccctggcgtcggaagccgcggcgcctgagctcccatcgtcgcattcgcagctcgattttttcaagaccagagttcaattattgtgtgaaagtaacacgagagattttgatgcttgggtatcattaataaatgctgcagagggaacatcagcagatgacatagaagttatgagcttggtataccataacttcttgttggaatttcctttgtgctacggttactggatcaaatatgcagctcataaggcacgactatgcacaaccagatatgtaatggatgtttatgaataagctgtccatgctgtacctcattctgttgatatttgggtcaactactgtgagtttggtatatgtgcatttgaagaacctgctcatgtcagaagtttatttgagagggctttatctcttgttggaaaggactatttgtgttatcacctgtgggacaagtatatagaatttgaaagctctcagaagcagctgattcatcttgccaccatttttatcaacacactaaaatttcccacaaagaagttgcacatgtattatgaaagttttagaaagtttgtaacattattggaacaagaggtgacaagttgtgttgctgaaatattatcagaaaaagtgcatgcttctgaaatggtaggcactgaaggttctgaattagatatatcaactattattgctgacttatttgaccaaaaaggtgggcatcttagtcctgaagcattgaagcattacttatctgctggggagaagctctacaaaatgtccagcaagatttacaaagaaatctgttatttcgaggcatccataaaaaggcctttttttaatgtcaagacacttgatgatgatcagcttgaaaactggcaccagtatcttgactttgttgagaagaatggggattttgactgggctgtaaaactttatgagaggtgtttgatcccttgcgctaattattcggaattttggatccgctattcagagtatgttgacgctaaaggtggccgagaaattgcaaaccatgctctgggtcgagcatcatcatgttttgcgaaggtatcacttggtaacatatttgacattttacaccttcccatagttttgaaattgtgtaaggaccctatgtccttgtgtgttatgtgcatggttggatgtggatctaaggacgaagggtacaatacctgctctcatcttactgctggcatgggcaacagagctcctccgtgtggcagtcgcttggaggcatggttaaggagggagagaccagataacttctttatatatacaaaaatctcttagcaatatttgaatatatatgataacttatacaattcacaacccttttgttgccaaaattaatcatttgtgttgtgaaaatatgcatgttgcgttaggtttgttgtcatacaagaagggttctgagtccagaactatgcataggtgataggctaggggtagcaccaattaaaaaaaggcttgttcacactggttgagatggtttggacatgtccaacagagacctctagaggcaccggtgcgtaatgggatcctaaggcgctataacaatgagaagagatgcagggagagtctaatgttgacatgggaagtgacaataaaagaaggcttgaaaggatagaatatacccaaagatttagctttgaagattagtacatggaaaacaactatccatatgcctaaatcttgacttgtggttccgtgtttctgtttttttccttctgtcttctgttatggttcctttttatataataaaattgtgctgtaggggtttcccctatagccttttcccttaaaaaaaactctagcgtatcccaacttacttgggataaaaggcctttttgttgttgtatagaaacagtcataagaactgttggaaccagggatttattgctcagaattgaaagattacagaggaagggttgggggagaattatcactcagccgcctatggctcggtaatttcttctctgccttacatcctgcatagaggcctctatttataggctggacagatctacttcacccctaagtaatccccctaaaacaaatcctaacatcccaaatatgatcctaactgaataggaaactatctcaacataacaggaaacaatctgaacaaactaggaaactatccctgttttttttctttcttcctgctactgtagctcgcactgctcacgtggtgaccagatctggtgccacctgaacctccccttgtgccggctgggccctcctaggcttggccctgtgctaacgcatgcacaacaagaactgtgacttttgatcactaatttctaatgtaatatatctctatagtaccgtgatactacttttcaagtccaatgtactccctcagttccgttatacagggcatgttcgcatttttgcttttggccatattactaggcaggttaaagtattgaggaggcaggtaattgctcaagacagctgaagcctcatgcatgcatgggggcctagcaccgaagtgctcgatgctctcagaacaagttgatttggtggaagagttagggaagagtttacaaacacaggctgagtactgcgcaagaaacatactgtctccactagaacagtggtccaggctcttgaaggatggcattggatcagtgacatcttgacacctctttcctgggctgggatccaacagtttttgctgttatgggatgctgtaagaagagtagtgttaacacaggaggctgatacacatatctgactgcatacttcttctggtcaattctcctccaagtcttgttacaaggccttttttatgggatccattacttttgaaccttggaagaggctgtggaaatcttgggctcctccaaagtgtaagtttttcttgtggctggctattcggaataaatgttggacatctgatagattggaaaggagaggtctggaccacccagagtcttgccttttatgtgatcaatcacaggaaaccatccagcatcttttgtgtacctgtgtctttgcaagacatttttggcattccgttcttttggccttgggtgttggtaatctctctccgtctggagatgagacctcctttgccgattggtggcgaaaatcaagtaagaagattcataaaagcaagagaaagggtatgaacaacatcatcattctgggggcctggtgtttatggatccaccgcaacaaggcagtcttcaatggggagaccccttcgctgagctctatcagatgcgtctttcttgatgagatgggatgttggattacgactggagctaaacatcttcagagtttcgacattgagatcacgcgtaacttacacagggcctaatttgttgggggaggatgtagtgtgtgagtgggtgttttgttgggcctgttcagggctttgtaccttggtccattttggaccttttcttctctaattaaatgatgcgcagttctcctgcgctttcg

SEQ ID NO: 34498 - DNA, 1860 bp, Zea mays
  Clone ID: UC-ZMFLMO17277H04_FLI
cctgttgtcccggcttttagacgcaacttccatcgctgcgaagctatccattcgtgttcgtcatggccgccagcgtcaccgtggaaaacctcaaccccaaggtcttaaaatgtgagtatgcagtccgtggggagattgtcatccatgctcagcgcctgcagcaacaactacaaacacaaccagggtctcttccttttgatgagatcctctattgcaatattgggaatccccaatctcttggtcagcaacctgtgacattcttcagggaggttcttgctctttgtgatcatccgtgcctcttggaaaaagaggaaaccaaatcattgttcagtgctgatgcaatttctcgagcaaagcagattcttgcaactattcctggaagggcaacaggtgcatatagtcacagtcagggtatcaaaggactgcgtgatgcaattgctgctggaatcatgtcacgtgatggattccctgcaaatgcagatgacattttcattacagacggagcaagtcctggggtccacatgatgatgcaattactgattaggaatgagaaagatggcattctgtgcccaattcctcagtaccctttgtactcagcctccatagctcttcatggtggagctcttgtcccctattaccttaatgaaaaaactgggtggggtttggagatctctgatcttaagacgcaactggaaaatgctcggtcaaaaggcattgatgttagggccttggtggttatcaatccaggaaatccgactgggcaggttcttgctgaagacaaccaatatgatatagtgaaattctgcaaaaatgagggccttgttcttctagctgatgaggtatatcaagagaacatctatgtggacaacaagaaatttaactctttcaagaagattgtaagatccatggggtatggcgaggatgatctccctctagtatcgttacagtctgtttccaaaggatactatggagagtgtggtaaaagaggagggtacatggagattactggcttcagtgctccagtaagagagcagatctacaagatagcttcagtgaacttgtgctccaatatcactggtcaaatccttgcgagcctcgtcatgaatccaccaaaggctggggacgaatcatatgcttcctacaaggcagagaaggatggaatccttgagtctttagctcgtcgtgcaaaggcgttggaggatgcattcaacaagcttgagggattttcatgtaacaaggccgaaggagcaatgtatcttttccctcagattcatctgccacagaaggcaatcgaggctgctaaagctgctaagaaagcgcctgacgctttctacgctctccgtctccttgaatcaactggaatcgtcgtggtccctggatctggatttggtcaagttcctggaacatggcacatcagatgcacgatcctgccgcaggaagacaagatccccgcggtgatcagccgcttcagggctttccatgaggcgttcttggccgagtaccgcgactaaactgttacgctgtgtgtgagttaagttggaggttcagtagaactgtagaagagctcagtgacagcgcagaaagaggcagtgttagaaaggcttaggtccttcttcacaggagcaacagttgtcttgtctccatcaaggagaaataaaaattttagttttacaacttctcattgacactgttgggttcttgacatggtagagaattgtgtgcactgtgcctggcactgggtcctactagcggcgcaatttaagcgtgaccaggatggcgccatcagccatctctgtcgatattacactgctagctgaaaatgccacttggtccctttcaggtgtttgtggaccaaaacct

SEQ ID NO: 34499 - DNA, 696 bp, Zea mays
  Clone ID: UC-ZMFLMO17277H08_FLI
cagattccagtctgtagcctaccttcagcaaatctggtggtttgaggtggttggtgaagtcgatttctgcttccctgttggaacatatagcttgtacttcagggtccatcttgggaagttctacagacgatttggccgccgccagtgcacctcagagcatgttcatggttgggacaagaagcctgttcgcttccagctatcgacctctgacgggcagcaggcattgtctcagtgctacctggaggagcccgggagctgggtcctgtaccatgctggcgattttgtggcctcaaagcctgaccagctgatgaagctgaagttctccatggcacagatcgactgcacgcacacaaaaggcggactgtgcatcgactcggttcttatctatccaaaagggaaggggtttcaccaggagagggtggtcaggtctcagaaatgagggttgtagatgttgtggaggtactcacattaggatgttagagcaaatgcagcttgcagcctgatcttatttttactttgggctctagttcgcagcagaggtgaagtgtatgtggttgtagaactcaggtattgtgtggtcaggtgaccaccagagtgctctgtcagtcctttggcaaggtcgttttcgccccccttcagctgaatttggacagcgagatagccatgaaactgtactgaaatgagttcgaaggtgcc

SEQ ID NO: 34500 - DNA, 1338 bp, Zea mays
  Clone ID: UC-ZMFLMO17278A05_FLI
acgggacccactcggcgcagaccgacatgtcggtggcgtacagcctggaggagtacgcgggcgccgtggtggccgccgtgggccgcgtgtgtgaccgcaagggggtgcagcaccccatcatctgcagcgagagcgggcgcgcgctggtgtcgcaccactcggtcctggtgttcgaggccttctcggctacggcgccgggacgcctggacgcggccacggcctacctcctcgacgagctcacggacgactgccgcgccgactaccgcaacgtcatggccgccgccgtgcgcggcgactacgacacgtgcggcctgtacgccgaccagctgaagcggcggtccgcggagctgttcaaggagggggtccttggcctggagcacctcgccgcggtggacgccttctgcgagctcgtcgcccgcggcatgggcgcgcccgagccgccgcgcacctaccacatcaacctgtccgtgttcacctccctgccggacatgtgggccatcgggcagcagttccccatcatcccgatccagcggctgcaggagcgacccgccgtcgacggcgtgctctcggacctcacctgcgacagcgacggcaaggtgagcgagttcatcggcgggaggcacagcctgccgctgcacgagctgcccacccacgccacccgcggctactacctgggcatgttcctcgggggcgcctaccaggaggccctcggcgggctgcacaacctcttcggcgggcccagcgtggtgcgcgtgtcccagtgcgacgggccccactgcttcgccgtgacgcgcgccgccgcgggcccgtcctgcgccgacgtgctccgcgcgatgcagcacgagcccgaggtgatgtacgaggtgctgaagcagaggaccgacggcgccacggccgccgccctcgcccgggccttcggcgcaatgccgtacctggtgttcgaccccgaggccgccgtgatgtccggcggcgagagcagcgactcggagcggtcggccgccggcgccgccgaggaggaagacgatgaggagtgggagttcatgcgcgggctcaccgtctgatgacgtgcccgcccgcccgcccgcccgccccgggtgaaacaaggcgagtccgtcgccaggaagttgtcagtggccggccggcgttggtttacataataacccccaccgcccggtgttgtatcgtgtcgtggtcgtagtcgtcgggtgtctcgtcgtcgccggagttgtttggcgccacctttttattccgaacgcgtcagtgtccactgttcgcctttcctttttttctctctttcatgggaataatctgaaggaaactaatagcaagtttctctgc

SEQ ID NO: 34501 - DNA, 805 bp, Zea mays
  Clone ID: UC-ZMFLMO17278A06_FLI
gacccctttctggattgatggttccaaggttggtgtctatggaaagcctgcaaatgaagattttgaggcagataatgcccactggaaacgggttgtaagtaaatcgtatgtgaatggcatgggaattgactggtccaaagtgagaaatgtcatggacatgagagctgtctatggaggttttgctgcagctctgagggaccaaaaggtctgggtcatgaatatcgtgccgatcgattcaccagacacgctgcccatcatctacgagcgcggtttgtttggcatgtaccatgactggtgcgagtctttcagcacttacccaagaacgtatgaccttctgcacgcggaccatctgttctcaaagctcagaaagagatgcaaactggctgcagttttcgccgaggtcgaccgtgtactgaggccacagggcaagctgatcgtgagggacaccgcggacacgataaatgagctggagagcatggccaagtccgtgcagtgggaggtgcggatgacctacaccaagggcagcgagggcctgctctgcgtcgagaagtcgatgtggcggcccaaagaactcgacgctagcacgtgaactgtgttgaggaggaactgctaccacgtaggggtgaaattagaggaattttgtcttctagatatgcgtatggctcttgttggtgctgaaaggaccagaaaatatttggtgtaactgtagaacaatacatctgttttttctgccgtttgttttcgtttttgttttttcacaacgttgctgtaagttagtgctggaaatcacaggtacattcagttc

SEQ ID NO: 34502 - DNA, 683 bp, Zea mays
  Clone ID: UC-ZMFLMO17278C01_FLI
ggaaactttatgatgcctatgaatatgaatcagcctttgatctccaacgcaccattcaattaccctctccagcaagatggaaaccctcagtacttttctgcccctttccagatgccgccgctaccagatactggatcagaccaaggttccatgtcaagtgtccagcctccagttggccctatgagcttccctgaggggcttcagcgcccatgggctatggggatgatgggtaatccatttcacccgatggcccttggtcagggaatggttgatggtgcgggtgatcctcagggtggtggtggccttgccttcatgcaagctggttttgggggcatgcctgatggctccatgaatacaggcatgcccgatagaggtgatggaaggggtgttcgagcacagatgcccacgccaatgcaaatgcagatgtcacttcccccacctccgcctacacaacctccatcaggctcgcagcaaacatttaacaggacttgatatattttgttttgcacgaattgatggttcctctcaaaattccatgtcaattcattgaggaaactgtaattttatcgtcgttggcatgtaacctgtgagaactagatggctcagttctattccctggtttgataggagcctgtgtattatgctgtaactgtcctgtttgaatgaagtgttcccaagttacg

SEQ ID NO: 34503 - DNA, 813 bp, Zea mays
  Clone ID: UC-ZMFLMO17278C10_FLI
cctgtgaggcctttggatgaacaatcttcagatcacaaacctggatttacttccaacataacgaaaacaagtaatgttgaatcagtgttgccaaatagcccccaaaacagacctttggtcatattgggtctacagttatcaaagctttctgtgaaaaagactggctacttcagtgacaagacagaggttcagaaatcttcgactgttcttggatatgctgctcatgcagtctccctcattgcatcctatctcaatgttcctcttcggtatcctttgcgctttggaggttcacggtcatatgttctcgaccctgcgccttcagttgagccatcatctataacctcagtaggaacgtctgtccctcccagcacaagcatgaggacaacggagttccctctgtttcttgacagccaggagacaacaaggtcatcatatgcgatattcttgttgaacaaggatatcgagcaacttctgaattacattggcgctgaaagcctcgggccaagacatgtcctagcaaacctgaagcagctgacaacgatcatccagtcacaaggatacatttctgatggttagtttaacccagatacagttttggtgctgtgagtttagtccagaagacacaggcacccttttttttaacccccctttgagtcttgagtcttgacacacaagagttggtcgctgtctctgtgctgacacgctcattgtaaatgagcaaaatggagtcactaccaggttgtacaggaaagatgtggatcatactactgtactgtgctatatacgcagcaaccggaggcgcttgttcatggg

SEQ ID NO: 34504 - DNA, 1237 bp, Zea mays
  Clone ID: UC-ZMFLMO17278D03_FLI
ccgaaacaataaatttcactcttgtgaaagttgatcttaagcccagacatttgttcaaaaagacaaagaatgaacttaagatttcttgcaccttccaaacagtcttgaatgaagaaaatagtgtcatcagcatattgaaggcaacaacaaccattccttatgattatatgatatgagaaataagacctttaataaggccctcatcctgagctttatgaattaaacaagcaagaccatctgcaaccaaattaaagagatggggagagaaagggtccccttgtctcacccctttgtgagttgtaaaataggggcccacaacatcattagttttgatggcgactttgcctcctctaacagttctcataacccaatcacaccaagtgctcccaaagccttttttctctagcatacagtacaaaaaatgtcagttaactttatcataagctttttcaaaatcgattttgagaaccactccacctggctgcatgggctgggcatgttgatgttgtgagatgtctttgcaagcacaaagctgatgtgggagctgcagcaatggacgacactgcagcacttcattttgcttcccagaaaggccatgtagaagtggcccgtgagctgctggcatctggggcctctgtgaaagccaagaaccggaaaggcttcacggcgctgcactttgctgctcagaattctcacctggatcttgtgaagtaccttgtgaagaaaggtgttgacgtcacagcaaagaccaaaggtggtcagacagctctacatgtcgctgaggatgatgaagtgcgtgcgttcctgaaggagtgcgagcaatccttgaagaagggtgcagagctaccatcggagaaggatgattctgctgagaaagagggcgatagcaagtcttcaggtgaggttatgaaagatgaggaggatgcagagcagggcgagaagaggaaaagcgaattggttggtgcgtcgagtttgtcaggagtaaaaaaagccaaagtttctcttggtcatctagtttgtgaaaatgacatggacgaggaagaggagtgatttcgagcagccttgaccttgaggatgcaatagaagtgcacttagatggttccacttccacctgcacctgtgtgttttgttatgctagtcttagtctgtacggcgatcttgaatgtaaagacaagtacaaagttgaatgtcagttctcatgtgttgcatgaatgaaaattctaagggcttgtttggt

SEQ ID NO: 34505 - DNA, 1247 bp, Zea mays
  Clone ID: UC-ZMFLMO17278E07_FLI
tgttcaatgacttgtgcacataaactacctttgagctgaaactccaggagattcttaactattgctgatattttgtcattctgatgatttttttccaaattaaggcaaagttagaggcttcttccctggacaaatggctattaatcaatttgcagtcgacagcggaatttagctctcacatgcttaatcgagacacttggggaaatgatgcggtggctcagttgattcggtcaaattttattttctggcaggtttattatgacaccagtgaggggaggaaggtatgcacgtactaccatttggtgtccatgcctgctattctcctaattgaccccgtcactgggcaaaaaatgcatgcttggaatggaatggttcacccagatcgtttacttgaggatttactaccttacctggataaaggtccgaaggagcaccatgcagctcaacctcaaaagcgcccaaggaaagttgatccggaagcttctacgggcaagcaaggcaaaatagctgtagaggatgaagatgaagagctagcacgggcagtagcagcttctctagaggagagtaaagaagtcattgaagcatcagacgccagtgatgacatggttgaagctgaacccgaggaggaaaatgagcccaccctaaacaccaagcctgattaccctcctctccctgaagaacctacaggaagcagggaccttctctgcagggttgcgattcggctaccgaacaaccggaggatccaaagaaacttccttcacacagatcctatcaagctcttgtggtcattctgcgctcctcaggtcgaggacggggagaggagggctttccacttcgtccaggcaattcctggggcatcccagaaactggagttgggaagcgacctaacattcaaggaagccgggctggccaactcgatgatcaacctcttgttggactgagccgcccgctctctcaacctgcactttgagatgagacgccgtcggccggtcgaggggtttgtatttcaggatgggcttgaagatgatggtgcgcttgggtatcttctttccttgaggattaactcttatcttttgctccactggagctaggagtccgaggacaaaccaaaaaaaaaagtctggtgtgccctgagctgtttgtgtgtggaaatggtccttttgtcgttcgttcttgtgtccgtatacatcctgtccccggtagggcttaactctatttaatgcacatatctatgaaagattcagtct

SEQ ID NO: 34506 - DNA, 2268 bp, Zea mays
  Clone ID: UC-ZMFLMO17278F06_FLI
gctcatctaaacgctaaaaagatatgccacatattgtatcctggggatgaatcactagaggggaaagttctccgcttgaagcaacaatatacattgtgttcagcctcactacaggacatcattgctcgttttgagagtagagctggcgagtctctcaactgggaggacttcccctccaaagttgcagtgcagatgaatgacactcatccaacactatgcattcctgagttaatgagaatactgatggatgttaagggattaagctggagtgaggcatggagtattacagaaagaaccgtggcatacactaaccatacagtgcttcctgaagctctagagaagtggagcttggacataatgcagaaacttttacctcgacatgttgagataatagaaacaattgatgaagagctgataaacaacatagtctcaaagtatggaaccacagatactgaactgttgaaaaagaagctgaaagagatgaggattctggataatgttgaccttccagcttccatttcccaactatttgttaaacccaaagacaaaaaggaatctcctgctaaatcaaagcaaaagttacttgttaaatctttggagactattgttgaggttgaggagaaaactgagttggaagaggaggcagaggttctatctgagatagaggaggaaaaacttgaatctgaagaagtagaggcagaagaagagagttctgaggatgagttagatccatttgtaaagtctgatcctaagttaccaagagttgtccgaatggcaaacctctgtgttgttggtgggcattcagtaaatggtgtagctgaaattcacagtgaaattgtgaaacaagatgtgttcaacagcttctatgagatgtggccaactaaatttcagaataaaacaaatggagtaactcccaggcgttggatccggttttgtaatcctgcattaagtgcattaatttcaaagtggattggttctgatgactgggtgcttaatacagacaaactggcagaactgaagaagtttgctgataatgaagatctgcattcagagtggcgtgctgctaagaaggctaacaaaatgaaggttgtttctcttataagggagaagacaggatatattgtcagtccagatgcaatgtttgatgtgcaggtgaaaaggatacatgaatataagcggcagctgctaaatatccttggaattgtctaccgctacaagaagatgaaagaaatgagcacagaagaaagagcaaagagctttgttccaagggtatgcatattcggtgggaaagcatttgccacatatatacaggcaaaaaggatcgttaaatttattacagatgtggcagctaccgtgaaccatgattcagacattggagatttgttgaaggtcgtatttgttccagactataatgttagtgttgccgaggcgctaattcctgccagtgaattgtcacagcatatcagtactgctggaatggaagctagtgggaccagtaacatgaagtttgcaatgaacggttgcattcttattggaactttagatggtgcaaatgtggaaatcagagaggaggttggagaggaaaactttttcctttttggtgcagaggcacatgaaattgctggtttgcggaaagaaagagccgagggaaagtttgtgcctgacccaagatttgaggaggttaaggaatttgtccgcagtggtgtctttgggacttacagctatgatgaattgatgggttctttggaaggaaatgaaggttacggacgtgcagattatttccttgttggcaaggacttccccagctatattgaatgccaagaaaaagttgatgaggcgtaccgagatcagaagttatggacaaggatgtctatcctcaacacggctggctcatccaagttcagcagcgataggacgattcatgagtacgccaaggatatctgggatatcagccctgccatccttccctagaccagccccttagcaggaagcgctggtcacctcagttttgtgcagacaaaatctaggcttcgataaatgatgggactatgcatggtattttggcagcactgttcagtaccttgccttttaaatctggtttttggtgtgtgtaagctaataaatgtcgaggcaggattgtaggaacaccattgatcatttgtctcgctggtgacctggtgacgtatggtgtaattagtagttgtttgcctcctggagcttgctggcttctgtattctgtaatggtattttcgtaacgaaaatggcggg

SEQ ID NO: 34507 - DNA, 1279 bp, Zea mays
  Clone ID: UC-ZMFLMO17278G01_FLI
cccgaccgagcgcggcagcgcaaacctccgatccctgctgcgagcaagggatggcggcggcatgggcagtgctggcggcggtcctcgtcgcggcgcaggtggcgtctgcggcgccggtcacggcgccagcgttcctctgggcgcctaagaactacggattccgctctgatgatgctaaggaggtagtccattatcaaacaatctcaccaaagaacttagctaaatctgttcttgaggaaggtggctggtcaacctttatgtgttcaagggaggatactgagaagcatgttgatgttgccattgtttttattggctcaaagctacaatcatcagacatatcgaaagataagcaagttgatccagctttagcagatacattgaagctctccttcacagaatcagagttttctatggcattcccctacgtttccacatcagacgatgagaaactggaggagtcattgctatcaggcttcactgagaactgtaaaagtggttttggaagaaaccgtatcacctacacagacacgtgcgccgtgagtggccaagatctgaagacgtatcacaacatggatgctatcaatgacttggtagtgtcaggaagaaccaacccgagtggacagactgatgtaatcgtcttctgcagcggcgggttcgagaagttaggcaccacggaatcggaaggggagctgctttcccagcttgtcgacttgctgaagctgtctggggctagacacacgattctctacgcttcccagccatctggttatctactggagaacccttccggctcgccagtggctaggcaccttgcggagaggactaacggtacaaaaactggcctactgagcaaatgtgacggagagtgcctagtcaaatcaactcttcttgaaggaacctttgtcggaatagtgctccttatcatcttgatatcagggctcatgtgtatgatgggaatcgatactccctccaagtttgaagctccccaggagtcttgatctcccttcgaagcagaacccttgttttgttggtctgcactgtggatagatattattcagtttccccctttgaaagcgcctttcgtataattattattatttttttactgagccatctgttatttacgatgtgctcaaacttttgacaccaaacgaatgcatgtgtgtgaggcttgtgctgtgaccagacatagcattgcctccaggtgttttctgtgaataacctggaatttcaggtgggtactgtgcatcaaataaaaaagatgaaatcttgctgttgc

SEQ ID NO: 34508 - DNA, 1772 bp, Zea mays
  Clone ID: UC-ZMFLMO17278G06_FLI
ccgccgcgttcctgggcttcgtggtggcccgccgcaaggaggcggacgcgctgcgggccgagatgccgccggcgctcaagctctgcgtggatccggccaagttcgtcatggacgccgtcgccgacgtcttccccgtcgaccgccgcgaggtccggaaccccgccgacctggcctgggcctgcgtgctcatcctcgaggccgccgtgcccgcgctcgccgacacggacccggacatcggccccgcgcgcccgctcgtgccgcgggccgcgcgcgaccgcgcgcggggcatggccagggactggaaggaggccgccgagaagaaggggggcgtcgagggcgccaagccgcccgacgcgcacgccttcctgcagctcgtcgccacgtttgccgtcgccgagagggaggacaggccgctgtaccgcaggattgtcgtcagcttctcctggcgccgccagatgccacgcctcgcgctcaccctcggactcgaggaacaaatggccgatatcattgaggaactgattgctaagaggcagcagcttgatgctgtaaatttcgcttatgaggctgggcttcaggagaagttcccaccagttcctcttttgaagtcctacctggaagactctaagaagacatcaaccgctgcttcagataattcaagcactagcagcggccaatcagggagcaatgtgaacaagaaagaacagtctgcactgcgagctgtcataaagtgtgttgaggatcgtaaactagaagctgagtttccactggagggtcttcggaagcaacttgaagaactagagaaagccaagaccgagaagaagaaggcagcatcaagcgctaccagtggcggcagcagcggcccagcaaccaagcgcatccgtgcgagcactggaggcccaatgcctcctgccaaggcaggtcgtctcactaacaatgcttgcgtgtcttctctcccagctcccaccacattgacccagtctccctcccacgcgtcatacgccaacacctccccgtcccgcacctcatacgccaatacctccccatcccacgcctcatacgccacagtctccccatcccatgcatcatacgccacaccctcccctccccacgcatcatacgccacagcctccccttacccttacgacaggccggttggacacggcgtgtactgcacccggagcccgccggtgatcagggagccatatgtttacccagctgaggaggtagccaccgtcaacgtcggcattcccatggcctactccaccccgcccatgagctaccctgctgccccctacggcggctatggcaacgggatgccagcttacaccaatggaatggctcctgccttccaccaggcttactaccggtaggttcagtcaggaaacgaagaagtcgctgatgaatgacatgacaacaactgatgatgccaacgactcgaaacccgctcaatggccctgttttgtagcgactgactacaacggtaggttgggtacctcatcttccatgtccttacccaccgctactactagatgtgttgtctttagctcctcgtctcatcttagtccgctaccgtaatttttttttactaccactactaaggaacctggatgtaaattatgtatggtatcagcgagactgtcgtcgcagccttatgtaattctgttcagaacttttgaaaaacgaaaaaaaaagaagaaaccagcatgtaatcctgaagtaccggtctaccggatgtaccgtggacttaattagaagtgttttttttatagttt

SEQ ID NO: 34509 - DNA, 1967 bp, Zea mays
  Clone ID: UC-ZMFLMO17278G09_FLI
caggcaccagtgcatcgccaccgtaccggagggggcagcgcccaaaaaaggcaaacgggagggtgggcgagcctgctcttcctgtctgggagagagaccgaagaagaggagagagaggcgcagcgcagcgcagcgcaggcgcgcatctcccccctccccttgccggctggcccctgctgcagctctgctccggtcggctctgcccccccgctctgctgactgctctgccgctgctgctgtcgcaggcgcgccaccaacccgccgatgcgcgcgtagcggcgtaggtaccatcatcatccatccccgcgacgacccaccacccacccctgcagtctgcagcatccccttccccactcccggctggtctgctgcggccacccctgcgccgatccacctccgctgcttcctgcctcaatatattcgcccgcctcgtcgcctccgaccccgccacagaaggccttccagaaccctccgacccctcacctccgctccgccccgctccactctcctcctcccgggccggccgactccgatggccgtcgtcgaggccgccgcagccgaccacgccgcgccgccgctccaggaggaggcaccgggcgcgggcgctggcgctggcgccgacgccggggagcgcgagatgcgggatctggaggacctgctctccaagctcaaccccatggccgaggagttcgtcccgccctccctcgcctcccccgccgccctcacgcccgcgccgctctcccccgccgcctacggcttctacccggccggcgccggcttcgcggtcgcctcgccgggccacggcggcgtcgtcggcttcccggccgtcgcggacgcccacgccgcacgaggcaggaagaagggcggagctggaggagggttcagcggccacggtcaccccgccaggaggcggaccaacagccgcaccagcatggcgcagcgcgacgagatcatccgccgcaccgtctacgtctccgacatcgatcaccaggttactgaagaaaacctggcagcactatttataaattgtggacaggttgtggactgtcgcatgtgtggagacccaaactcagtccttcggttcgccttcatagagttcactgatgaggagggtgcaagggctgctctgaatctgtcaggaactgtgctcggatattatcccgtcagggttctgccatcaaaaactgccattgcaccagtcaatccaacattcctacccaggtctgacgatgaacgggaaatgtgtgcgaggactatttactgcacaaacattgacaagaaggtcactcaggcagatctgaaattgttctttgagtctatatgtggagaggtctttcggctgaggttgcttggtgactaccatcattctactcgcatcgcttttgtggaatttgtgatggcggaaagtgctaccgctgccctgaactgcagtggcgtgatactgggatccttgccaataagggtgagcccctcgaagactcccgtgcgtccccgtgcgcctcgccagctgatgcactagaggtgtcctaggtacaggaggtgcggaaggcactgcttatatatcatcatcatcatatatatatatataatagagaatagacatatatgaaagaggggaggggaaaagtggcgtcacttgttctaagttatgggctcggcctttttgttttgggttcttgcttcaccaccgtgtgactgagtactaaagtgcctacgtacgccccgggtcgacgccggctggcagggcccttttgtttactaccttgcacatagaaggagaggagatggagagcttctcactagaaggatcggaagcgcgcgcgggggggtctgcctgatgctcttgtccttgatgcaacaacaggcggaaaactcctggacttttaccctgctgttcagttgtttgctgctgtgtcctggttgctactgaaacaaactggttaaaaaaaacttgggtattggagact

SEQ ID NO: 34510 - DNA, 3288 bp, Zea mays
  Clone ID: UC-ZMFLMO17278G10_FLI
cgagctgatcgacccacgcaacgcaagtgcaatgccgtgccgaggctagatcgagctgccgagcgctgatcacggtgaggccacccagatccacccgattgccacgcggacttcaccccttgccttttctcctcccgtccacccatcgggcgctttccctccatccctctctctcgtgcggcatctgggcgacccgccgacgcccctacgccaggtgcccaggccttcgtcgggttctttaccggcgacgagcacacaccagggcactggagggctaccatctgcttcgctttctgaaaaaaaaaagtttcggcataattatcaccctaagatgcctggaattacaatggatggatttgttgcagaggaggtgccgaacagggtgaattcctctccacagaacgaaaatctgcccgccccaaattcgacggcagcttcaacaatggcgccaagcatggaaagtgaggcacttgagatgcatgtcgagagctccggtactggggagccctcaattgagcagctctacaacaatgtgtgcgagatgaagagctcaagtgagggtggctccctgtcacatgagagctttggctcagatggggaggagtctcggattgattcagagcttcgccatcttgttgctggggagatggaggccatgaaggtgattgaggaggaagaggagaatggtagtgttgccaacgttgtgccaccggttcccgctgagaatggaaccccagtaaaggagcagccttccaaatcgtccaacaagtcgaagaaggactcaaaatcacagcttgagtctgatgcctctgttggtcccaataggaaggcgtccactgaggaaggtgagagggaggtcagcaaacaggcaacccgagttggccgtcggcggaaatcaaatgccaatccacagaatggaacagaagatgctgggcttgataacccagaccttggtccatttcttctcaaacatgcaagagacttgcttgcctcagaaaactcacgtcgggcactgaaatatgctctccgtgccactaagacatttgagaaatgtgctggtggaaaaccaagcttgaacttagtcatgagtttgcatgttgttgcagcaatctactgcaacttgggaaaatatgaagaggctttacctgtgctgcatcgatctcttgagatccctgtaattgaggaaggtcaggaacatgctcttgcaaagttttctggttgcatgcagttaggggacacctatggcatgctaggtcaaactgcactctcactgcaatggtatgcttctgggcttgaaatacaaaagcaaacattgggagagcaagacccaagggttggagagacttgtcggtacttagctgaggcccatgtgcaggcattacaactcgatgaagcacaaagattgtgtcagatagcccttgacatccacagggagcatggcgggacagcctcactagaagaaacagctgataggaggctgatgggtctaatctatgacaccaagggtgatcatgaagctgccttggagcatctagtgatggccggcacggccatgatagccaatggtcaggagacagaggtggcctcagtggattgcagcattggtgatatctacctctccttgggccggtatgatgaggctgtgtttgcttaccagaaagctcttactgtattcaagaccagcaaaggggagaatcatgcaactgtggcttctgtttttgtgcgcatagcggatctgtacaataagtcagggaagctgagggagtcaaaatcttactgtgaaaacgctctcaaaatttaccaaaaacctattccagggacttctctggaagaaattgccactggtttaactgatgtttcagccatatatgagacgatgaatgagcatgagcaagcactcaagttacttcagaaggccttaaaaatgtacaacaattctgctggccaacagagcacaattgctggaattgaggctcagatgggtgtcttgcactatattttgggcaattatggcgagtcatatgattccttcaagagtgcgattgcaaagctccgcacctgtggtgagaaaaagtctgccttcttcggaattgccctgaaccagatgggattggcatgcgttcaaagatattcgataaatgaagcagcagaactgtttgaggaagctagaacagttctggaacaagaatacgggccttatcatccagatactttaggagtgtacagtaatcttgctggaacttatgatgcaatgggcaggtaaactccctacttctgaaactcaaatcgttgtctcaactaggtgttgatgattgtctgtgtgtctgcatgcataatgatttgcattccaattagtgatttgctggaaaaaggtactatggcaagtgggaattctttggtcttagtcgactcctcttccagctaggctcatgattagcatctgtaccagctccagctccttgctactccaattagtcgattagatattgatcggtacagtataaagttggatcaatttaattgaagcaggaccatcttgcatcatctttacttgcttatcactggctgctctgtaaagaagggttgcacatactttatccttttgctttatatttttctatttgttttctccctccatattctcgtggaaacttcattcggctttgtaaggcatgtggatttttagctttatcatagtctgagtaaatctggctggatcagaaatgtcaacactagcttagctggctagatcagattgccgaagcaaaggtactatcctcctgagttactttagaagaagtatatcacctatcagcacccctgtgtcttgctaatatgaaaaaaaatgtgtttcattttagccacaattatctgttgatatttgccttttgtttcccagacttgatgaggccatcgagatcttggaatatgttgttggaatgcgcgaggagaagctaggtacggcaaacccagatgtcgacgacgagaagcggaggcttggggagctattgaaggaggctggccgggtgcgaagcagaaaggcaaagtccctggagaatctgctcgagaccaacccatatatcgccaccaagagaaatgcagttgctgcatgaatcactgttctgaagatgaaaggcgaggattgttactaaggtattcaattggttcgttcagatgggggtaacgggaatattggtgcttacctattaagaaaatatgaaatgatcaaatcactgatctcaaattctttgctgtaaagttttcaaatactattaccgttacatgtac

SEQ ID NO: 34511 - DNA, 1887 bp, Zea mays
  Clone ID: UC-ZMFLMO17278H11_FLI
gcagtgcggagacgggagccagtggccagtgacagtgagcggcgacgttccagtgtccactgtccagtaggcgagcgaggaggtggtccattggccggccatggctcgtctccgctgcgtcttcgtcgtcttcgtcctgctctcgtctgccctccgccttccaggcgacgccattgcctcccgggggcaccatggccccgccgcacacgactacagggacgcgctcgtcaagtccatcctcttcttcgagggccagcggtcgggcaagctgccgccgtcgcagcgcgtgtcctggcgcagggactcgggactctccgacggtcactccgccaaggtggacctggtgggcgggtaccacgacgctggtgacaacgtcaagttcgggttcccgatggcgttcagcatgacgatgctggcgtggagcgtggtggagtttggcggcctcatgaagtcggagctgcagcacgccagggacgccgtccgctggggcgccgactacctgctcaaggccacggcgcacccggacaccatctacgtccaggtcggtgacgcgaccaaggaccacgcgtgctgggagcggccggaggacatggacacccccaggacggtgtacaaggtggaccgtggcaccccgggatccgacgtcgccgccgagactgccgcggctctcgccgccgcctccctcgtcttccgcaagtccgacccggcctacgccagcagccttgtcgccagggccaagagggtgttcgagttcgcggacaagcaccgcggctcctacagcaccgggctggcggcggacgtgtgcccgtactactgctcctactccgggtaccaggacgagctgctgtggggcgcggcgtggctccaccgcgccaccaagagcccctcttacctgagctacatccagacgaacgggcaggtgctgggcgcggacgagtcggacaacacgttcgggtgggacaacaagcacgcgggcgcgcgggtgctcatctccaagtcgttcctggtgcagcgcctgggcgcgctccacgagtacaagggccacgccgacggcttcatttgctccatggtgcccggcacggccacggaccagacgcagtacacccggggcgggctgctgttcaggcttagcgacagcaacatgcagtacgtgacgtcgagctctttcctcctgctcacctacgccaagtacctggcgttcgccaagcagacggtgcgctgcggcggcgtggcggtcacgccgcagcggctgcgcgccatcgcgcgcaggcaggtggactacctgctggggagcaacccgatggggatgtcctacatggtgggctacggcgccaagtacccgcgccgcatccaccaccgcgcttcgtcgctgccgtccgtggcggcgcacccggctaggatcggttgctcgcaggggttcaccgcgctgtacgcgggtggggccaatcccaacctgctcgtcggtgccgtcgtcgggggacccgacatgcaggacaggttccccgacgagcgcaacgaccacgagcactcggagccggccacctacatcaacgcgccgctcgtcggcgcgctcgcctacctcgcgcactcctacggccagctctaagctccctagcgttaattgttgccgtgttgattgattgttcggaaattagagcatcgcgatttgacgaccccagtgcaagcaaaaccaaggacgcttcgcttgtgggtcttaatatattgccactagtactcgtaggcgtgatttgtttgttacgcgacgccgctgctggcgcacgtatgtaagcgcggagacaaactgtgctccacggctccaccaagtgtactgctactaaggttgcagctcgcaactctatctgatgctatctactgttttgtttaatt

SEQ ID NO: 34512 - DNA, 1652 bp, Zea mays
  Clone ID: UC-ZMFLMO17278H12_FLI
tggccccaaaaccctaaactgagcccgccgctgcttctccagtccgcacgaagcgccccacaaaatgccgcggctgacgccggcgcacgccaccctcatcctggaccacgtcctgggcgatccctcgatccccaccgcagtcaccatcgcgttaatcgctgggatcccctctccctccgatccgaccccgcgcctccgccgcggggtccttctccgccgcctcgccaccgaccccgtatccgaatcctctctcgaaaccctccacctcctggcctcgctcccggcctgcgcctcccccatcgcagccgcccacatcgccgtcgcggcattcctcgcggcctccgcgcccgacttcgacgccgtcgccagggctctcttcgcgcgccccgacggccgcgcgcgccaagcggtccacggcggaagttcccccgcgctcgcatccgacgatgccatcgccacagtagaccagttcgaggctgccgtcgggatgtcctcctctcagaccatcctcagggtcctgtggggcaaccgggccgccgtggaggagcgggtccaggagctcctcgctgctgaatgggccgcgattggcccgtcgcggctcgaggcgttggctatgcggatcgtcggggatggggccgtcgatacatggggtgccgcagatgaggccatgcgtgccaatttgcgcatcttggctggggaagcaaaaacgcgcgagattctcgacaaacttgaaaaaactacctgcaacacaaatccaatttcaacaccagctgttgagaaggtgatggatgcgctcaaagcaagctgtgctgacctccacagcattgtggaggatccccttccagctgcaaaggcagttgcagatgagttattgactgcgaggatggaaaaattagttagcctgaatgcccaagaagtaggagggcagccaacaacttgtggcgttgcaggaccgagtattcataatgacaaagacaatggtccaggtataggcaaacctcacagccttatggagcggaacgcaacagcacgaacctctcagtgggaggagtcacttggtcttgatggttcggaaccaccctcaccaccgagaccacacttgcctagcccaaggagactaccaccttctcctttgtcaccgcctgggaacaaaaacaataatcggagaaaggcaaggaggtggagcttgttcgaagaagaaaccttaagaaagggtgttgaagagtatggtgttggcaattggagggatattctagataacaatgctgaggcttttaccggcaggacaccggtggacttgaaggacaagtggaggaacatgcttttccgttgatgtaacggggaaacatgtagctggacatgctttactagggtaaagtacctagcaattagcatgtagtcctcgtacatcacagcagactcttggtcaagcttttctggcagctgcagctacatgattttgtgtctcggtgtagtagcagccgcagcttttctggcagctgcagctacatgattgtctcggtgtagtagcagccgcagcccaaacggttggctttcctggcagctgcagctacagtattttgtgacggtatgcttaccgagtggctgattcgcgcactgacgtattatggactcgattttgtatttttatt

SEQ ID NO: 34513 - DNA, 1545 bp, Zea mays
  Clone ID: UC-ZMFLMO17279C10_FLI
caaccacttactctcgtgcgctctccgtgggagcgaggactcgcggccggcggcagcggcaggttctcctagatctccggcatcatcagtaacaaatggctgacggtgaggacattcagccccttgtttgtgacaatggaactggcatggtcaaggctggttttgctggtgacgatgcgccaagggctgttttcccaagcattgttggacgcccccgtcacactggtgtgatggttggcatggggcagaaggatgcgtatgttggtgacgaggcccagtccaagaggggtatcctgactttgaagtaccccatcgaacatggtattgttagcaattgggatgacatggagaagatctggcaccacaccttctataatgaactccgtgtggcgcctgaagagcaccctgtgctgctgacggaagccccactcaaccctaaagctaacagggagaagatgacccaaatcatgtttgagaccttcaatgttcctgccatgtatgtcgccatccaggctgtgctttccctgtacgccagtgggcgtacaactggtattgtgttggactctggtgatggtgtcagccacaccgtgccaatctacgaaggttatgcccttcctcatgccatcctgcgtcttgaccttgctgggcgtgacctgactgacagcctgatgaagatcctcaccgagagaggttactccttcaccaccacggccgaacgggaaatcgtacgggacatcaaggaaaagcttgcatacgtggctcttgactatgatcaggagctggagaacgccaagagcagctcatctgtggagaagagctacgagctgcctgatggccaggtgatcaccattggggcggagaggttccgatgccccgaggtcctcttccagccttccttcattggtatggaagctcctggcatccatgagaccacctacaactccatcatgaaatgcgacgtggatatcaggaaggacttgtatggtaacattgttctcagtggtggcacaaccatgttccctggcatcgctgaccgtatgagcaaggagatcaccgcccttgccccgagcagcatgaaaatcaaggtggtggctccacccgagaggaaatacagtgtctggataggagggtccatccttgcctccctgagcaccttccaacagatgtggatctcaaaggctgagtacgatgagtcaggaccagcgattgttcaccggaagtgcttctaagctcaagggcccccttcgtccccattctatgtattcctttccttgagtgcttttcttataagctactatgtttgagattgccggcctttgagcaggcaatgttgttggatctgtatcttgtggatcactacaatgcatgcgttgctccatcttcttttcatgccaagtttgctgtcatacttgctagtggggaaaacaacaatgacaacagtggtgagaacagcaaccacaaaaaaagagaggatgtaaattattgaagttcctaggatcgtattgtaactgtacttgtgcgagtaacattattggttctctttgt

SEQ ID NO: 34514 - DNA, 477 bp, Zea mays
  Clone ID: UC-ZMFLMO17279G05_FLI
catttacatgcagcatccgttaattcattaacgtgcaaggggcttcgcttttagacccaaaactgaagctcagtgcgtagagcatgtagttttgagttctctatttgtttaaatagtactagtggattaagatagttcgtttgcctatttgttatatccatttgtatgcagcctgcactaattcatctagttggaaggggttttgctcttggacctgatacatctgaagatcaacatgtatttgttgtagttcagtgtcccacaagagctatgtaattggtcactcgtttgttttaatggtgctagcgacctggattaagctttagagaaatcttaaagctgtttcatgtgtatgctatagtttgattgatagactgtgttgtagttcagtgtcccacaagagcatatgttgctcctttctttaagaaaataatactagcatatttgatctggtaacagtgatgcacctttgcacct

SEQ ID NO: 34515 - DNA, 1125 bp, Zea mays
  Clone ID: UC-ZMFLMO17279G10_FLI
ggacgacgacgtctacggcgaccccaagatgatgatgaagcccatggctgtgccgccgccggccggcgggggcgacaagaagggcggtggcggcaagaagggtggtggtggggggaacgagatcccggtgcagatcaagggaaacaaccacggcggtgccggtgggcagccgcacaatgcaaagggaggcgccccgggaggcggggcccacctgggccaggggaagaagggcggcggcagcgccgccgccgtcggtgtcggtggcccgatgggcggaatgctgcctcaacaaggcatgatgaggcctcctaacattcttggtggtgctggtgccggcttccccagcacggcccagatgggcggcggacctatgggcatgccggttggccacccgcacatgggtattatgcagcagagcggcggtggcggttgcggagctggcggcatgccgggcctggggttccacccgggattgggcggcggaatgcattctggggcggatatgcttcaggccgccgcggcatccgggaaccccgtggcgcagcagcagtacatggccttgatgcagcagcagcagcagcagatgatgatgatgcagcagcagcaacagcagcacgggaacggcggtgcaggatacccggcggcaatgggctacggctatggccggccaccgatgcattacccaatgggctacccagtgctgcccccgcactcgcatgctgagccttacaacatcttcagcgacgagaacgccaacagctgctcactgatgtgatcagcaattccgcatggaatggccctgttccaagtaaaccatctcaaggagctcaatgtcaccgctgatcaccgacagacatcgccatggttgaagcgccgtgaatcaatcaacaatcagtatgcttggggatgagtcctagctagaaccctgtccctttcctgctccttccccccctttctctagcttattttcgccttgcttttaaaaaaaaaggaacttccttgaatgcgaagttaggtatagtaattatgaggttccctcctggcttcataaaggtggactaatggtagaacaatgttgtcaatctcagtcgtaaatcagtgtgaatatgtcgtgatttctcttct

SEQ ID NO: 34516 - DNA, 1278 bp, Zea mays
  Clone ID: UC-ZMFLMO17279G12_FLI
aaatcctgtgcaagctaatgggtgaatggagattaatggatgaactgtttgtgttacgtgctatttatttgctaggatcaggtgacatgttgcagcagtttctgataacaatttttgataagcttgatagagggaattcctgggatgacgactttgagttgaataatttattgcaggaatccataagaaactcagctgacaaaatgctcctgacagcaccagattctttggttgtttcattagcaaaatatgacacacacaatggtgaggaaggtctatcaacttccaaaaaaggtcgtgcacttggttttggcattgatgcccttgacatgctgaattttacatataaggtgtcttggcctcttgatctaattattaatacagaggcactgaagaagtataatcaggtaatgggattcttactgaaggtcaaacgagcaaagttcgctttggatgaaacacgaaagtggatgtggaaggccagaggcaggaccacgcacaatttcaaacaacacctaatagtggcacagaagctcctccattttgtcgatgcatttcatcagtatgtcatggaccgagtttatcatagtgcatggactgagctttgtgatggcatgacggctgctaccacactggatgaagtcatggaagttcacgaggcatatctctcttctattcaacgacaatgctttgtggcctctgataagctgtgggccctcattgccagtcgagttaagactattcttggattggcactggacttccacaatgtagaacaaactctcagtaccggtgggacggcttcagctgtgaggacacgatgcgagatggaaatcgaccggattgagaagcaatttgatgagtgtgtcatatttctcctgaggatcctatctttcaagctcaatgtgggtcatttcccccatcttgccgatctagttacaaggatcaattacaatcactatttcatgtctgatagtgggagcttctctgctattcctgggtcccggccacggtagtagactagtagttgagcaagcagtggacagaattgttggtgttgcacctgggtgatttttcctaccctttttttagaagaaccagaggcgtggtttgtttactttcgaaatagaaagctccagaacagtgctaatgcttctctctccaaattggaacaaaaaatcatgcctcgggcttgttacaatatctatatgtacattgttttcaaaaggatgacactaaaaaaggtggcataaaatgcggctgaacctgttacatttt

SEQ ID NO: 34517 - DNA, 581 bp, Zea mays
  Clone ID: UC-ZMFLMO17279H07_FLI
ctcgaggcttggaggggactaccctcctaaagctgttgcgaagtttgcagctgttgccgcgctgtgtgttcagtacgaagcggacttccggccaaacatgagcattgttgtcaaggcgctacagcccctgctgaatgcgcatgcgcgggcgaccaacccttgagaaaaatgctagctcaaaagcttcgcattgctcctctccgccctcttgtatgatagataagtaagatacgagtcgccgatgtcgttcttgcggacacatggctggcagcgtgtgacatttgtgattatttgtccctgaattgtaaacaagattcttgtatccccacaacacttgattctttctatcggttgcaagatgacctgccgttttcttcttaagaagaagtcaccttagcaaaactcacaaactttattactccctctgttcaattatgggatgctttgattttgtctagtcgtatagtttttgttatataaatatcttacaatttggaatggtattgactattaagggcttgtttggatccctcgagctaaaacaaagtgactaaattttacgctttgtttggttcccttgt

SEQ ID NO: 34518 - DNA, 1362 bp, Zea mays
  Clone ID: UC-ZMFLMO17280A03_FLI
gctttatttcattgtgctgccactggtcgtgcttcttattggcatcgcatgcatgcttttgctatgccgcaccaagtcagggacaacaataggtccatggaagacagggctcagtggtcagctccaaaaggcatttgtaacaggagtaccaaagttgcaacgctctgagctggaaggtgcgtgtgaagacttcagtaacattgtgtcaagctatccacagtacactgtctacaaggggaccttatcaagtggtgttgagatagctgttgtatcaaccatggttatctctagcaaagattggtcaaaacattcagaagggcgattcaggaagaagatagactcactctcgcgaatcaatcataagaactacatcaacctgcttggatactgtgaggaggaagaacctttcactaggatgatggtgatggaatatgctcccaatggaacactatatgaacacctccatgtcgagggatttgatcctattgattggaatggtaggatgaggataattatgggggtagcatactgcaccctacacatgcatgagcttagccctcctgtaacacacccagacataaagtcaagtgctatattgctatctgaggatggagctgcaaagatagtagacatgagcgtttggcatgaagtatatttcagaggaaacatgcccaaggatggcgacctagttgatcaccaggaacgagtagctgcagatccagctgggaatgtctacagttttggtctactcatgctggagatcatctcagggaagcctccgtactccgaagaaaagggttccctttcagacttggctttggagtgcattagggataaccggagcatgtcttgtttgcttgatcctagcttgaaggatcacaaggaaaaggacctagaaaccatatgtgatctggtccaggactgcatccaaagcgatccaaagaagagaccagccatgagggaggtcaccactagactgcgagaagtactgtcaatttcgcctgaggctgcgacgccccggttatctccactctggtgggcagagcttgagatcctttcagttgaagcaagctagcgaaaatgtgctttgtttgcagcaacaccgaggtacttgtgcatactgtaatgcaaccctgtacatccctgttgtatttttccatcctgtgttgtaactttggtggtgtctgcgtgctacatttccccctccccggtgaattcagctgcctggtttgtttttctcatctgtatactaaacatacatggtgtgagagcagaatgctttataccatcctaggactgattgtaatcaggaaatgtgtagtgttccatggttttacagaaatatacattctttgattgttg

SEQ ID NO: 34519 - DNA, 1156 bp, Zea mays
  Clone ID: UC-ZMFLMO17280B12_FLI
gcaagatatcgggggtaaaggtctgctttgatactgaaaatgctcgtgattctttctacagagcagcagtgaactttgttttagatgattgcagcagagcagcaaaagacatcggtgcagcaaaacttaatggtgaggatccaagggattttctcgccggccttgctagcaatattggattagacaagtttcgtgctgccactcttgtatgtgcatcagttgctactcgtacacggacatgcttcttgcaatgctgggctctagagattcaaggaaaacggccagaagcactggatgaactcgtgaagatttgtagaattcattacatatttcctccagaggacaattctgcagagatggaaatggtggctgctggactagaaaagaatttgcatgttgccgagagggttcaccttctatatctatacaggagcgtttgtactgctggtaacttaaaaacagctgcacaggctcttggtctgagtttgccaaatgagaatacagaaggatttgcaatgcccattcgtcaaccatagatgaaggctttgaagcccctgacgcagttttggtattcctactttcttaacatgcattatgcagtatgctaccaagacaagaatcaagcatactgcagattcccttctcaacagaatcttagggacagatctgcacgggccccccagacaaatgctgaatcaattgttccgttcatgtgcatttgatagaggggtgctctttaatatgtgcaatgtcatcaaaacctcgtatattcagatgatcgattctgctcaccaaacgcgcccaccgccatgcctaatatcgtggccgtattgggagtatcatggccgtattgggagttctcttctgcagctgtagttggttaggacatctacaacctgagtctttgaattgttattttaagagctacaaaaactgtgcgatgagaattggttttttaagagctaaaaaactgtatgatataatgagatgtcttcaatattaatcacataataaatatagttaatagacaatgtgtagtgtagagagactctttgcaaagagatctctcttatattttttatttaacccttatttctgaaaaggctgtattaaatgatattgtatatgtcattatttcgtggtcgtattgggagtc

SEQ ID NO: 34520 - DNA, 1839 bp, Zea mays
  Clone ID: UC-ZMFLMO17280C06_FLI
cggaaagacagcgcacgaagcaatctttccctttccccaagatgggattcggcttcgttcgtctcgccgcccgcgccgcggtttctcgccggggcatgacgccagcaacctccgcccgccgcgcgctcgccccacccgccgtgccggcggagccccgctgcgggtcccactggctcgtggccgctcgcggccacgtgggccactcgcaccaccacggcggggaggacgagggcgagacatccgagaggatctttcgtctgggactcgccgctgacgtcgtactcaccgcggggaaggccgtcacaggctatctctccggcagcaccgccatcgccgccgatgccgcccactccctctcggacatagtgcttagcggggtggctctgctgtcttacagggcggccaaggctcccagagacaaggaacatccctatgggcatggaaagtttgaaagtttaggagctcttggaatttcaagtatgctgttggttacttcaggtgggattgcatggcatgcttttgaagttcttcagggagttatgtcttctgctcctgatataattggcaatacattgcatgcacaccatgaccatggtagcagtgggcatcatcatggaatagatttggaacatccagttcttgcattgagcatgacaactttagcaatatctatcaaagaagggctatactggataacaaaaagagctggggaaaaggaaggcagtggtctgatgaaagctaatgcatggcaccatcgtgcagatgctatttcatctgtcgttgccctagtaggggtaggtggttccattcttgggttgcctcttcttgatccactagctggacttgttgtctctggcatgattctgaaagctggtattaagactggatatgagagtgttctggaattagttgatgctgctgtggatccttcacttctagcaccaatcaaggaaactattttgagggttcacggtgtgaagggatgtcatcgattgaggggaagaaaagctgggacatcattatatcttgatgtgcatatagaggtatatccttttctgagtgttagtgcagcacatgatatcggtgaaactgttcgtcatcaaattcaaaaggagcacaatcaagttgctgaagttttcatacacatagatccctcgtactcagtaggcccgaccatggacctaaaaaggattctgaaggactctgatggaacaaattcagaagctatcccacggcaacaaagtgcagaagccatcgtgtctaatattatttcatctcatttttcggagaaaatggcgctcgaacatctaatgctgcattacgtgcaaggaagagtgttgctccaggtccaagtttcaatgtctccagaaattttgattcgggatgcaatggaagtcgcgaagcaagccgaagaggagatactcagggctgatgccagcataagccaaatcagcttgcagctaagattgggccaacaaatcaagcaacttcagctagcatcgcaagaacgtcgctgatctacatgcaggagatcactgatccatttgctggctgcttcgtgggtctactcgggagtatttcctttcgctaatttttctgacatacatgagagcttggtctgctgatgaggcagtaggctataggattctaggaaccgactgtgtacattgtaatcagagtgttcggagacgtgaagctgagtttgtaataatacacaagcagccttgctcagaaatgtactgggcaacaaattgtctgccacatactgtcaatgtaaaatgtatgaacaagttcctcactggccccgctataataacaacgaaccattgctactgatgc

SEQ ID NO: 34521 - DNA, 1020 bp, Zea mays
  Clone ID: UC-ZMFLMO17280D02_FLI
ctgttttcagctgggcagcaggctaatgaggctgtccaagatcagttgtctgctcttagtttctctagcctagcagttatttttggtgctggacttgtaactagtttatctccttgtacactaagtgttctaccactaactctaggatatataggtgcatttggctctgggaaaggccgatccgaggttgttgggaattcaattgcattttcactaggactagcaacaaccttagccattcttggtgttgctgcttcttttgctggaaaggcttatggtcaggtaggacaagggctcccagtggctgcttccggtttagccattatcatgggattgaaccttctggaggtacttgaattgcaacttccctcatttttcagcgattttgaccctcgagctgctgcagctaacctcccttcaggtgtacaagcataccttgctggtcttacatttgcattggcagcatcaccttgcagcacacctgttcttgctacccttctgggatatgtcgccacttcaagagacccaattattggaggaagcttattgttgacatacacaacgggctatgttgcgcctcttcttattgcagcttcatttgctggagcactgcagagtttgttgtcattcagaagatattcggcatggataaacccaatcagtggtgcatttctacttggtggaggtgtttataccctactggacagggtgtttccagcaacatcaatggccatgtagaccatcgttggacaagaattgctaggcaccagtctgtttggcgtgcgaatgatatttggttgtgaagtagtgaaatgatggcaacaaagtttagccagatctctcagcgttgtataggcacgcaggacattttgatcgggacaagcaaagcaccttgacctaagtacagtagtctgcatcactgtatctgtatgggcctcgatacttggggccggtctaccctactaaaatgtatttctgggacagattgaaagagtatgaaatccatataagggtttgttc

SEQ ID NO: 34522 - DNA, 539 bp, Zea mays
  Clone ID: UC-ZMFLMO17280E06_FLI
gttttcctttttgccaactcgaaatgcaagcgctacttccacaaccgcctgaagcctgcaaagcttacctggacagcaatgtacaggaagcagcacaagaaggacatccatgctgaagctgtcaagaagaggcgccgcgctaccaagaagccatactcgaggtccattgtgggtgcttccttggaagtgatccagaagaagagagctgagaagcctgaagtccgtgatgctgctagagaagctgctcttcgtgagatcaaggagcgcatcaagaagaccaaggatgagaagaaggcgaagaaggctgaggtgtccaagtcccagaaggcgcagacgaagggtgctgttcagaagggttccaaaggccccaagttgggtggcggcggtggcaaacgctgaaaaggaacgaagtgtcattccgagacctcatcaaagccacctttgtagtaccttggttaattttgtattttctttcagagttacttgtgactcttaattttgcatctttatatattgggagaaatgatcgccgttcgttc

SEQ ID NO: 34523 - DNA, 1295 bp, Zea mays
  Clone ID: UC-ZMFLMO17280G02_FLI
gacggccagacccagcggtcgcttactcgcatcgcagcgcactcgcgccacagtcggcatcacataccagatccctgcgggtgcggcggccatggccgagaacttccagctccagggccggcacggcaagtcccgcgtccgcgtctcccgcgtctggcgccgcccggccgcggcggggggcgacgtcatcgttgagtggaacgtcgccgtcagtatcgtctccgactgcctcccctcctacacctccagcgacaactccgccatcgtcgccacagattccatcaagaacaccgtgtatgtcaaggcgaaagagtgcacggaagtggtgtccatggaggaattcgccgtgattcttggaaggcatttcacctcgttgtaccctcaggtttcagaggccacggtgactatcgtggagcgtccatgggagcgtgtgactgtcgacggaaagcgtcattcacatgggttcaaagttggtgttgagaagcacagcacagaggtcattgtaaaaaaatctggaagcctgcgtataaattctggaattcaaggatactcgctgctaaagacaactcagtctgggtttgaaggttttgtgacggatcgctataggcttcttcctgatacaagggaaaggatagtagcaacagaagttactgcttggtggaggtatccctttgaacatgtttcgcagctcccatcgaagccattctgcttcacgcagagatatcaggatgtaaagaaagtccttgcagagacgttctttggtcctccggatgttggtgtgtatagtccatccgtacaaaatacgctatacctcatggccaaggaagtccttacaaggttcccagatatatcgtcagtccagcttagaatgccgaaccttcactttctgcctgtcaacttggggagcaaagaagctccgctggtgaagtttgctgatgatgtgtacctgccgacggatgaaccacacgggacgattgaagcaaccttaataagccgtcccatgtcaaagctgtaaaaaaaatgtagtcgtcaggctggtattagactcctgcttcgtctccccagcatccccaggcttaaaatggacagtaagctgtaagggaaagataaactgtcataaatcgtagcccctatgctttatgtgtggtggtggtaataagtgcacagacttgtattggatgttgtcagctgtagcctgtaggcgtccagcttgtgacgtttcgccactgtaatcgtgtacattgctcgtcttgtgtggaaaccagttaatatctttggaagctttggtcagtttt

SEQ ID NO: 34524 - DNA, 1353 bp, Zea mays
  Clone ID: UC-ZMFLMO17281C07_FLI
ccgatcccaactgccatggcgctctccatctacacgcccacctcctcctccctcgtcccgccctccattcaggaggtcaggttgacttcgcgaccgccaaagcccgcgactttcagcctacggaggccacatctggccgcgcgggccgccgctggcaacgcacccacgtccccggtccgcgaggtcgtcactgagctcgacgcggtcgccggcttcagcgagatcgtgccggacaccgtcgtgttcgatgatttcgagaggttcgcacccacggcggccacagtgagctcgtcgctgctgcttgggatcactgggctcccagacactaagttcaagagtgcgatagatactgcactggcagatggtgagtgcaacgcactggagaaggctgaggacaggatgtcctgttacctcaccaaggctcttgcaaatgttggcgctgaactggctcatcaagtccctgggagagtttcgacggaaatagatgcccggttagcttatgacacccagggcataatccacagggtacatgaactgttgaatctatacaaccaacatgatgtctcaactgaccgcctgttattcaaaattcctgctacatggcaaggcatagaggcctcaaggttgcttgaatctgaaggaattcaaacgcatctaacatttgtttacagtttcgcacaagcggcagcggcagcacaagctggtgcatctgtagtacaaatgtttgtgggccgattgcgggactgggcaaggcatcactctggtgacccagagatagatgaagctttgaagaatggagaagatgctgggctttctttggcgaagaaagtatatgcctatattcacaggaatgggtacaaaacaaagctgatggccgctgccatacggaacaagcaggacgtatttagccttctggggattgattacattattgcaccgatcccgatgtgaagtacggctatgtcccgaagttgactcctgctattggcaagacgtacaacttcactgaagaggagcttgtgaagtgggaccagctgagcctgtcagctgccatggggccagctgcagaagaactgcttgcttcagggctagaggggtacgtgaaccaagcacgccgcgttgaggagctctttgggaagatctggccacctcccaatgtttaacaacggcgttgagagcaatagcaatgtgatttgcctggcaggctcacaatgctgcgcggaagacgctttgcttcttctttttggataatacacgaagcactcccgtgtttacgttgacttgacttgcagtgtgcatttattctgttttttttttttgtaattcaaatgatttgctggatccatgagaacc

SEQ ID NO: 34525 - DNA, 1077 bp, Zea mays
  Clone ID: UC-ZMFLMO17281C08_FLI
ggccactccttccctccccccttctcccctccgtcttcttcccccaggggcatccgtgttttcactttttgctcccccacgttgaaccttgatcctcgtgctccctttcttgattctttctccgtaggatctcttgctaggagtagcctgccccgtgtgcgcgctcgcacggacatgcttgtttccgcgtcttgaaaggcgagaaaaagtggagatgggtgcttgcgcttcggtacacaaggacccggggcaccccaagaagcagtttcttgactcgcccaccaaggcgaaggccgccaacgggaagggtggcgggggcggcggtgttgctccggttggtgatggcttcggtgatctcaagtccaaggtcgacgctgaggctgagcagctgcgggcagagtttaaccccaagaacccggattctggtagcaaggatgaagtgttcttcgaatctcgagcctggttagattccgactgcgaggatgacttctacagcgtgaatggagatttcactccgtctcgtggcagcacacccgtctaccagcccagagcgcagacggtgatgagcagcatctttcagccggacacgcgcagttccaaatcaccggagccttctccgactggacggaggaagctcgctgagctgctgcaggaggcaatgcaagacggtcccgaagaaagcgccgacgagcagcagcagcagcagcagtcgcgatctgctggtgctgccgctgatgggaagccgccggtgtctgagtccacgtccagctccgcttgcagcaccgtgccaactccggtcgcagtcgccaagagccggaaggagaaggcgtggtacaccggacgctgttgcctgccgagctttgttcatagcctgaccttagacgagagtgagagggggcagaagatgagctctaggccatgtgctgtttgacggtggggctccagtgccctcctgagtcctgccctgagctgtatttagcgcgatatgttatctgaatgcccgattgggacgctgaagctactgtattgagatttgagagtactatatagtaatcaagtggataataggcactcgtt

SEQ ID NO: 34526 - DNA, 923 bp, Zea mays
  Clone ID: UC-ZMFLMO17281F10_FLI
gtcgctggtcgttgcctgctgcggattgccccactcactccgctgctgatatttcgtttggttctcctttccgtcttgtccgtcgccgaggccttccgctcgctccccagctccagcaggcagatcagatccatccaaccacgaaccggaaggaaggtaggaggcctgaggggctgaagttgaaccatgagtgccgtcgcggtttcgtcgtcgctgaacccgaacgcgccgctcttcatcccggcggcgctgctgcaggtggaggacttctcgccgcagtggtgggacctcatcaccaccaccgcctggttccgcgaccactggtcccgcgagcacgcccacctggacgagatagccgagcagctcgagttggtcgccctccttgcctacgatgaggatgaggacctcttctacggcgagcaggcccccgccgccgccgccgcccttaagacagattcggtgctcaaggcgctgaacttgggctccccgaagagcggcgacgccccgcgggggttccgggagaaacccaggcactccgagaagccgaccaagtacgccggcagccccaagagcagcgctcctcgcgtgatccaccagcctcgctaggttcgctggccggcccctgatggggactcggtgactcacatggaaggctgctgcctctctagcagcatctgctactggctgcagctgccgtcggcgtcgtggtctgtctgtcaaagtcgaagtaaaaaaacgtgagtagttgtactactgtagaagtttcttttgtatagcatgcacgtaagaaatgaccaaaaaatataacaagaatgcagctgttagtttactgctgctctcctcgtgtgtctagggtgcacttctgtaagcaaacgtatatgatgtgtaatggcagacagcttaatgttacaactagctcttct

SEQ ID NO: 34527 - DNA, 1491 bp, Zea mays
  Clone ID: UC-ZMFLMO17281G01_FLI
cgagaaaggatggcgtcgtggtcgtcgccctcagccgccgcctcgggcgcccgattcggccccttcccgagcggagggcagcggctcgcgccgtgtccgtcgctcgtccgcggaactcccgccccgacgctcgtcctcaggccccacccggacggccgtggccatggcctcctcgcgcacaccggcccctctccctcctcgcggtgccgcgccgtcgccgccgaggtcgggggcctcaacatcgccaacgacgtcacccagctcatcggcaacacaccaatggtgtatctcaacaacgtcgtcaagggatctgtcgccaatgtcgctgctaagctcgagattatggagccctgctgtagcgtgaaggacaggatagggtacagtatgataaatgatgctgaacagaagggcttgattactcctggaaagagtgttttggtggaagcaacaagtggaaacacaggcattggtcttgccttcattgctgcttctaaaggatataagctgatactaacaatgccttcatcaatgagcatggagagaagagtcctcctcagagcttttggtgctgaacttgtccttactgatgctgcaaaagggatgaaaggggccttagataaggctacagagattttaaacaagacaccaaattcttacatgcttcaacagttcgataaccctgccaaccctaaggtacattatgagactactggtccagagatctgggaggattcaaaggggaaggtggatatattcattggtggaattggaacaggggggacaatatctggtgccggccgttttctcaaggagaaaaatcctggaattaaggttattggtattgagccttctgaaagtaacatactctccggtggaaaacctggtccacataagatccagggaatcggcgcaggatttgttccaaggaacttggatagcgatattcttgatgaagtaattgagatatcaagtgatgaagctgttgagacagcaaaacagttggctgttcaggaaggattactggtcggaatctcctctggggcagcagccgccgccgccataaaggttgccaaaagaccagagaatgctggaaagctgatagtggtcgtgtttccgagcttcggcgagaggtacctttcatctgtcctctatcagtccataagagaagaatgcgagaacatgcagcctgagccatgagggagccgtcactttaagcgggcatagtaaatgtttctgaaataagacgcgtagctagcatcagtttgctccacttggtatcatttggccatgctcactctatcctttcgctagcctctatgaccggaactaaactggtgtgtgagaaacatccacgactctcctcccaactgctttcctaaagcgaaaggataacacttcttaataattgtttatacgattgaagctgatttgattggtaattgtaaacaacttgtctttggatctttgaagtcaaacaaagtcagttggttg

SEQ ID NO: 34528 - DNA, 776 bp, Zea mays
  Clone ID: UC-ZMFLMO17281G11_FLI
tctcgctccgcttatcatcatcatcaacatcatgaaagtgacagtgattggacttggtttcgtgaaagctgaaggtgtggttaactccatgactaggcatggagaccgcagagaacttctcaagggcccgctgtattatgcctgtgctataactctgacaacaatagttttctggaggacatctcccatctcaatcgcggtgatctgcaatttgtgtgccggagacggtgttgctgacatagctgggagacgattcgggcatgttaagctccctcacaaccctgaaaaatcatatgccgggagcatcgcaatgttcttggcaggtttcatcgcatcagtactgttcatgtgctacttcaacattttcgggtttgttgagaagagctggagcatggttgctgcctttggtgtgatatccctggctgcagcagttgtggagtcactcccgatcagcacacgccttgacgacaatctgacggtttctgtcgcatcagtgctagttggcgcccttgttttctattccattggagccagaaacctgtgctgcatgagcagcgaagtcaggagaagtatcccagcaaccgttggaatggtgtttgcaggcagcagctgaaacatgtagccacagtccaggagcagagttgagcagaaagtgcagagaaaggagttctcttcaatcctgatgtgtgtgtatcttgtactgtaaccattttcctgtctaagcagacattcttgtaactttattaagaaagaggtaaagcgagaataagttcatt

SEQ ID NO: 34529 - DNA, 1565 bp, Zea mays
  Clone ID: UC-ZMFLMO17281H12_FLI
cggcgatgcggatggtgtcccgcaggggcgccgtgcggctggtgctcgtgtcggccaccgcctgggccatgctcgggctcgtcgcgctcgccttccacctccggccatgcagctcccgcgtcgcattcctctcagctctttgcaaaaaagacagtaaagttctctctgtgttggactcgatggggctctcatccaaaccactccaccgctgcccgatacctgttgcggatgatccaaatgttgttgtcataccaaagaggactcccaacacaattgtgaagaagttggcatatataactgttgacaaacaggataaagatccctcaccgctgtttggaggacgtcaaaactggaaacagagggaggagagctttaaactgaactctaccatgaaggttcactgcggatttatgaaaaatagtggtgcagatatggatatcattgatgtcaagtacatacagaaatgcaaattcgtggttgcctctggtattttcgatggttacgacatccctcaccagccatccaatatcagccgccggtctcagaagctgttctgcttcctgatggtggtggacgaagtatctcttgattttatccaaaagaacaccaccgtcaagatcgacagcgctggagggaaatgggttggcatatggcgacttctaacagtgcaccgcctcccattcgacgaacctagaaggaacgggaaaatacccaagatcttgacgcacagactattccctcaagcttggtatagcatttggattgacgggaaaatggagctcatagttgatccgctgcttattctcgagaggtacctctggcgtggaaaatacacattcgcggtggctgtccacaagcatcataggagcatctacgaggagggcgacgcgatcaagcgacggaagcgctacgcccgccctttggttgatcttcagatgaagatgtactattacgaggggatggagccttggagcccgaagaaaaagatgcctggcgatgtgccggagggagccgtgctgatccgggaacacacagcgacgaccaacctgttcagctgcctctggttcaacgaggtgaacctcttcaccccacgcgaccagatcagcttcggctacgtggcgcgcaggctcggcgacgctctcgagctcttcatgttccccaactgcgagtacaactcgctgttcgtcctgcacaggcacacgagggagcactcgtctaaggtcgagtgggccaaaacggtcgacgagatcgtggagaaggggctgagggagagtagaggagggttggggctgtggactccgtaccctgcggacctcagctccgtggaactccctgctgtaagaagaacttcgccggcaggataaggctaggctgtcaaagaccacaaagctcccagcctagcctgccgatcctgtgatctttgattcgttcatggttgtacagagtagaactccactgtttgtttgttttttttggcgtagattctgtaggctgacgcttggagtttgtcgcttccagttctgtacaacactcatctacggaggtagcacagaaggatttctcac

SEQ ID NO: 34530 - DNA, 2079 bp, Zea mays
  Clone ID: UC-ZMFLMO17282A09_FLI
gtcggcacaccggcaacgggaaaggaagggataccgacgccgagcacgcgccgagcaacgtctcgaaaaggccatgcaggacagcgtcgaggtgctgttcctagacggcgtcggggaggtcgccgtcaccatcggccgcaacggcctctctgcacgccccctccacccggaactgatctcttcatgttggtcgtccattacactgcagcctaaattagacagcaaaatcaacttttcagatgtttatgccatagagatgcttgataagggtcctatctgtgggccttggaatacaaagactgctattcaaggcaagaaaaatattgagatgcaccggtttgtcgtacatgggattaccagaagaaggaaaaacccttctccgtgggtaccttgtgaatatatttttggtcacaaagacttgaagatctgcaaagattggtttcagcgtctcatttcgtgcataaacaatgaaagtggtagaccaaagaacttaatggtagatatgctgcatttcttttcttctcttgaccaccatagcacttcagcagacatgctatgtatattcggcatttcttcttctagataactcatcaacacactataggtatttgttcatccattgtgtggaaaaggtagaggggtcagtaactgggaaacagtgtctccgttatttgctagagcaaaaataaaaacaaaggtgatagtgacagagagagcagggcatgcatatgacacactatcatcattatcagatatagaactgaaggcatttgatggtgttgttgcagtgattctactgaagaaccatgtattggagatcaggataacccagtttccttcccaaatgactggtttaggcttggcataattccttctggctcaactgatgctattgttctcagcacaactggggagagagatcctgtcacctctgctctgcttattattcttggcagaaaggtgtcacttgatatagctcaagtcgttagatggaaaactagcccagcagctgaggttttgcctactgtacgctatgctgcttcatttgcaggttatggcttttatggagaagttatcagggagagcgaaaagtaccggtggatgggtcctgcacgttatgacttttctggaacaatggtctttctgaagcacaggtgagtaatggttgtactattgtagcatgctgttgacaagttaacaatctctggacattttcaggtcatatggggcaaaggttgcttttctcgatactccatacactcattcgcttacagcatcagcacaggatgatataactggagcacaaccactacaatctcgttggaagaaacctcgcaaaataatctgcagaacaaattgctttgtatgcaaagaggcttcaacatctggacaaaatccagatgatgttgcagacaactccagaacaatatgcgagaaccagaagtgggtctggtccgaaggacatttcctcagcgtcggtgcagctgtcatttcatgtcgtaacgaaagagcccctgatggcctggtagctgacgcacacctttcggatggttttcttcatctcttgctcataagagactgccctcttcccctttacttgtggcatctaacacaatttaccaagaagggttcagatcccctgtccttcaagttcgttgagcatcacaagacacaagcgtttacctttatctcatcacatgacgaaagtgtttggaacttggatggagagatgtttcaggcatgtgaggtatctgtccaagcgtgccgggggcttgtcaacttctttgcttcggggccagagctgtagtaatgatactcgtaagttcctctttgcatgaacgaaggatgccaggagttcatattttttatttagagagtcccttatttcgacatgttgtacactcttatttgtattttagtggagacctagaacactttgttgatagatatactgttaatatttgttgatagctatgtggcatggaaactacaacccatttgtgctatagaatagaggaacaaaaggttttgattgaattaatgaagtaaaagtttattttctgttttgcgagaaaaaat

SEQ ID NO: 34531 - DNA, 1527 bp, Zea mays
  Clone ID: UC-ZMFLMO17282B08_FLI
aaacttctaaccaaaacccctaatgtctcgaggtggcgcaccccaacaaactggctccgcctccttcctcctcccctccggcctccgccgctgccttcttttccccgtgcgcatagtcgctcgcagaggcgccgacatcacttcgtccggaccggaaacacgcacgaagtgaggaccagcaccaaacaccgcgccgcttctcctatatttgttcctctcccggagccgcatcgtgtgtaagcgtgtggcggatccatggcagcggcggcggatacctcggaggcgtccgcggcaggaatcgcgctcgcagaggccaatatcaactgggagaggttggacaagacgaggtttcatgtgattggagctatcctgttcacggcccagcaaggtgctctgcacccaacagctgttgtgaagactaggatgcaggttgctgaaggtgggcttgcacatatgtctgggtttgctgtttttaggaggatattgagaagcgatggcatccctggcattttcagaggatttggcaccgctgctgttggagctctgcctgggcgagtgctagctctaacatcactggagatctctaaagaaatgacatttaagtattgtgaacattttgatctgtcagaggcgtcacaaattgctatagcaaatggcattgcaggtctaatgtcgagtatctgttcatgctcatactttgtgcctctagatgtgatttgccaaaggctcatggttcaaggattgccagggatggcaacatacaggggcccattcgatgtgataaataaggttgtcagaacagaagggatccgggggctttatcgaggttttggtatcactatgttgactcagtcgccagcttcagccctttggtggagtgcatatggtggtgctcaacatgctatttggaggagtttgggttatggaaatgactcacaaacaaaaccatctcaatcagaacttgttgttgtccaagcaacagcaggaacaattgctggtgcttgctcgtcgattatcaccactccagtagataccatcaagactcggcttcaggttatggacaactatggtaaaggcaggccttcagtcatgaaaactaccaggctgctgcttgatgaagatggctggaggggattctatagaggttttggaccgaggtttcttaacatgtctgtctggggcacatcaatgatcgtgacatatgagctcataaaaaggctatccgtgaagtctgaatgacacattttggtggattctcaactaaggtgatttactgttcaaaatcatctatacagatataggcaatcaagtcagtttgcctcgcgaagagtataggcgagtattatgatcgggtgggatgcagaattatggtttagttgcataggataacatgcttctgtatgacacttgcgatgtatatatttttgctaaagagccctcctttcaggatgtttgtagccagcttcttttggatgtaacagatggaggccaagacgcctgttctgtctaatgaggcacattatatgt

SEQ ID NO: 34532 - DNA, 834 bp, Zea mays
  Clone ID: UC-ZMFLMO17282C08_FLI
tcaggagatcaaaaaataggaaatacccggaatgggtgcaccaggcaaatccaactgcagtgtaatggtgataggtttattaatatgtccaatatgctattccctgactccagagttaaactttctgttattggggacagcaaatgccaattggaatgcatgaaaaaatgctcctgcactgcatacacttattctgtattggatggttgcagcctatggtatggcaatttaacaaatatgcaggacggatataataatgggagtggagcaggaactctttatcttcgtgttgctgcatcagagttagagtcaaccaacagttcaggtcacaatttagtttggatagctggtgtacttccttcaattggatttcttattttttgtctgatcttgtttttttgatctcctgatccaaataaacaagatcagacaaaaaataggaaatacccggaatgggtgcaccaggcaaatccaactgcagtgtaatggtgataggtttattaatatgtccaatatgctattccctgactccagagttaaactttctgttattggggacagcaaatgccaattggaatgcatgaaaaaatgctcctgcactgcatacacttattctgtattggatggttgcagcctatggtatggcaatttaacaaatatgcaggacggatataataatgggagtggagcaggaactctttatcttcgtgttgctgcatcagagttagagtcaaccaacagttcaggtcacaatttagtttggatagctggtgtacttccttcaattggatttcttattttttgtctgatcttgtttatttggatcaggagatc

SEQ ID NO: 34533 - DNA, 1433 bp, Zea mays
  Clone ID: UC-ZMFLMO17282D05_FLI
gatatgccctcaaatgggcagtctaaacccttgttccagtcccaagaagcaactatactacagcccaaaaatgaagcaacgtgggtgtaccatggacgacctggtgatggaaaggttggaacatcaaacaaaagcagaccatcgaccagtattgggttcatcaataaaaatcatcaatcagtaaatgctgcaacttttgccatgaatttgaatggacagaagattgtcagtgaccatgcaaaatcagcaggcacaactgcaatgcctgtccaggtaaatataccaaacagaggtcttgatgctcctcggaacatgttctcagcatttccagctgctgttagggagaaccatagcattccaccagctccaatggctcaatcttggatttcatttggtgctactacagagaacaaaccaaccattgtcagcccaacttcccttgacaataattgtggctggaaaatgccatttgctaacgtccaaccttctgatgataccaaaataaatgccgttcctcagttatttaggcatcctgtccaggtagctagagagaactcggttcaaagcaagggtttggtaatatttccccagttggtgcagccagatttcgcgagatcacaagggcaaccacagtggcaggggctggttccccacatgcaacagaagccaggcaaggatgtactccgcccggacttgaacatcgggttcccatctccacgttcaccaccagcccgacaatcgtctggcatcaatttggaagcacagcagccagaccttgctttgcagttatgagctggggatagacactaccgggatttatgctataatctctaagcatgtaaaggcacgatgagctgaggtgtgaaagaaagcgaggacaattgggacatccggtacagggatcggtgatgatcgattgggatgtaggccttacatgccacatggcatcatcgcagctcatcaactcatcgcgtcgctgtacaaaagatatcagaaaatggatggatggacactgcttgaaatgagatcatgtctactgggggcattgtgataggagttcaaatcccagcattcggagaaatgctttgggagtttgggtggcatacatgtaggtagcatactagcaatgcccatgatcagaatactttggaggaacctctctgaccacaatacagctttcttcggtggaaattttggcaccagaatttaggctttcatttggtagtgtagacccctgtgtaatgcccgtatcgaaatgtatgttggttgtaaatggttttgcgttgaatagattgttagagtagggcagtggggagtggcctttacccccgtcttctgaatgaaattgcttcttttgtccatgatgtatgtagtagcaggaagccaggaactgaggtctgtgccctattcagttcaaatggcatgctgaagct

SEQ ID NO: 34534 - DNA, 1698 bp, Zea mays
  Clone ID: UC-ZMFLMO17282F05_FLI
ctccgccgcaggcaaggagccccccgcaggcatggcgccgccccgcaaatctcgctggggcccaccgccaccgggcgttgccggcgacaaggccgcgccatccacctccgcccgccgcaccccgaccccgacccccacccgcacagcggactccaggcgccatccgggggcccctcacgcgccagcaccgcacgcccgcaaccccgggtcgcaggcggtcgctctccggccgcaggctcgtccgcaacctccggcggtggagactcctcccccgcagccgtacggcttccacaacctggaccgccgcgtcatgcccctcgccgacggcaccgtccgaacctacttcgccctgccccctgactacagcttcgagccggtgcccctgccacccctcccacaccgcctcctcccccgcgccgccccggacctctggccgccgccgctacatttgcagatgccgccgcacgaggctaggcgcaaacaccctgccgaacaggacgagggcttcgcgaggcaccccaagcagccgcggctcgacgagccgcatcaaccgccgccgcatgccaaggtggacgggcatgcgctcaggagggcgttcctcaaatacgccaagatgctcaacgagagctcggcgcagaggcggagctatctcgagggcggccgtgtcccgtgcctcgcctgtggcaggtcttctaaggactttgctgatgtccatggacttgtcatgcatgcttacaacccaccaaatgcagattcacttgttgatcatcttggtttgcacaaggcattgtgtgttcttatgggatgggattatacaaaagtccctgagaactttaagggctaccaatcattaccttctgaccttgtccaagcaagtagggaggacctcattgtctggccgcctactgttatcattcacaatacttcgactgggaggaagaaagatggtcgcttggagggtttagggaacaaagaaatggataaaaaaatgacagaactagggttttctggtgggaagtcgaagtccttgtatggaaaggaaggacatatgggtttgacacttatcaagtttgcaaacaactcatctggcttgaaggaggctgagcgtcttgctgagtatcttgagaggcaagatcgtggacgtataggttggtcacgcgctcatgccagtcgttctgtagattcagatcagaaccctttgttggtcgagacggataccaggacagctgagaaaaagaggatactttatgggtacctagcaattgcatccgatctggacgaactagactcagattctagaaaaagggcttccctccagagcagaagagaattcgacccaaacgaatgatctcttgtcataaagcccacccccatcagttcattaaatttgcactgaggcgtgcatacctatctctgatcccaatttataaattcatactgctgctgtggagaaaaggtgttaccttgaatataatatctgccgctagttgagttataaccactagttctggaagctgtatttgcactatgtgtattttcttgcacgcgtctatggctcacgatttgactggctatttggaagagatctgtcttcctatttaagtatcgcccgttgcatgattcattgctcttcatttggaagtgatgttgcatagacctcctgattggtatcttttatgtattatagcattccctttc

SEQ ID NO: 34535 - DNA, 3003 bp, Zea mays
  Clone ID: UC-ZMFLMO17282G11_FLI
gccacatcacattggcaggcgaggcgagggagcgagcagcagggcaaggcatccacacccacacccaccggacactccctgagaagcgagaagcgagaagcgaagagcggccggccaccatgttctggcacggggtcgcggaccggctgacggggaagaacaaggaggcgtggaacgagggaaagatccgcggcacggtgaggctggtcaagaaggaggtgctggacgtcggcgacttcaacgcctcgctcctcgacggcgtacacaggatcctcggctgggacgacggcgtcgccttccagctcgtcagcgccaccgcggccgaccccagcaacgggagccgcggcaaggtcgggaaggcggcgcacctggaggaggcggtggtgtcgctcaagtcgacgacggacggggagaccgtgtaccgggtgagcttcgagtgggacgggtcgcagggcgtcccgggcgccgtcctggtcaggaacctgcagcacgccgagttcttcctcaagtcgctcaccctcgagggcgtccccggcaggggcaccgtcgtcttcgtcgccaactcgtggatctacccgcacaatctctactcccaggaacgcgtcttcttcgccaacgacacttatctgccaagcaaaatgcctgcggcattggtgccttaccggcaggacgagctcaagattctccgcggcgacgataatcctggaccatacaaggagcacgaccgcgtctaccgttacgactactacaacgacctcggtgagccagacaagggtgaagaccatgcccggcctgtcctcgggggcagccaagaacacccgtatccccgtcgctgcaggaccggccggcgtccaacagagacagaccccaactcggagagcaggctgtttctgctgaacctgaacatctacgtcccgcgcgacgagcggtttgggcatctcaagatgtcggacttcctcgggtactcactgaaggcgatcatcgaggctgtccttccgacgctggggacgttcgtcgacgatacgcccaaggagttcgattcgttcgaagacatccttgggctctacgagccgggtccagaggcgcccaacaacccactggtagcagaggtcaggaagagaatccccagcgagttcctcagaagcattctgcccaatggtagccatgaccaccccctgaagatgccccttccaaatatcatcagatcagatgtgttgaaaaaggctccagagtttaagtttggctggaggaccgacgaagagtttgcgagggagacgcttgcaggcgtgaacccagtgctcatcaaacgtctgacggagttcccagctaaaagtaccctggacccaagtcaatacggagaccatacgagcaagatcaccgaagctcacatccagcataacatggaaggcctgtcagtgcagaatgcactgaagaagaacaggctcttcatcctagaccaccatgaccatttcatgccgtacctcaacaagatcaacgagttggaggggaacttcatctacgccagcaggaccctactgttcctgaaggacgatggcacgctgaagcccctggccgtcgagctgagcctgccccaccctgatggccagcagcacggcgcggtcagcaaggtgtacaccccagctcactccggcgctgagggccacgtctggcaacttgccaaggcttatgcctgcgtgaacgactccgcctggcatcagctgatcagccactggctgaacacgcacgcggtgatcgagccgttcgtcatcgcaacgaaccggcagctgagcgtggtgcatccagtgcacaagctgctgagcccacactaccgtgacacgctgaacatcaacgccctggcacgccagacgctcatcaacgccgacggcatcttcgagcgcaccgtgttccctgcaaagtacgcgctggggatgtcctccgacgtgtacaagagctggaatttcaacgagcaggctctcccagcagacctcgtcaagagaggtgtggctgtgccggaccagtcgagcccctacggtgtccggttgctgatcaaggactacccttacgccgtggacgggctggtcatctggtgggcgatcgagcggtgggtcaaggagtacctggacgtctactaccccaacgacggcgagctccagcgcgacgtggagctgcaggcgtggtggaaggaggtgcgcgaggaggcgcacggcgacctcaaggaccgagactggtggcccaggatggacgccgtccagcggctggccagggcgtgcacgaccgtcatctgggtagcgtccgcgctgcacgcggccgtcaacttcgggcagtacccgtacgccgggtacctgccgaaccggccgaccgtgagccggcggccgatgccggagccgggcagcgacgactacaagaagctggaggcggggcagaaggaggcggacgcggtgttcatccgcaccatcaccagccagttccagaccatcctgggcatctcgctcatcgagatcctctccaagcactcctccgacgaggtgtacctcggccagcgcgacgagcctgagcgctggacgtcggacgccagggcgctggacgcgttcagaaggttcggaagccggctggtggagatcgagaagcggatcaggacgatgaacgacagcccgacgttgaagaaccggaaggggccggtggagatgccgtacatgctgctgtaccccaacacgtcggatgtcaccggcgagaagggcgaggggctcactgccatgggcattcccaacagcatctccatatgagcctcctcactgcctgagcggatggtttgtagatgttctgttacgctgtgtgtaatgtgtcgtttattcgttggttttgtcagtctcagggtagggaatggagatgttgattggatccatgatctgtagggttgagagaggagtcacgtctggagaatgttgtcaatgtgtgtttctttcttgttaagaataaaagttcgtcagctcatttatctctact

SEQ ID NO: 34536 - DNA, 825 bp, Zea mays
  Clone ID: UC-ZMFLMO17282G12_FLI
gcgagcagcaagaagaagtccggcgcgaggccgtcgggcgagggcaagaagagccgcttggtggagctggaagaagcgcgcggcccgcggagggcggagggcggcgaggcgaggaaggggaatacgcagcagcagcaagagaaggcgaaggcgaaaaggctggtgaagtggaagtgcgcgagcgggtgcggtgcgtgttgcaagctagacaaggggcccgacttccctattcccgacgagatcttcgccgaccatcccgatgacctccagctgtacaggagtatgatcggctctgatggatggtgcattaactacgacaaggccacccgcacctgcaacatctaccaagaccgaccttccttctgcagggtggaaccaaagatttttgatgaattatttggcgtgccacgcagcagatttgaccgggaagcttgcagtgcttgtgtggataccatcaagatggtgtatggtgatgactctgctgaactcagtaatttcaagcgtgtgataagggaggaaagtaacaagctggaaagcaagaaccaagataaattgttggatgcatagatcctgcatggatctgcaatagaatctacagcagaccacattatatgcgaaggtaaaattgagaagtgaacaatgctcttagggttaaggtggaaaatggaacatcttgagggaaatactcagtgcaagcttcagttctgaacacgtccttgattcttttagtcaagcttggtgtgttcagaagtctggtgtttttttgtatatatagaaaattgttagcaggcaagagcatttcagttgatttggttgttcccagac

SEQ ID NO: 34537 - DNA, 1688 bp, Zea mays
  Clone ID: UC-ZMFLMO17283A11_FLI
ggtgttctctggccgctgtcttttcccgaggacctaacccaaggcggtaggtaccagctaaaagtctaaaggcgaccaccggaccgggcggcaatgacgaccgccgcgagggagaggcgcctgccgccgacgctgcccctggccacgcttatcggtcgcgagctccgtgcggggggctccgagcgcccggccctgcgctacggccacgccggcttcgccaagcgcggcgaggactacttcctcgtcaagcccgactgcgtccgcgtccccggggaccccgcatcggcgttctcagttttcgccgtgttcgacggccacaacggcgtgtcggcggcggtctatagcaaagagcatctgctcgagcacgtcatgagcgcgctgccgccggacatcgggcgcgacgactggctgcaggcgctgccgcgcgctctcgtcgccggctttgtcaaggccgacattgatttccagcgcaagggggaggtgtcaggaaccacggcgacactggtggtcatcgatgggttcacggtcacagtggcgtcggtgggagactcgcgctgcatcctggacacgcagggcggcgagttgcagctgctaaccgtggaccaccgcctggaggagaatgcagaggagcgggagcgcgtcacggccagcggtggggaagtaggccggctcaatctcttcggtggtcaggaggttggtcctctccggtgctggcctggtggcttgtgcctttcaagatccattggggacatggatgttggggagtacattgtgcccattccacatgtcaagcaagtcaagctatcaaacgctggaggaaggctgataatagcatccgatggcatatgggatgcattatccaatgaagcagctgcaaaagcatgcagaggattgcctgcagaactggcagcgaagcttgtcgttaagcaagctctgaaaacaagcgggctaaaggatgacaccacctgtgttgtagttgacattatcccatccgatcatttgacatcaccacaattgtctccaaagaaaaatcataacaagttgaagtcactttttcgtagaaggtcgcatagttctgttggaaagctcgggggcaagtctgcctccattggttctgtggaggagttatttgaagaaggctctgcaatgttagaagaaaggttgggcaggaatttgtctttgaaagcagtttcagcaccttttcgctgtgcaatctgccaagtggaccaagagcccttcgaagatttgatgagagataatggaggtggttactgctcttccccatgcgctccatggggtggtccatatctctgtttggactgtcggaaaaagaaagatgcaatggaaggtaaaagatctagctgctccacagcatgcaggtgaaacagtccttgcctcaagcagaaaagaaccgatgagagaggataataagttgctggacccaagtataattgtttgctgaaactaactgtattgccagcccggtaaaagacatatttggctggtagtaagacctaactagtctgttacctgcgcacaatccgaatggaaaagtttgttgtcgttgaggacatagctcaaataacttgagcttgtagttttgatgtaccctgtagcgtgccttgtgcagggaaaaattgacctgcctattgctgtttttttttataaaatagctatcgagggtgatt

SEQ ID NO: 34538 - DNA, 1102 bp, Zea mays
  Clone ID: UC-ZMFLMO17283B01_FLI
gtgaacctggatctcaagatgaacgaggctgccgccatgaagctccccttccgtggcatgccgtataacatgaaccagatgtacctcaaggggagcaatgccaattccaatgtcaatgcgttcaagatgaatgttggagtcaacaagtactccaatagtccaaacgggaaagacgccaatgggaaaaacaatggcggcagtggcggcaacaacaacaatgggagcgccaacggcacttctgtggctgacaagcgcttcaagacattgccgacgagtgagatgctaccgaggaatgaagtccttggtggatacatctttgtctgcaacaacgataccatgcaggaggatctcaagaggcagctttttggtttgccagcaagatatcgtgattcagtccgagcaatcactcctggcttgcctcttttcctctataactacacaacccaccagcttcatggggtatttgaggctgccagtttcggtgggtccaatatcgatcctactgcatgggaggataagaagtgtaaaggtgaatctagattcccagcgcaggtgaggatctgcattaggaagctgtgcaagccgttggaagaggattccttcaggccagttttgcaccattatgatgggccaaagttccgccttgagctctccatcgcggagacattgtcactgctagacctatgcgggaaggaaggcatctgagctgtcgaggaggtggtggtggttgccttgtgagcttctagtaaataccaatcatctttgtatgttttgtggatggtggttggcaacgttgtttatttatgcgcaagctgctggtggtttcgggatggaaggaaggacctggtccctgaaacaagctgcggagagtgagcctgtcagtgtattgtgtctggcgtggtcaagaaccaaatcaatgttggaccgaccgactgagagtttggagtgtgtatgttttgctattactcttatctctagtagagtgtgggtatacctgggcagaatgtgtccccaaaagttgggggcctgtctgtgtactgtgtgcgatggacgccctaagtaaaaaaagggcaggtgatggtcgtgctccaggtttgtgttt

SEQ ID NO: 34539 - DNA, 948 bp, Zea mays
  Clone ID: UC-ZMFLMO17283B02_FLI
gtttatcgagtcaggtgagagggcggagcagatctcgccggccggggccatgggtgctgccggcgcgatccggcgggcggcggcgtcggtggtcgacagggcgtgcgcggggacgcggggcttccgccgcgcgctggcgcggttcgcgccgcggccgtcggcgttcggccccgccgcggacgcggaggccgcggcggtgcgcgccgtgcggaacctccggaccttccggttccactacgccgtcctgcagtgggtgctgctgctggcgtccctggcgccgcggcaccgggcctccgtcgtcttcctcatggcggcgtccaagggcctcctcgtctacggcggcctcctcaaggcgttccccaactcggcgctgctccggaggctcctcgaccgccgcctcgtggccgccgtgttcgtcgcgctcgtgctcgccgacatcgtcgccgcgggcgccgtcgccaacctcctggccgcgctcgccgcgggcgtccccgtcatcgtcctccacgcgtccttccgcgtccgcgacgatctcgaggcgccctcgccggacgcggcggcggcggccgagaacggcaaggaggacgaggcgtcggcggtcgtcgagaagaaggaggacggcgacgtcgaggcggggcccacgcggcggtccatggcggcggcaccaagatcacccaaatgaggaatttactagtaatacgagctagtgaaaaccatacgtttttcgtaggtttttaatttaactactggccccgttgtcatggaacataggaacaattcgtggtcaaacctgtcttcctgcctgcttgttgattcatactttgagcctaggattttttttttttggagaagttcaatcagtagaatgtagtggtagctgtgacagacattgaacgtggaattgaggattaatacttataggggactcagttgtgaagtcctctattc

SEQ ID NO: 34540 - DNA, 1652 bp, Zea mays
  Clone ID: UC-ZMFLMO17283B08_FLI
cccccttcgctgcccctgcccggtcggttccgatggggtacgtgctgtcggcggtggcgagggtgctggagcagcccacggcgtggggggcggcccgggagatggcgctcctcgcggggccgctctgggcggcggtcctcctcggcctcctgctcggctgggcctggcgcccgcgctgggcagctggcctcgtcgccgcccccgcccccgccgccgctgcgcagccgcccttcgccacgctcggtttctggaaggcccagctccccgcccgtctccgcgccccgctcggctccgccgccgccgtgcggcacggggaggaggaggaggaggacgaggtctccgtgcgaggtggcaggtcgtcggtggcggcgagcgaggagctggcggtggggaagcgtgacctggcgaacctctggaggctggtggagggcagggacggcggcccggcctggatcaagatgatggacaggtcgcttcccaccatgacctaccaggcgtggcggagggacgcgcagaccggacctccacagtatcagagtagcagcatctttgaggacgccactccggaggaagtgagggacttcttcggggacgacgagttccgtgtgtccaacaagtgggacgacatgcttgtttaccataagacgctggaggagtgccagaccaccgggacgatgaaagtgcattgggtccggaagttccccttcttctgcagtgacagagagtacataattgctcgccggatatggaaactggggggcgcctattattgtgtcacaaagggtataccatgctcgtccattccacggcgcaacaaacctcgaagagttgatctgtattattcaagctggtgcatccgtgcagtggaatccaggagagggaacggaggagggtcgacagcgtgcgaggtgctcttgttccaccacgaggacatgggcatcccgtacgagatcgcaaagctcggtatccggcaagggatgtggggatgcgtgaagagaatcgagcctgggctccgggcctatcagcaagccagggctgcaggggagccggtgtcacggagtgccctgatggcccagatcaacaccaaagtcggcgacagctttgtccggtcgctggagtccgacagcgacgggtccgaaaccgtggaagcggaagagaagcctgcgaggaaccgtgtggcgaggttccttgtgcttggaggggcagttgctctggcctgtactcttgaccaagggctcctgacgaaggctctcatcttcggcgtcgcgcggaaattcgtcgggcagaggaagacactgtagcatctctggcatttatttctcagcgtcgtccgcttggcccgtggtccgcactaaccggacctgtcctttcactgtcgtagagtggaggatagaggtggttcagtgtctgcctaattggggcaaatgccattgaccattgtggctgaaagagaacagagctgatgaaaaacattttggtgtacagatatgctgccggctgttggatagcgaggaatggggaatagagcaaacaatgtacttctcgtttggagaacggaactcctacgatatatataaatgtgtttcatctaatcttgtatctcagacaagaacagatcagatgactgtgcagatgagaacaagcatttttct

SEQ ID NO: 34541 - DNA, 514 bp, Zea mays
  Clone ID: UC-ZMFLMO17283B10_FLI
tcgagagatggagatctggaggacgctgtgactgcggcggatgggatcttggctgccccatcagagtgctcaacggtgatggctgtggctccttgcctgaaggagagtcacgggacagaagatcggttgagatatcgatcaagggtgcaaagaatgagacgatgttgaagctcgtgaatatcacggaggacttgtacatcctctacttcgactcgagtatttcaccattgcagtgcttctcaacagggatagcgattgtgcacagccgagcgccagagctttgccccaaactgtgaatcgcgcacagccaggcacgcacccgagctttgccccccaactgtgaattgcaaagcttggtgtagctgaattacaaagattcgtgaagcactatgtacatgtagatagtagaatgggaataattcttgttatttttaacttatataattttgagagagaaaagcaggcagctgttttcagactgcttttaaatcgtcaatctgttggtttggccgat

SEQ ID NO: 34542 - DNA, 843 bp, Zea mays
  Clone ID: UC-ZMFLMO17283C09_FLI
gcgttcacccccatccatccagccagccatgggcggcaaggactgcggcaaccacggcgaggacgacctgcggcggtcgtgccggcgcctgctagcgatcctcctagtcctggccctgatcgtgggcgtgatcgcgctgatcatctacctggtggtccgccccacgcacccgcgcttctacctacaggacgcgtcgctccagcagctagacctctccaactccacctccccgtcctcgtccctcctctccacgacgctgcaggtgacgctggcctcgcgcaacccgaacgagcgcgtgggggtgtactacgaccggctggacgtgtacgcgtcgtacaagtaccagcaggtgacggtggccgcggcgctgccgcccgtgtaccagggccacggcgacgtggacgtgtggtcgcccgtgctgtcgggccccggcgtccccttcgcgccctacctcgccgacgcgctccgccaggactgccaggcgggctacctcgtcctccaggtcaaggtcgacggccgcgtgcggtggaaggtcggcagctggatctccggccactaccacctcttcgtcacctgccccgcgttcctcgtcaccgccggcggcaacggcgcccccggcgcttccgggttcaggttccagaccaccacgtactgccacgtcgaggtttaaattaggagcgagaggaggggaaggaagcagagagccagagaccatggtggctacctctctagctgctgctccacctcctgccgttgcctggtgcggtaataactctctctctttctatctgtccgctgctggcgttactgctgctgcagtgatgcgggatgtaaaggaggggt

SEQ ID NO: 34543 - DNA, 735 bp, Zea mays
  Clone ID: UC-ZMFLMO17283G11_FLI
cttgttttctggttagcgcgcttttaccatcccagccaggggagaaaattgtacagtatcctattcgtccagtagatactacaacagattttgaaggaacaacaagccttcaaccaactcaaccgccatcagggaacgctcctcctggaggtcaatctgtagcaagacccatgccacgacaaatgccgcagcaacctatggttggggggattccaagagtggcaggtggagtaaccatggctgccttcaacgctgcctcacaggctggcatggctgggctaaatcctggtaacatgcctatgcagagaggcgcaggtggtcagtctcatccgcaccagttgagaaggaaggcggatcaagggatggggatgcagaaccctgggtatcctcagcagaagagacgattctgacgctatcaagatggagccatctgctgtatatcaggtgtttgaaacacgttgcctgtgtaagctgctgtagttttgttatcagcatccgaatgccaatgctggcacctgtaaaacacattaatcagtcgagagtccagataccagttgtccttatgggttatgatctaagctgctcgaatttggctgatttggtttgcaacagaaaggtcttgcttttgctcatggcccagtggaattatccacatgcgtaggaaatttagcatctatttggcttgagaaaagattttcattaaattctagtggcagtaaatatttttatggccac

SEQ ID NO: 34544 - DNA, 1276 bp, Zea mays
  Clone ID: UC-ZMFLMO17283H07_FLI
cttcagacaccatcgacaacgtcaaggccaagatccaggacaaggagggcattcccccagaccagcagcggctcatctttgctggaaagcagcttgaggacgggcgcacgcttgccgactacaacatccagaaggagagcaccctccacttggtgctgcgcctcaggggaggcatgcagatcttcgtgaagaccctgaccggcaagactatcaccctcgaggtggagtcttcagacaccatcgacaatgtcaaggccaagatccaggacaaggagggcatcccaccggaccagcagcgtttgatcttcgctggcaagcagctggaggatggccgcacccttgcggattacaacatccagaaggagagcaccctccacctggtgctccgtctcaggggtggtatgcagatctttgtgaagacactcactggcaagacaatcacccttgaggtggagtcttcggataccattgacaatgtcaaggccaagatccaggacaaggagggcatcccacccgaccagcagcgcctcatcttcgccggcaagcagctggaggatggccgcaccctggcggattacaacatccagaaggagagcactctccacctggtgctccgcctcaggggtggcatgcagatttttgtgaagacattgactggcaagaccatcaccttggaggtggagagctctgacaccattgacaatgtgaaggccaagatccaggacaaggagggcattcccccagaccagcagcgtctgatctttgcgggcaagcagctggaggatggccgcactctcgcggactacaacatccagaaggagagcacccttcaccttgttctccgcctcagaggtggtatgcagatctttgtaaagaccctgactggaaaaaccataaccctggaggttgagagctcggacaccatcgacaatgtgaaggcgaagatccaggacaaggagggcatccccccggaccagcagcgtctgatcttcgccggcaaacagctggaggatggccgcaccctagcagactacaacatccaaaaggagagcaccctccaccttgtgctccgtctccgtggtggtcagtaagtcatgggtcgtttaagctgccgatgtgcctgcgtcgtctggtgccctctctccatatggaggttgtcaaagtatctgctgttcgtgtcatgagtcgtgtcagtgttggtttaataatggaccggttgtgttgtgtgtgcgtactacccagaactatgacaaatcatgaataagtttgatgtttg

SEQ ID NO: 34545 - DNA, 3019 bp, Zea mays
  Clone ID: UC-ZMFLMO17284B02_FLI
ggaagaagggggcgagcgagaggaggccactggatcatctgctcctcgtgatgcgcgccgctcattgctgccgagcgctgccgctttcgcccgcttgaactcatcctcatccccacgccactcccccactctcgccgctcctcgccgccgtttcggccagaaaaccctagcaaatccttgctcgcagcagccagcttctccaagtgggagcaacccgcgccgccgacctagcgcgagccgtagcagctcccgccgccgccacccttcgcgtgccgcgccagcgccctcggccccgggtgccgccgtccggactccgtgatgccggttcttgacccgggaaagcggcttcgtcggccacctagtgcaggcaaccgtcggtcctgatgacttgaaatgcggcagcccttctacggcctcccacccagatgaagatgcagcttgtggaaccggaaggctcgaaggggatgggttctcctgggtgctcggagatagtcgaactggtggacgagccgaaagatgctcgttcgtgtgggcttacccacttgagggtcagggtcaagccagtggggcaggagcttggggcacggtcgtgctcggtggaggatgatcttgaccagctcatcagatcgatcaacgtgcgcacgtcggcgagggcttctgggcagacaagcacggataggcggcttattgcgcttgggaagtcgccagtgtcgagctcagagattgtggagtccgtgagcctgaagcaggccctgaggaagatgtgcatctcacaggcgtcggagatggcagccatgaagagactgtcaaaaccgacaggggtgtccaccccttctgattctggagcaatcaagaagctacatggctctgttgcagttcaaaccaatgaggagcaagatgacaatagtaaggcagggaaagtttctgtgaagcctgagaaatcgacaggaagttcagtgggtaagccaagtgaaatcagtaaggggcagagcaagagctcagccaagaagaatttgagatcagcatctcctaccatagggaatgttcataaaaccagaatccaagatgtgatcagtaacaagtcatcagagggagttgaaggtatttctgtagaagtaactctgccaaagcagagaaaaggtaaatcaatgaaaacatctagcccccgggctgttccagtaggtggctcacggttggtgaggccaatgtttcggaataaaacctcgacgaaaaagaaggtgaaacccgaacctgctatagtgcctgcatcacacaagcattgtgagacgaaaggtcctaaatctcacactagtaaacatcaggagtcccttcaggatgaacccagaaccccagcgccaactgacaagaaggctactgtcagctccaccactgttgatggagctgattttggcaccaaaggctgtggtgtcggtgtgatccatggctcgaaggttggtgagttgttaagatcaaaggagaagggagaatgctcccaaagctctaagagtagcattggtgattatagcaccagcacaagcatcagtgaggacagttatggcagcttcagtgctaacagaagcaggcctcacatgtcaaaggatgtgagatggggagccatcaggcgcatggctatccaacaagggagcttgggattaaagaacttcaagcttctcaaacaacttggttgtggggatattggcactgtttatttggctgagttagtgggctcagactgcatgttcgcattgaaggttatggacatcgagtacctcataagcagaaagaaaatgctcagagcacaaactgagagggagatactgcaaatgctcgaccacccattccttccaaccctgtattctcatttcacgacggacaacctttcttgtctggtaatggagttttgccctggtggtgacctacatgttcttaggcagaagcaacctaccaaaaccttttcagaagcagctgcaagattttatgtcgctgaagtcctcttagccttggagtatctccatatgttgggggtcatataccgtgatctgaagccagagaacatccttgttcgtgaagatgggcacatcatgctctcagactttgatctgtcgctgaggtgctcagtgagcccaatgcttgtgagaacatcatcagtagacagagatgagccaagtaggccttctggtccctgtgcacaaagctgcattgatcccctgtgtatccagccatcgtggagcaattcttcttgcttcacgcccagtctggtttcatctacaccgtcaaggacacggaggcctagagctgaacccctgaagaaaccatcacttccacagctcgttgttgagcctacggaagcaaggtcaaattcgtttgttgggacccatgaatatcttgccccagagatcattcgaggagatggccatggcagctcggttgattggtggactcttggaatcttcctttacgaattactctatggcaagacaccattcaggggaccggataatgatgaaacactctcaaatgtgatctcacagggcttgaagttccctgacagtccagcattaagcttccacgctcgagatctgatcagagggctgcttgtgaaagaaccggagtaccggcttggctcgtcgagaggagctgctgagattaagcggcatcccttcttcgaaggtctgaactgggccttgatccggtggacttcaccaccagagaccccgaaaaatattgatactgcagcaacactcgcgggaacacgcaagaaaaaggaaggcaaatgtctggaattccggctgaatggtgacgacatcgagttcgagctcttttagttgtagctgtagtggtagtcccaaggatatatcagtaccacgtaagctagcaagagtagtctttagtccctcttccttgcagatttctgttcatccttggtcatttcggacgttgggaagtaaggtaaggttggctgataagcatgtaactttatgcgttgttaatactatccaatattataagacgctgttgg

SEQ ID NO: 34546 - DNA, 1126 bp, Zea mays
  Clone ID: UC-ZMFLMO17285A04_FLI
ggtcggcgagcgcgccgtcagggcgctcgacgtctgcaacgcggcgcgcgacggcgtggaccaggcccgccgctgggagcgcctcgcggggctggcggcctccgcactgctggcgcccgccgaggggcaggtgcacgagggccagctctggcgcgcgcggaaggcgctctcggacctttccctgctcctcgccgacgatgccgccgccgcctccgcgggcgccggcggcgggctcgcctcgttcctcgcgtcccaccgcaaccgctccttcggccgcgcgcgggcgtcgccgtcccgcgcctcgccctccgcgcacttacgctcgctgtcgtggagcgtgtcccgcacctggtcggcggcgcgccagctgcaggccatcggagccggcctggccgcgccgcgcgccaccgaggcctcctgcggcttcgccgcgccggcctacgccatgggctgcctgctccacctcgccgcctgggcgctcgttgccgccgtgccgtgcccggaccgcgccgccgcgctgcaggcgcaccacctcccggccgcgccgccgcgcgccgcgttcccctgggcgccgccgctcctcgcgctccaggaacgcctcgccgaggaggggaggcgcaaggaccgccgcagctcgtgcggcctgctcagggaaatccacgcgctggacaagtgcgcgcagcggctcgcggaggccatcgacgccgcgccggtcccgcttaccggcgagcgggaggccgagctgcgtgaggctgcagcggaactcgccgcggcgtgctccgccatcaaggacgggctggacccgctggagagacaggtgcgggagctcttccaccgcatcgtgcgcagccgaatggcgggcctcgatccaccgatggccaatgcagattgagctctattcaagatcatcatcgtcttgccttcgatctcacagtgtggcggtgctcttgtgaattgtgatcagctagtggaaagtataaaatgtgtgtccttctgtaaaggattacacaaagaggaaagggaaggtgtcatctttgggtaaagatgattccttattcccatgttttgatgctgcatttgctgtatatccttgtgttttttgatagtgtcacgtctgtgcgcagct

SEQ ID NO: 34547 - DNA, 1603 bp, Zea mays
  Clone ID: UC-ZMFLMO17285B07_FLI
gcacatcctcttcttcccgttcctcgcgccggggcacctcatcccgatcgccgacatggccgcgctcttcgctgcccgaggcgtcaggtgcaccatcctcaccacaccggtgaacgcccaactcatccgctcggcggtagaccgcgccaacgacgcctcccgcggaatcgagggcgccctggccatcgaaatcgcggtcgtgcctttccccgacgtcggcctgccccccggcgtcgagtgcgccccggcgcttaacaccatggacgaccgcgaaaagttcttccacggggcccagttactccgcgagccgttcgaccggttcttggcggagaaccgcccggacgccgccgtgaccgacagcttcttcgactggtccgccgacgccgccgcggagcacggcgtcccgcggatagcgttcctcggcagcagcttgttctcgcgggcctgcagcgagtctacgctgcgcaacaaccccgtggaggccgcccccgacgacccggacgcgctcgtgctgcttccggggctgccgcgccgcgtcgagctgaggcgcagccagatgatggagcccaagaagcggccggagcgctgggccttcttccagcgcatgaacgctgcggaccagaggagctacggcgaggtgttcaacagcttccacgagctggagccggacttcatggagcactacaccacgacgctggggcgccgcgcatggctcgtcgggccggtggcgctcgccagcaaggacgtggcgacgaggggcgccaacaacgggctctcgccggacgcgggcgcctgccagcagtggctggacgcgaaaccagagggctcggtggtgtacgtgtccttcggcacgctgacccatttctcgccgcccgagatgcacgagctcgcgcgcggcctcgacctgtccggcaagaacttcgtctgggtcgtcggcggcgcggacaccgaggagtcggaatggatgcccgatgggttcgcggagctggtgacgcgcggcgaccgcggctttatcatccggggctgggcgccgcagatgctcatcttgacccacccggcggtgggcgggttcgtcacgcactgcgggtggaactccacgctggaggccgtgagcgccggcgtgcctatggtgacgtggccgcggtacgccgaccagttctacaacgagaagctggtagtggagctgctcaaggtcggtgtcgccgtgggatccacggactacgcgtccatgctggagacccggcgcgccgtgatcggtggtgaggtgatcgcgaaggccatcgggagagtgatgggcgacggcgaggacgcggaggcaatacgggagatggccaaggagctcggggagaaggccaggcgcgcggtggccaacggtgggtcatcttacgatgatgtcggacgcttagtggacgagctgatggctcgtaggagatccgtcaaagtctgattgcagcatgttcgtcttcgtgtgcacaatattaatctggaactcgtatacataaatttaatctcgatttttgttcaacatccttagtgtcgatgtttttttttcaaatatgcagctcgatcgacatgaagacgagcatgaaaaaacatattttgt

SEQ ID NO: 34548 - DNA, 894 bp, Zea mays
  Clone ID: UC-ZMFLMO17285B09_FLI
cgagtttctcttccccccctcctgcccactctccaacgcagcacaagcatctagcaaagctgcgcagcgcagccagcaagcaagcttggtccggagagacaacagatataagccagccagagagcagcagacggaggcatggcgacgtccgtggcctgcgccttcttcttcgacgcggagccgctgggcgagcccgggcggcacgcgctggacgcctgcgcgctctgcgccaagccgctcagccgcaacagcgacatcttcatgtacaagggcgacaccccgttctgcagcgaggactgccgctatgagcagatgcaccacgacgcggcgtacgcaaggcaggcggccagcagccggcggaagcagcagcagtcgcagcggagcagaggggcctcgtccgtgggcgccaaggcggacgtgtccgtggccagctagtcagtagtagtaaaagcaagcacagcgaggccgagaaaagaggaggaggagaagaagaaggccgtgctggttcaagcagcgctacagctgcaagagatcccgttggggggcggcgctccgctccgctccgcagctctcctggctggccgcgaggggcgctgcgccgcacaacgagtttcgtgcgcgaaacagaggcaagcgggggtggatggatctgaagaccgaagaaggtgacagatcgaacctgatctgcgggttggaagcttaaaccgacgccatacgtgctctgctccccttgtttatgtgttcccctgacgggaatcgggatcttctgggctgtgtgtgtgctagagcttgaggcgtgggggtgtcaggtgtgtgcgggagcaccatcggcctgtaataactgtacgaatcattccagcatatgttatgtgctagccctaaaattttgatcgc

SEQ ID NO: 34549 - DNA, 644 bp, Zea mays
  Clone ID: UC-ZMFLMO17285B12_FLI
cgcaaagcagcttcctttcgcctgctgacaaggactagtcgagcggcgagcgaggaggcggaggatgggccgcggccggggcgtgagctacgggggcgggcagagctcgctgagctacctcttcggcggcggcggcgacgaggccgccgcggcgcccgccaagccggccgcggcggcgcctgcgcctgcgcctgcgccggtgccggcggcagcagacggcgagaagctcaaggggatcccggccggcgtccgcggcaaccagagccagaccaacaactacttccgggcgcaggggcagaactgcggcaacttcctcacggaccgcccgtcgaccaaggtgcacgccgcgccgggcggcggctcgtcgctcggctacctcttcggcggcggacctcccgggagcaagtgatgtgatgggcaccttctccgccgagacttttcggagcaccgcctgcttgggaagcttgatttttactaagtccatcgtgacctgctggatgtgaagttaatttccatgaagaaatgtatgttcatgtgtacctctgtattctagaaatgtttatgtgtatctctgcaatttcgttggggtcggtcgtctcatcagtacctgtatgtgtgtgtgtcataaactgactttgtcctgc

SEQ ID NO: 34550 - DNA, 374 bp, Zea mays
  Clone ID: UC-ZMFLMO17285E01_FLI
ccattgccataagctcctggaacagaagaagcgctgaacttgtatcacatgagatgtaactggaactttgctccattgctatatttctcgcgtgcacacggtagtacgctgttaaggaacattgtggtcacttgttttccgacttcgactctggtttgtcgtgaacgatggacaggccattatcgtatcttgatgggctatcagcccaatctgtgttagtgctgttagatgatctgtgctagcagatcgttgagttaattttgtacattataggaatgtgctgcagtgtattaatctacgaatacaaagactttggcgcgctaaggtgccttgtagaattaaatgccattacaatttcagttttatttagaact

SEQ ID NO: 34551 - DNA, 628 bp, Zea mays
  Clone ID: UC-ZMFLMO17285F05_FLI
caaaacacaagtagggttaggaaggcggcggccagcggcgagagcgcgagaggaagagcaggaggaggggtcggccatgacggggaaggcgaagccgaagaagcacacggcgaaggagatcgccgcgaagatcgacgcggcgacgacgaaccggggcggcggcaaggccgggcaggcggaccggctggggcaggacaagggcgggcatgcgaagctggcgtgcccgctctgccgcaccccggcgcccgacatcaagtccatgcagatcccgcctgcatggggcgcaattcccttcggtttcaatcccatccgccgacccgatctataatcaatcaaaccgccgccctccggcctggcggctgccgcagtcggcctgcggtgtactgttagtctgctgctgatttccgttgttatactgctggtacatgtgtcgtgtgatagatgtgtcaactatatatcaatctcgtcgccggcagctctggcatgtttgagtatgtgttgctgctctgtggtgccggcgacgatggctcctagtactgttaatgtgatcgggtctccttgaacaatggcataaatatgttgcttgtttactttttcctctaatggcaagtaaagttcatgatttgcg

SEQ ID NO: 34552 - DNA, 430 bp, Zea mays
  Clone ID: UC-ZMFLMO17285G03_FLI
atggcacccaagaagcccttgatatccaaggaccacgagcgcgcctacttcgattctgcggactgggtgctgggcaagcaagccgcgaacagcagcagcagcacgaggaccgcagccgcggtcgagtctctgaagcccaagctgaagagaacgccgcaccaccagctgccgcctcgtaagcccacctgcgcttccagttgagacgcatggccacgcgtcgcagctgctggaggaggagctcggtcagagtcaaggactgaggatgccgacgagctcgagctcggataaatgttttagctggtccggaatcgtagggacgacgacgagccagaaagatccgaatccgagatgccgtctggcttcttggcgagcagcgcctgttattgtgtgtcataaagaacggatcaattaattatcaattgtctggctg

SEQ ID NO: 34553 - DNA, 1774 bp, Zea mays
  Clone ID: UC-ZMFLMO17286A02_FLI
tccatgccttcctcgacgtcgcctcatgcgacgactccggcaccaagtggcgcctcgggatgaacagcggccagaccttcctcctctacgcgtcggccccgatccgcctcgcgcagaccaccaccacgcagctctccgcgcctggcttcgccggagccatccgggtcgcctacctccccgacgcgtccatggagccggtcctcgaccgctacagccgctgcttcccgaccgccggccacgcggccctgagccggcccttctgcgtcgactacgcctggcgcaaggacgggcccggggagctgctcatgctcgcccacccgctccacctccgcctgctcgccgacgactgccccgtgcgggtgctcgacgacttccggtaccggagcatcgacggccatatggtcggcgtggtcggcgacgcctgggtcctgcgcaccgacccggtttccccgacgtggcactcgacccgcggcgttagcgaggacggcgtcgccgaggtggtggccgcgctgcgagccgacgtggccggcctcgcgtccaccgcgataaccaccacctcgtcctacttctacgggaaggcgatcgcgcgggcggcgcggctggcgctgatcgcggaggaggtcgggtgccccgacgtgatcccggcggtgcagcagttcctcaaggcctctgtgacgccgtggctggacggcagcttccaggggaacggcttcttctacgacgccaaatggggcgggctggtgacgctgcaggggctcaaggactccggcgccgacttcgggttcggcatctacaacgaccaccactaccacctgggctacttcctgtacgccatcgcggtgctgtccaagatcgacccgtgctggggccgcaagtacatgccgcaggcctactccatggtggccgacttcatgacgctgtcgcgcaacaaggccggcgccagcttcacccgcctgcggatgttcgacctctggaagctgcactcgtgggccggggggctgacggagttcgccgacgggcgcaaccaggagagcaccagcgaggccgtgaacgcctactactcggcggcgcttgtggggctcagctacggggacgcgcacctcgtctccgtgggctcgacgctcaccgcgctggagatgctggcggcgcagacgtggtggcacgtccgggaaggggagggcatctacgaggacgacttcagcgggaacaaccgcgtggtcggggtgctgtgggccaacaagcgcgacagcgggctgtggttcgcgccgcccgagtggaaggagtgccggctggggatccagctgctgcccgtgctgcccatcagcgaggcgctgttcccggacgtggcgttcgtcaaggacctggtggcgtggacgctgccggcgctagcgagggacggcgtgggcgaagggtggaaggggttcgtgtacgcgctggaggggatctacgacagggaggcagcgctgaccaagacccgcgccctcaaggggcatgatgatggcaactcgctgaccaacctgctgtggtggctccacagccgaggcagcgtcgtctgtgacggcgacgctgggttcggccgctgctgctggtaccgccagtactgccactgacgaaagtgtggtgaccagcacgagtgtggttgttcatgtctgcttgcggagcagagcacgtagatcagtgaaggatggagttgatacgttgcaaagtcattgtggttgttattcgttgatactacacacttctatacagttgaataaagtcagtcctttatgtg

SEQ ID NO: 34554 - DNA, 808 bp, Zea mays
  Clone ID: UC-ZMFLMO17286B03_FLI
gcctgccgcctgccctagccggaggtcggccagccgccccagcctcaacagtcgcacagccgccgccgaggcaaactcgaagccaccccgccgccgcagccacagccgcgccgagcttgagccgtcgttgctccgctgaatcgcccccatcgtctctcctgaagagagaggagatttattgagacagcatgcctaagataaagacaagtcgtgtcaagtatcctgaaggatgggagcttattgaaccaaccatccgtgagttggatgccaaaatgagagaagctgaaaatgatccacatgatggaaagagaaagtgtgaagctctctggcctattttccgtatttctcatcaaaggagccgctacatatatgatctttactacagaaggaaggagatatcacgggagctttatgagttctgcctggaccagagctatgcagatcgtaacctgattgcaaagtggaaaaagccaggttacgagcgcctttgctgccttcggtgcatacagacacgtgaccacaactttgcaacgacttgtgtctgccgggtccccaagcatctgagggaggagcaagtgatagaatgtgtccattgcggctgcaggggttgtgccagcggtgactaatcttgtcatcatgttgttgggctcacgactcatcatcaccatcctgaccacattagatgtctcgtgagcatggatcggctacggtgatttgcatgaatgtgttgtggtaactagtgggaagactaaatttcctgacgtttggatgtttccaactgctatgtactataaagattcctcgtgcc

SEQ ID NO: 34555 - DNA, 1465 bp, Zea mays
  Clone ID: UC-ZMFLMO17286B09_FLI
ctgcctttcccgtcagcagcagcagcagctgctgcctgctgctgtccatcttcatcctccccatcgcccgactggatttctccctcgaattcgcacctccggcctcccccctcacttcgctgtgtctcatcaacgccggcatcaccgcgaggactgggccagcgctccctccctttctcctccctccgcctttattgctgacggcgacgactgggcgagctctgccgccgctctgcgctaggtgcccaggtcttcctcgggcacttcaccggcgacgagcacccatcaggagcgaaatggacgaggctgttcctgctttggctactggccaagcttcaaccgacggcgtgacagagcagcctgtgaatgtgtacatatgggacatggatgagacactcattttgctcaagtcacttctggatggctcatatgctggggcttttgatggcctcaaggatcatgagaaaagtactgaaataggaaagcgatgggagaacctcattcttgaactctgtgatgagcacttcttttatgaggagattgagaactacaatgaaccctatctcaatgccttgaatgaatatgacgatgggagagacttgacctcatatgattttgaggctgactgttttagttcaccctatgatgatgcgaacaaaaagaagcttgcttacaggcatcgtgctattggagagaaatatgcaaagggtttggaaaaggttctggacggacacatggtcaaagtctgcaatgatcagtacagtttgactgacaaatatactgatggctggctgtcttcagctcataagttactggaagaagcattgggcaaatcagcatcagcaccttcagccaactcttcaagcatcaactgcatagttacatcagggtcactgattccaagccttgccaaatgtttgctgtatcacctggatgatgtggtctcatctgagaacgtctacagctcatgggaagtgggtaagctgcagtgcttcaaatggatcaaggagcgcttcgacggtccaaacgtccgcttctgtgcaatcggtgatggccacgaggagtgcagtgctgcgcaggtcatgaaatggccattcatcaagatcgagttccgccctgaagcccatcacaggttccctggcctagacttgcccacagtgcagacctacatggatgtgatatacgagtcatccagcaaagatggttgaccgacgattgatgtcgattctgttttctcctctgacctccaccacccatggagctattgtttgaggaaactgtaagcaaagagatgtcgtgggaaaggaacgtgtcgtcctccctagatctttcactttggcgaattaggaggcaggtgtgataaataagagtcttgctagttcgtcgtcgtccatgttgtcatagatcctgtcttgtgtgttcatgttactgtgatgcaggcaattgtgtgttgtgtccgggcgtt

SEQ ID NO: 34556 - DNA, 1160 bp, Zea mays
  Clone ID: UC-ZMFLMO17286D01_FLI
cagatagtatgatgtgccaagaaggaaaaccccaggctgccgttgataaaactcttgacagcaaggttttcaaaggatgggttgaaactgacaatccgtggacatctgatgacgagactgataataatgagatgacttacgtgaatcttcaactgaatcctgaacgatacactggctatactggtgattcagcaagaagaatatgggacgctatttacaaagagaactgtccaaaatatccctctgaagaactgtgccatgagaagaaggcattgtacaagcttatttcaggattgcactcctcaatttcagtgcatattgcttatgattaccttcttgatgaatctactaactcatggggacaaaatcttcctttgttgtatgaccgcgtcctgaagtacccagaacgtgtccagaatctgtacttcacctacctgtttgttcttcgggccgtgacaaaggcagcaaattatcttgagcaggctgagtacaataccggcaatcctgaagacgacttgaaaacagaatctcttgtgaagcagttgctttacaattccaagttaagatctgcatgtccattgccttttgatgaagccaaactttggcaaggcgaaaatggtcctgagctaaagcaagagattcagaagcaatttagaaacattagtgcaattatggactgtgttggatgcgagaagtgccgactgtggggaaagctccaagttcatggtcttggaactgcactgaaaattcttttctctgttgatggggacagccatatgaatcagccattgcagctgcagcgaaatgaggtcattgcattgttcaatcttctgaacaggctctcagagtctgtcaaatttgtacatgaaaaaggatcatcaattgaagaagtcattgaggaacagatcccttcaacggttcaaaagagtgtttccatgccgaatcttaaactggacttcctctgagatgtatgagagtaatttgtagttatacaagattgcaatgacatgctggaagattaacatagacatgtacggatataacgaaagattaacatgtgctggaagcagtttcatacatacttgtgttgcagctgtatttaagagaatgagagatacagatacttttgagctaaatgcgatgacacagttaacatagcc

SEQ ID NO: 34557 - DNA, 1098 bp, Zea mays
  Clone ID: UC-ZMFLMO17286D02_FLI
ccaacgactgggtccgaccggaggtgtacctgctgttcatgacgatgggtgttgtcgttgcagctcttccagaacatcaccaggaacctagaatccaggtgaacgaagagatctataaccatgacgaattgaaagctaagtttagaactcatgaattctaaactggcagtgattgtgaagtgtagcccatctttacgaagaattcggggaagaatttgtggatatgttggatggaataatctcctttgttcttcttgatacacgtcaaaaaaagcttcgttgcagctcatgatgttgttgccatctgccctttatacatgggatggtgtcttgatgtggtcaataatgcttgaaggtacgaccaacattcctagcaggaactggccagttaccaccaagaacctcctggcatgttctctaggatgagattgaagctgctcgaatggcagcgatcaacaagaaaattaagcgtgtattgactgaagtcctttcaaaggttttattcttgacttgatcttgtttacagtttacattattgaatccgtctaagaggtgcaaggttattcctgattggttagcttcttaccctttttccatcacatacagaatcggctatcttaaggtcagtgccccttcataattgttagctcattttatataacaatatgtattgtgattgagagcacacagtcggatgctttttatatttccaaggaattatgtgttctctataagttgtagcatctaactatgtaacttgatgttatagattcaatcacaaaaaatcatttaaacctacgaatattgaaataattgattggttgtaggctgggcaaaaggttcgtgaagaaagtgaaaggctgcgagcctgcgacagcaggaacatgagcagattgcaatgaagcgtaagcgtgaaatggctcggtgtagatgacgtggcataaacacaaacacacaaacattaaagggattaaaaattatatgctggacaaaggttcccaatttaggttaccaaaatgttgttcccaaagttctcatcatggacaagcgaagtgaacaatacgtttctctttagtaaaatcgttgattttcatttgc

SEQ ID NO: 34558 - DNA, 1170 bp, Zea mays
  Clone ID: UC-ZMFLMO17286E09_FLI
gtggccggctcttctccaggccctcgccctccgccctggcggccccccgtcgttccggctcaccggcgtcgggccgccgcagcccgacgagaccgacgccttgcagcaggtgggctggaaacttgcccagttcgcgcacaccatccgcgtggacttccagtaccgtggcctcgtcgcggccacgctcgccgacctggagccgttcatgctgcaaccggagggcgatgacacggatgacgagcccgaggtgatcgccgtgaactccgtgttcgagctgcaccggcttcttgcgcagcccggtgccctcgagaaggtcctgggcacggtgcgcgcggtgcggccgaggatcgtgaccgtggtcgagcaggaggccaaccacaactccggcacgttcctcgaccgcttcaccgagtcgctgcactactactccaccatgttcgattctctcgagggcgccggcgccggctccggccagtccaccgacgcctccccggccgcggccggcggcacggaccaggtcatgtcggaggtgtacctcggccggcagatctgcaacgtggtggcgtgcgagggcgcggagcgcacggagcgccacgagacgctgggccagtggcgcagccgcctcggcggctccgggttcgcgcccgtgcacctgggctccaatgcctacaagcaggcgagcacgctgctggcgctcttcgccggcggcgacgggtacagggtggaggagaaggacgggtgcctgaccctggggtggcatacgcgcccgctcatcgccacctcggcgtggcgcgtcgccgccgccgccgctccgtgatcagggaggggtggttggggcttctggacgccgatcaaggcacacgtacgtcccctggcatggcgcaccctccctcgagctcgccggcacgggtgaagctagacgtcattgagcgctgaatcgcagttagcgaccgggccaaggttctcgccggcgtgatgagatggaacactttgactcccgcggccggatcggcctgtgttcgttcttgtttccgatctcccttctctttcccgttgcttcgatcccgtcaagtatggtagaccgtagcctattgttatgtttaaatgtcaattattatgtgtaattcctccaagcgccgatatccaataaggacgaaccggattttcgtt

SEQ ID NO: 34559 - DNA, 1474 bp, Zea mays
  Clone ID: UC-ZMFLMO17286E10_FLI
caccacttcatgttgctgctggctacaataatacagaaatagtcaagttcttgcttaaccagcaaggtacagaaacagttgatctggaggcaaagaacatgtatggggagactcctctgcatatggcagtgaagaacagttcttgtggatcaacaaatctactccttgaacatggtgcacacatagaagccaaagccaataatggcatgacaccattgcatttagctgtctggcatgcaattcaagctggagacttcagcacagttagcgtgttactaagctacaaccctgattgctttgtgaaagatgatgaaggcaaaatgcccttaaatcatattccaggaggagctggtagcgagaagctgctgaaactcctcactcatcatatggaagagcaaagaaaacggaaagctctcatgtcatgcctcgaagggaaagcaatgtcagagtttgaagaggcaatgtcacaaattgttggattgcaggagctaaaaatgcaattgcgccgatgggcacgaggaatgttttttgatgagaagcgacgggctatgggcttggggattgctaaaaggagagctccccatatggcatttcttggcaatccaggaactggcaaaactatggttgctcgaattcttggaaagctcctccacatggttggaattctccctactgacaaagtaactgaagttcagcgaactgatcttgttggagaatttgtggggcatactggaccaaagactaggaggaagatacatgatgcagagggaggtattctcttcgtggatgaagcttacaggttgataccaatgcaaaaatccgatgacaaggattatggtttagaagccttggaggagataatgtctgtaatggacagtggcaagatagttgtcgtatttgctgggtactgcgagccaatgaagcgagtcattgcctcgaatgatggcttctgcaggcgggtcacgaaattcttctatttcgatgatttcagtacgacagaactagcagagatcctacatatgaagatgaagagtccaagtgactgtagcttgctttacgggtttaagctgcacccaagctgcagcattgaagccattggagagctgattgccagggagatcactgaagagcagaggaagcagatgaatggaggccttgtagacacgctgctcatcaatgcccgcgagaacctggattcgcggcttgatttcaactgcaacgatgccgatactatgatcacgatcacgttggaagacctggaggcagggcttcgtcagatttccagacaacgtcacctgcagtgacatgtaatttaggagaattttttctcgatgatctcatgcttgtctccaagggcgaagttatggctgtatcgtctaatccaacgtttttggcttttctgactgtgttgtatctagtcgttgctatatagcagtaaaatgcatgtggtatatacaattatacatcatgccct

SEQ ID NO: 34560 - DNA, 1378 bp, Zea mays
  Clone ID: UC-ZMFLMO17286E11_FLI
gccatctttagaatactcaatttcataattcataatggcatatatctgaaaacccccaaaaaatgtcacgtgtactttggaaaaatgaaagtttatgatttttctggcaaatttttttggatgtgcaaaaaatggtttcgtttgtttgcagataaccgttgatggtgaagttgtcactgatccagatatgactctgggggatgggtctaagttggtatatcatcgttttccttggcaggagccatttgcgccgtatttgctggaagtgctctacgaggatgatgacatggttgcccttaataagccttctggcttgcaagttctgcctaaaggactgtttcagcagcgaactgttttagcacagcttcaattgaaagactggaagatggcctcatcttgccggttcaagagaaaagatgtgcagtcacatccagtacctgttcatcgtttagggaggggaacatcaggcctcctgctttgtgccaagacaaaagttgccaaagttcgacttgcatcttattttgctgaaggtgctataaatgctgcaaagaaaagagttcagtgaagagcgaaaaatttcaaaattttatcgagccttagtgactggcatacttgatgatgatgaggttgttgttacacaacctatagggttagttcattatcctggagttgcagagggactttatgcagcatgttcctcaggaaagccagcaatgagcaaagtatgtgttcttgagagacttgcacaccaaaatcacacactggtccaggttgaaattcattcaggacgacctcaccaaataaggatacaccttgcatacattgggcaccctcttgtagatgaccctctctatggtattggtgggcaccccaattttgttgagccagaatctactggcacagatagttcttttgcatctgatgggggttatgagagacctttgctacctgttcctggagactgtgggtatcacctgcatgcacattggctggttctttgccacccaacaaccaataagatggtaaaaattaccgcttctcttccacaaattctacagacacgggaggaacgccgcgctgcagctgagcaaaccggtggttgaacatgtagaatcttgaaaatgtatatttcttgaagttagcaagcagcaggttctcacagacgttagagttagacactcagacatctgctcctctgacaactgtacaacggcgacctctggttccgcttgacgcagcgccgtctcatgtgacgtttaggccaggctaccgagatgcagagataacatcaggtatttaaaaataaatagagtactagctaatgagctctgtgactgtccctgaatcttgttcagtctattcgaagcgcaattcgcag

SEQ ID NO: 34561 - DNA, 886 bp, Zea mays
  Clone ID: UC-ZMFLMO17286F02_FLI
ggatcttagggtatgtcctttccatggaccgattgtcccacgtgatgcagaaggaaatccaattgagcagaacagtggtagttctgatgcagaagtaaatcctgttgagcacttagacattggaggacattcaaatgagcttaatggaatcagtgatgatgattgtatggagggaacctcttcaagaatggcaggtgtcaataatgattatggtgacatagctggaacttgtgatctaggtaagattactgcagagcagttagcaagacaatcagttaaaaatgtccggaaaagagaaatggatcgcaaggcacaggaaagggcccaacgtgcaagaatccgtcagcacaatgaagatgtcctgcgaaatgcggctcttgcttcaacttcctattctgcagcagcctatgagcagcctacagaagcacatggtcggcgaggacgccgaggtaaggcaaaggcaccaacgctggcatcgatgctgaaaaagaaagttaccaccaaagacagaattgcagagaggcttctgaacgctcgagccacagatgccacagtaagggatgtttctcataatgaagatatgagctacagggaagcatttccaaatcagtggtagcagaagcagttgagttgttcttgtgtaggctccggctggataaacatgttaggaatgaaatcgatgttgtttattggttcatactgtcagctaaataatacatattctgttgctatctaaatcagcacagaactgtgagtatgtttcctgatattctgttcttgtacagttagtaggataggttccttgtacatttcccaatgttcagtcttactatgtgtttttgaacttacactgctattgcttgcatttcaaagtgaacttgtttgt

SEQ ID NO: 34562 - DNA, 1068 bp, Zea mays
  Clone ID: UC-ZMFLMO17286F04_FLI
gtttcggcacaatgtagcctgcactgctgagcgtgatgggtacctgtactcactgaatgcttccactcttagcaaacagtgggaatctatggggccctttctacaaaagccagccggcgcccgccatgctatcctctgagccgccacaggcggccctcacgtccaagccggcgacgccgcccacagccgtggctatcttcaagctctcccgcgccgagctcgtccgcctccgttcgcaggtccccgcgcgcgagggcgcgccgcggttcagcacgtacgctgtgctggcggcgcacgtgtggcggtgcgcgtccctggcgcgcggcctgccggccgaccagcccaccaagctgtactgcgccacggacgggcggcagcggctgcagccgccgcttccggagggctacttcggcaacgtgatcttcacggcgacgccgctggccaacgccggcacggtgacggccggggtggcagagggcgcgtccgtgatccaggccgcgctggaccggatggacgacgggtactgccggtcagcgctggactacctggagctgcagccggacctgtcggcgctggtccgcggggcgcacacgttccggtgccccaacctggggctcaccagctgggtgcgcctgcccatccacgacgcggacttcgggtgggggcggcccgtgttcatgggccccggcggcatcgcctacgaggggctcgcgttcgtgctccccagcgccaaccgcgacggcagcctgtccgtggccatctcgctgcaggcggagcacatggagaagttccggaagctcatctacgacttctgatctccaactcctccccacaagtcatcagtaccagtacgcgcaacacaaagaagcaagagaccgttgggagtaggttgcagcaatattctttgatttcacacatagttcctgcacacttttccgttcctgcctgccccctttgggcagggcgcataccttttgtgctgaattatttacgagcccctgcaattgtatgatgaatgaacaatttaatccgttctgaatgatacagattaataagattaattaactt

SEQ ID NO: 34563 - DNA, 533 bp, Zea mays
  Clone ID: UC-ZMFLMO17286F06_FLI
acagcgttacagttagcacggatgtaaaagatgacaatccagatggttacaaaaagttcaccatagctaaactgaaagaagagctaactaagcatggatttggcacgcagttgttagagctcaagaatccaaacaagaaagatatactcgcactttataagaagcatgttttgtgcgagtaaataatggccacgtgaagttccagtcttcaacacataatctatccaaactagggaaacaatagagtagtctgtcagtatttttaacaagctgatgcctcattgttctccaggcattcgtttctgctgattggtttgtattttggtgttaacatcgaattagttccggtttgtgtctaggctttgtatttcttagcttgctggttggctgggtgaagttcttaggacttctgagtgctaaatgacctcgaccaacgctagtcgtgggcaagtttgtggtacgtttgtatatggtatattgctgtgtaaagagtgctttatccaattcaaatatgatatactcttcaagtctgc

SEQ ID NO: 34564 - DNA, 1349 bp, Zea mays
  Clone ID: UC-ZMFLMO17286G03_FLI
aacgtaacaaaccaacgataatcctccctcttgctacaaaaaaggaaaaaaaagcatcaataataatccactgcggtcgctcgtcctcctcccaacctcctcccaagttgcctcgtgctctgcttcttcggttttcaggagcgtcggccattgctgctggaaaagcagaccattgggactccctcgtgcgttttccaaatcaggttgatggcgatggagggaccagttttatgccgccctgcaatgcaagccaaatcgcctgctgctgcgctggtcaacaactccctgaccagattcgggcagcttgggaccatttcaaaatacaggaacgtttcaagattcatttctcccatctctcagccatctacgaagaacataggtccatgctgtagcttcagctcgtcttctgatggcaatggatacatggctggaaactttagcgacagtgatgaagattatgttaattctactgtgctagaagcagttgaggtgagaagtggatcggaaggatatgtgataaagatgcgagatgggaaaaacttgcgttgtgtccataacaattctcaagggagaaatattccagagagtgcaccccaacctgctattgttttgaggattgaagatggaagcgaaactttacttccaatcattgttttggagatgccaagtgtacttctgatggcggctattcgtaatgtccacattgcacgaccaaccatatatcaagttgtcaaggaaatgattgataaaatgggctatgaggtaaaacttgttcgggtaaacaaaagaattcaagaagcgtactgtgctgaactttgtctaacaaagattgatgattctacagacagcatcaccttcgatcttcggccttcagatgccataaacattgctgttcgttgcaaggttcctgtacaagtccatagaagtcttgcatacagtgacggcatcagaccagtcgagccagcaagaatggcagtagcagctggcctatcagatgggttgttatttacagagcttgacagacccgatggacaggcatctgttgaggctcaagagtttggattggtgaagaacatgctcattgcagccgtagaagagagatacaaggatgctgcatcatggaaggacaaactgatgcggctgaggtctaagcggaagaactgggcctgacagcgttgcatgtctggatggtgtaaataaagatgatgcccagctgaattccagtacgcattccagataattgatgctgggttatggctatgtaactagctgtacatattgtatggacccgaggatggtcttctgtaaattcagactaagctttgaagtgaaacactaatccttcggag

SEQ ID NO: 34565 - DNA, 1848 bp, Zea mays
  Clone ID: UC-ZMFLMO17286G07_FLI
accatatcagaattgcaccaactcagcagcaagcacaaatggcttcctccccattgcagaaacaattctattctcacactgtaactggttataatgaattccaagcacaaatgcgcaatggaagacccagaatggattcaaaggcgagatcacagttacttccccgctattggcctagaataacagatcaagagctacaacacttatcaagcgattcaaattctgttattactcctttgtttgaaaaaatgttaagtgctagtgatgctgggcggattggtcgtttagttttgccaaagaagtgtgctgaggcatacttccctccgatctcccaacctgaagggctccctttaaaagttcaggatgccggtggtaaagaatggatattccaattccgtttctggccaaataataatagcagaatgtatgtattggagggtgtcacgccttgcattcagtcaatgcagttacaagcaggcgacacagtaaccttcagtcgaatagatcctgaagggaaattgatcatgggctttcggaaggcaactaataattcttttgaacaggagcaagctacaaagcctgccaatggtgcaccagcaacttcagaagtaaatggtaaagtttctgccccagattgcagtccaaatgctgcagtttcccgtcagaacatggtcaagacagagaccaaaagttctagccctgtggaacaagccactgcatcaaaaatggataaggacagattaacacagaaggaaggacctggaattgctagttcttccccaggttctttaaagagaaaaacaactaatcttggtcaaaagaataaaagattacggatggataatgaggaatcaatggagttgaagataacatgggaggaagctcaagaattgcttcgccctcctcctaaggtcccatccattgttattgttgatggccatgagtttgaggaatatgaggagccacctatacttggaaggaagacttattttgtagcagataaatcaggtttgaaccatcaatgggtccagtgtgaagattgttccaaatggagaaaacttccaatagatgccctgttgccctccaaatggacctgctttgacaataaatgggatccagaaaggtcttcttgcgaacctgcacaggaaataagtttggaggagcttgcagaactcattcctataaaacctggaaaaaagcccagattgaagatagaatctgatgctattgatgcttcagatgggctggacacgcttgcaaaccttgcaattcttggcgaaggtgaagcgctcccttcgcagccaacaacaaaacatccccgccaccgtcccggctgctcatgcatcgtctgcatccaaccaccaagtgggaagggcccaaagcacaagcagacatgcacctgtaacgtttgtatgacggttcgccgccgttttaggacactcatgcttcgacgcgagaagaaggtgacaagagattcctctcgcaagaaagagacgggccaatccagtgagaaggtcacacaacaagccgtgtccggtccgccaggagccaatggcagtacaaccagctccccccagaaagcagatggaaatgctgatgcgcccgaaaacatggccgtcgatcacaaggtggcatcctctcccgtcaagaaccacattgacctgaacatccaacctgaacgggacgacgagcagtcaccgaaatctggtgcggctggtttgttgacccgagacaatccaacttagcccttgttgttattcctgtcccatatggattggatcccatatggaattatggattggatgagattggaaaacattatgaaaaattttgacttgtttagaattt

SEQ ID NO: 34566 - DNA, 1135 bp, Zea mays
  Clone ID: UC-ZMFLMO17286G10_FLI
gcaacaccagcttctctaaagatcacaatgatgagagccctggcggtggtggccatgctggccaccgccttcttcgctgtgcccgctcgcgccgagcagtgcgggtcgcaggccggcggcgcgctgtgccccaactgcctgtgctgcagccagttcgggtggtgcggcagcacctccgactactgcggcagcgggtgccagagccagtgcagcggcagctgcggcagcaccccgaacccgccgagcagcggcggcgtggcgtccatcatccccgagtcgctcttcaaccagatgctgctgcaccgcaacgacgcggcgtgccccgccaacggcttctacacctacgcgggcttcatcgcggcggccaacgcgttcccgggcttcggcaccacgggtgcgcccgacgtgcagaagcgcgagctggcggcgttcctggcgcagacgtcccacgagacgacgggcgggtgggcgacggcgcccgacgggccctacgcctggggctactgcttcaaggaggagcagggcggcgcgtcggggccggactactgcgagcccagcgcccagtggccgtgcgccgcggggaagaagtactacggccgcgggcccatccagatctcctacaactacaactacgggcccgccggccaggccatcggcgccggcatcctcgccaacccggatatggtggccaccgaccccaccgtgtcgttcgagaccgccgtctggttctggatgacgccgcagtcgcccaagccgtcgtgccacgacgtcatgacggggcagtggacgccctccgccgctgacacggccgccggcaggctgccgggctacggcgtcgtcaccaacatcatcaacggcggcctcgagtgcggccatggcgctgacagccgcgtcgccgaccggatcggcttctacaaacgatactgtgacttgcttggggtcagctacggcgacaacttggactgcgccaaccagacgcccttcaacggctaattaataagctagctacctcaccatgcatgcatgcattattattagagaacacaataagacctgatcgatatgatgatgggtatgtattactttactacacgcagatccagcaatcaagaataaagcaaattaatgtttactc

SEQ ID NO: 34567 - DNA, 1546 bp, Zea mays
  Clone ID: UC-ZMFLMO17286H02_FLI
catatgcatgcaagggacgaaattagttaccagttaccaacactttcagcatatgcacgcaagggacgagattgattacccattaccaaaccaacagtttccagttcagcggtaggaacagaccgtcacggcgtcatccgccaaaggataatccatttgctcacacaggcgcaaacgctgagcgcctgagcctgctctcgcggtctaggagatggcgttgatcacgaatgtctctgactatgaggagcttgcaaagcagaagctgcctaagatggtttatgacttctatgccgggggtgcagaagaccagtggacactcaaggaaaataaggaggcattctccaagattctgtttcgaccacgggtgctgattgatgtgtctcatattgacatgtctacaagtatattgggttacaaaatttccatgcctattatggtggctcccactgctttgcacaaactagcccaccaagaaggagaggttgcttctgcccaggcagcagctgctgcaggaactataatgcattgaggaagttagctcaagtgcaccaggactccgtttcttccaactttcagtattcaaggatagggatatcgtgcaacagcttgtgagaagggctgaaaatgctggctacaaggcaatcgccgtcactgtcgacgctccacgccttggtcgcagggaagccgatgtcaggaacagattcacgctgcctgaaaatgtggtgttgaagtgctttggaggactggatctgagcaagatggacaatgtttatctgaaaaaactgagctgtggtccagctacacggcatcgaaactgagatgaatatatttcatttcatttttattttgttttgtttttttattttcacagcaactgttttgtgatatttgattttccagactaagggttcaggccttgctgcttacgccactagccagattgacagctctctttcttggaaggatatcaagtggctacagacgattaccgggctgcctatcttagtgaaaggagtcctaacagcagaagatgctcgaattgctatcgaatgcggtgtcgccggcattatcgtgtccaaccacgggggccgccagctagactatcttcctgcaaccatcagctgcctggaagaggttgtgagagaagcgaagggccgccgtgtgcctgtgttcctcgacggcggcatccgccgtggcactgacgtgttcaaggccttggcgctgggagcctcaggagtgtttattggaaggcccgtactgttcgccctcgccgtggacggcagggcaggggtgaggaatgcgctgcggatgctgagggatgagctcgagatcaccatggcgctgagcggctgcgcgtcgctgaaagatatcacccgcgatcgcgttatcaccgagagcgacatgatccgtcgctctcggatgtaggcttcgattcgtttgctgttgtgttgtgccctggcatgactgtcttattcgaaactgaccggaccatcggattggtttttgacctcttggctcggatgtgctaggttttctcatttgtctg

SEQ ID NO: 34568 - DNA, 1279 bp, Zea mays
  Clone ID: UC-ZMFLMO17286H05_FLI
gtcttaaaggccacggcattggctagtgcacaggtagcttcagcaatagagagttaccatcacctgctaaaacttcggctgctgaatgaggcagatgaaagtgtctactggcgtgctgattggttggtcgataagttgggtacaaaggtccattcttactactggctggatgaattctcaggaaagaacagtttttcacgttactggaggagtgagtggagtagtggcccaaacccatggtgccagggaatgcagattccagattccgatgtcgtcattgaaggcaattatgccagtgtggtcagccagaagaacaaggagaagtcccatgtcgtactgaatccaggttctgagtttgcgttgtgcgattgtagctggtcaatgaaggggaacctttgcaaacatgtaataaagtcggcaaaggtctgccgtgacaggggattggcactgccatcgttggccatgttccactattaccaggcattggcaaatcttgttcattgtccacccagtgatactttgattagtgaccatgcaatggctctggcagtttctgttaaaacacagctagatgcagtgttgtgcgctgttaatggaagttcttcaattaggccaggtttccaggatccacagtcaacgagtaagacaagagaagctgaaattgaggaagccaactctgagaatggtgtgtgcacaagtcaacctcagcctggtgctggtgatgatgaggatcaggccattcggactggcaagagaagaaagtcagggaacgcttctggtgacactgaagatggttccatatatcaggacagtctggctcgcaagaaatgcaagtcaggggaagcttccggtgacgatgaagaggcctccacagaagagggcagtcgggcttgtgaaagtaggaagccaggagaagcttctactaacaatgaagaggtttccataggccaggacagtagagatcatgagaaaagaaagtcgggagaacctcctggcaatgaaggaacttcagcaacgcaagctacggaaccttctgagactgaaaccagccaagcaaccaatggactggttaggtccctcctcccctcttcggaatgcacctagaacgccttgcgggtcttgtaaattcctagttggattagtcaactgttgaattaaccagcagctgagcttaaaaaaactagtagctgcgtctgttaagtgtggatggaagcataaatcagttcatttatcattatgaattatgaatggggggatcgtgtgcattatgcagggcaac

SEQ ID NO: 34569 - DNA, 2017 bp, Zea mays
  Clone ID: UC-ZMFLMO17287A11_FLI
tcttcgcacgcacgacgcttcgtcaggatcgattcgcgagacctctcctgtccggatcgaggttcatggtttacatatgcgcgtttgtttactgatgcataccacgaccacctgatccgtatgtcaggacagatctcctgctttaatcgagtccagttcatgtatgaactttcccttttcctggcacgttgctagatgtaaaagggtgttccgggatttaaaagaaccacccacgcatccatgtctgaccagcaaaggcactacggcagctacgagctcctcccggctcacccagatctgcggtgcctggtctgcacgcggccgttcactcttgacgccgaggtcaccgacagcttggaagctttagccatatgcagggagtgcaagacgacggtgcttagtgacagcaacagggacgacactccccgagccaaccgacagagaagatggcgaaggcggcaaagctccatcaggggggtctcggtgttctcgcagctgatcaacctagctagacaacagggtcatgaggcggacactgattctccgacggttccccgccgccacacatcctatagttctacgccgagccggtcccagagggggcacacttccgacgacgagagcgatggtctgagctacgccgattccgtgtttggtgagatcgagtcgaacatcagtttcggcgatgagggtggggaatctgacacttctcttgatcgccacaccatggttgggagggaaattggcatacagcttgacaatgagagctacatgaacacagatacagatattgatcctatgaatgctggagtataccagtgggactcagacgatcctgaagacgatgaagatgaggaatcagaggagtctggtttggatgaaggagatgacaccatgcaggagcgccggcagcagtggcatgatatcgccccgagtggattgaatgagcaggaatctgaaggtgctgcgtggacttggagaacagttggaagccaaggcataaacaggactgatctgagagtcgacatggaaggacgggaaatcaggagactttttattgggaaccccggagattatgttgatgcaagacagtttgaaatgcttctcgagcaattcgctgatgaggataacagttccagaagaggagctccacctgcagcggcatcttccatcgaaaatctttcgtctgtggtcatctccaaaggctatgagataaacggtggtgtaacctgtccagtctgcaaagatgacatgcctatcaccactgtagcaaaacagctaccatgcatgcatctctatcattcatcttgcatcttgccatggcttaattctaggaacacatgcccagtttgtcgttacgagcttcctacagatgactcggaatatgagaggtccaagcatgccgcggtcaatgaaggaggtatccatagggtggagcgtacccatccgcaggaagttgttgaagaaacttatgaacctgaggttgatggaggttccaatacaggcggtgatacaatgaatgagactaatacacatgaacagcatactgcacagcagtcaaatggagcacatgggcgtcatagatggctgtttattgcagcagctccagttgtaagtcttgtcagtttagctctagttttgtgcttcaccaatcctgctggcaatgttaggaggcaattgtgccgtaggtcccagactaccactacggcacgtgtagacacaagaagaagttggtggtctatgttctaagtaaccagtgtttacctgctgatgctaaatttctgtgtgatggcgtgtgcttgttgccacttgccagtgttgtgtcaattgtgtatgaaaaggttctagataaatttgaagtgcaaactgtgtgtgccaaccaaggtgttcttgtaaccaagttcagacagttcagcaaaacaaatactgatgattgctgctgttcattgatattttatatgtttggttgctcaggttgtaacttcaagcatgtaactaacactctgccttaaagttt

SEQ ID NO: 34570 - DNA, 569 bp, Zea mays
  Clone ID: UC-ZMFLMO17287B08_FLI
gtccagcgcaatctaaacagcttaggtgctgatggtagacttttcatcattggcttccaagggggcatagcagctgaagtgaacctgcaagctgtgcttgcacgccgtttgaccatacaagctgctggactgcgcaacagaagccttgctaataaggcagagattgttagtgaggtggaaaagaacgtgtggcctgctgttgctgctggcaaagtgaagccggtgatttacaagacgtttccgttatctgaagctgctgaggctcataggttgatggaagctagcacccacatcggcaagatactgctgctcccatgactgcacctgtggcgtttgcgctcttactctcggaggagtcagttcaagaacatatgcaacttctgtgacagcctgcatggatgttgtactggtgtagcatgtctttttttatatatcttgtattaatagattggatcttttacccccagaaattatcttgtcaattggacccttaaagtgctgatgacatttttctgtgagctatgatataataaatctggcagatagagccactacagcacgttagtacc

SEQ ID NO: 34571 - DNA, 1345 bp, Zea mays
  Clone ID: UC-ZMFLMO17287B10_FLI
ggaagttttctacaacagaggcagctgatgcagcaatttctgctgccagtgttgctcctggcttaggaatttctttaaagagcaggccacttaatgtcatgaaagcgatggacaaggagtcagctcacaaaaaggcacttgagaaggcaaagactgaggtcgaggatcgacggaacctatacttggctaaggagggtgaaatacttgctggaacaccagctgcagaaggtgtgtcagatgctgacatgaataaacgtaattggttagctagaaggaaagcggagatgcttcagtctccaaaatttcatgtgtcgagaacaaggcttatcatctacaatttgcctaagactatgaccattaatgacgtaaagaagctttgcagagaagcagtcatttctcgtgctacaaaacaaaatcctgtcatccggaaggtgaatatcctgaagaatgaaaagaaaggcatacagaagcattcacgcggtgtagcctttgttgattttcaagaacatgaacacgctcttgttgctctaagggttctaaacaacaaccctgaaacttttggttcagaacgtcgcccaattgtagagtttgcacttgaggatgttgaaaaggtgaggcttcagaagattcgaatggaacggcatcgcaagtcagcagtagaaactgcagaagttcagcagaccccttcaggggatcaacctgcaagtgaaggccgtaacgcagataacagcaggactttcagaaaaggaaacaagcggaaatcacacagtttaccatctaaaccctccgactctgttgaagggctggccaaggatcctccagttcctggagttcgaaacgcgaaaactgcaaagagagcaaggaagtcaaatgtggggaccattttgccggaccgaggtctaacagatgcaaccccaaacactgctcagaatcaagttgcgtcaagtgagcttgatcaggcagctgctccaaagaaaagaaaaaacagaaaagacggtcaggcagagcaaaagagaggaaaggttacaaaaaggacaaggaaagaaccttccggggaaggaggtgtggacaagtcgctggtggagcagtaccgtttcaagttcttgcaacatggtgtgagcaagaccaagactaagaccaaaaggtagttgacttgggaactgtgggaagtgggattgatgttgaagagcagcacggtgtctcggaccaccgtataacgtttcgaagagcaagtctccacagactttctgaggcaaaaatttcgattgtgatgcttaatagttttgtgcccatctgtactgatatttataactgatctagttacagccgtatgaatcatcttatc

SEQ ID NO: 34572 - DNA, 576 bp, Zea mays
  Clone ID: UC-ZMFLMO17287C08_FLI
cgccgagcggtggaccgccgcgcagctccttgagcacccgttcgtggcggctccctgccacggccacggcgaccacgaggtcccgcgggtgtcgcccaagagcacgctggacgccgcattctgggaggccgaagacgacgacgacgacgcggacgaggcagtgttggcgagtgcgtcggagaggatcaagtcgctggcgtgctccgcctgcgccttgcccgactgggacggggaggacgggtggatcgacgcgctgggtgatcagcagcgggtcgaggtctgcggcgcggtccaggtggcgcgcagcgcgccaggcaaagtgtccagcgtcctggcggtgccagctggggagatggatgtcggcggcggcggcgggctcccctgtgatgaactggaagcagaggacgtgtcgttcggtggggaggttccaggagcagcggatgcttcggctgagcgtcagaagaaacgctatttgattttgcgttcgcactactgtcatgtactctcgtgtcagttagtgccctgtaatctaccactagtagttgttaataatgcaataaagttatgggttcccac

SEQ ID NO: 34573 - DNA, 1499 bp, Zea mays
  Clone ID: UC-ZMFLMO17287D04_FLI
gtgtcaatggatttcttatgggatgtcggccttatcttggagtagactcaactcatttgactggaaagtaccttggacagcttgcttcagcgacagccatagatggacataactggatgtatccagtagcatatgccatatttgacaaagaaacaaatttgaattggaaatggtttatgacactcctgaagagggctattggaacacccccaggtttgaccatacacactgatgcatgcaagggtcttgcatatggggtgtcacaagtgtttggtgatgcagctgaacatagggagtgttttagacacctcatggctaatttcaggaggaagtacaatggtgaggtgctgaaatacatgtggccttgcgcatgggcatgcacacatgagagacatcaagtacttatggataaaatttcagaaacttgtccaaacgctgtcgcatatcttagatatgaccacccacacttatggacaagagccaaattcaataaaatctgcaaggtggattacgttaataacaacatttcagaatgtttcaacaattggattaaaaatgtgaaggagttgcctgcagttgatctcatggacatgctcagggtgatgataatggagaagattgctacaagacagtccatagccaataaaatgcaaggccacatcctacctagtgtagttaatgatctgcatgagaagagtaggaatcttcgatataccatcactaaaagtgggtacatgaagggtgaggtttctggtgctagtagagatggtgttgcttggagatatggagtaaaccttgttactcaggcttgttcatgtggacagtgggatgtaactggaaaaccatgcactcatgccatagcattcataacttctcaacgaaatttgagaatcgaggactatgttggagaatgttattcggttcaaaggtttaaaaatgcataccaatttgaggtgtatccaatgggagacaggttacagtggccgaaattggacccaggattcgaaatgaggccaccaaaacttgagggcaggcctgctggcagaccaagaaagaaaagaatcaagagtgctggagagccaggtaagagagggccatatcaatgcaagaggtgcttccagtatggccacattgaaaaaggatgcaaaaatccagtggtggagccacatgaagaccttccagacaaccatttgcagagaaagacaaaaaaaggccccaaaaaaaggaagaaaagtgagccagaacagacttcaacttcacttgttcaaatatcgccatctagttttggaccaatgacaaggagaagggtggcgatgtccccaacctgcagctcaccttcagccagcaagcaaggagaagcaccggcttcaagcaaaaggagattaattatctagctgactgtgatggattgtatgtcatttgcatgtgtttgctacttatgcgatggacgtgtaagccatatattgtattttattgttagaatcaggcccccctgaatt

SEQ ID NO: 34574 - DNA, 656 bp, Zea mays
  Clone ID: UC-ZMFLMO17287D07_FLI
ctggatcacaagctagatttcattaaatgcttggtactagtagtattattgacaacacaagagtacataccgctgatttaaataaactttagttgctccactaaaaactgtataccatggcccatggggattaggccgaggagaggagatccttctccggtggtccctacaaaccaggaccagcccgcacgaccacaagtgccagcgaggagtggcacctgggcatgccacgtgtgcagtgggcatcaccatagccccgattcaccaatgggaagagaccccttatccgctgctcttatcctccgcctgtggcctgtgctcagctgcgcgtagataacgaactctcccgccctcacaaaaccgcccttcacgatacgcacccaccagaggaaaagggcaaaagccaaaaggcatcaccgccgcgacgacgatggcagcctcgctccaagccgcggccaccctgatgcagccggccaagatcggcggccgggcgccctttgcctcgctgccgtcccgcccgtcgtcgcaactcgcctgcagggcgttcggcgtcgacgccggcgccgccaggatcacgtgctccctgcaggacgtcgccagcaggtgcgtcgacgccgcgaagctcgccggcttcgcgctcgccacctcggcgctcc

SEQ ID NO: 34575 - DNA, 849 bp, Zea mays
  Clone ID: UC-ZMFLMO17287E10_FLI
ctcgagcgtcttgcccacatcaaccacaagaacctggtccggcccgttgggtatgtcatctatgacgacgtcgcgctgctgctgcaccaacatatgctgaatggaaccctgcttcagttgctgcacagcagcggcggcgatactgacggcaagaagcagaaacctgactggccgaggctgctctcgattgccattgatgtcgccgaagggctcgcattcctccatcaggttgccaccattcaccttgacatctgttcagggaacgtcttccttgactcgcactacaatgcgcttctcggcgaagtcgaaatctccaagctactggacccttcaaagggcacagccagcatcagcacggttgctggctcatttggttacattcctccagagtatgcctacacgatgcaggtgacggtgcccggcaatgtgtacagctacggcgtggtcctgctggagatcctgacatccaagctacccgtggacgacgtgttcggcgagggcgtggacctcgtcaagtgggtgcacaccgcaccagcaaggggtgagacgccagagcagatcatggacccccggctgagcaccgtgtcgttcgcgtggcgcaggcagatgctcgccgtgctcaaggtcgcgatgctgtgcacggagcgcgccccggccaagcgacccaggatgaggaaggtggtggagatgctgcaagaggccaagaacagctgagttgatgtgtttctctgctgaatcctgaatgctgcggttgcctgcttggaagtcgagccgagcctctagaaaaaaatctggtcattggttcggttcgagtatgaaatccatccagtagtgtttaattctctgtat

SEQ ID NO: 34576 - DNA, 996 bp, Zea mays
  Clone ID: UC-ZMFLMO17287F01_FLI
taacaacagcaatagaatgggtggcggcggcgggagcccggcagcgagcggcgggagcagcagcagcgaggatgacggagacgccgcgtggaaggcagccattgactccatcgcgtccgttgggttcagcgtcccttcgtccaacggcgtggcgaaggcagcctctagcggcagccgcgaggtgaacaaccgcgctgatctggaagagccgcgtgaggggaagccaaagagtcctgggcttaagctgtaccaggtcaaggtaagaaacatgttggatgatatgttagagaaaaatctcgaaatagtcaaagctccgtgcttgaacttagtagaccccatggaaacaggaggaggaataaagttatttaaaaaagcaccacctggtattagcatggattctacggataaatggcacgtgcaactcaagcgaccaagaatcgtgcctggggaagaggtcgatgagaaatcaaagaagttccggcatatgctccggtctgttgttgtcgacggcagtgacatagttgtttctgcaaagaaagcatctgagagatcattggctagattggaagtgagagaagctgcagcaaaggcaaaagccaagagggaggaagaaagggtgcaggaactaaagaaggttaggggagagaaatggcttccttctgttgctagacaaatgaaggaggaaaaggcttgggagctgcgaaggcaatgagctgatgatgcgccagatcaatggggctgcgtaggcttatctccgagtccagttatcctggtgcctgttctgagtggccacaaaagtaatgtggcctatttctgaagtttggcgatggcaataggattagcagaaagagtacatagaatggaagctttgttctaactgagaatgtagcactggatatgccagcgttcatttccatttaacttatgtagtaaaatttgtggctctgatgttccagaatatgatttgacatcaaactcttttggaagtgcattgcg

SEQ ID NO: 34577 - DNA, 1313 bp, Zea mays
  Clone ID: UC-ZMFLMO17287F10_FLI
aaaacaacaaggtggggggttctctgtgggttgctctgcttgttatctcacacttgtggacttgttctgcaggtgcaacatgcatgcattcagttcatctttgttgaaactgagctattctatgttttatttttgttatgcattagagtggtagtctggagcctggagggctgatatgcatgacatgttatctaatagaaacactgtcctgtaatgtaatcatgttatattttctgttctgaacaaattcaaagaaatctcatggagacaaactttgatagtacaagttggaggtctcgaattttaaggtaatatcgtgctagtattttcatttgcagtattgatctttgttggtgcaacctaacattagagtgatgttaatgagctgctgtagatgtttgatttaatctgcatgtgctattttttgtggagtttgatatttatgtgcttaaatttcgtgacttagcaatactggttgtatgctgagatgtctgaaaagctattacgttttctgtgaactgttgtgtagtttttaggtcgtgcatgccgtggaaagtgtgggtgtggcttttggtggaaaacatgaaagaacttcacccactgctacaatctaattgttttatatttttatcatgcatatctatactgttggtctgttggattaatttgagttgtgactatttctgttgatactttgcagcccagtacacctatgagatctcctgctagtaatgaagcccaagaatctctgaccattggtattgccgatgaacacattggtgctgttgtaggacgtgctggaaggaacataacagagattattcaggctagtggtgctcggatcaagatatcggataggggtgacttcatatctgggacatctgacaggaaggtgacgattactggaacatcagaagctatccggaccgcggagtccatgatcatgcagagggtgtcagccagttcggagaggctatgataccagatatgtttgacggactgtgggggccgttgttgagtccgagcagcatgtttgatgcaagttattattgtttgttgcgttgcgccaatggtttagtcgaagatatatatgtgcagcgtttgaatggatttgggaatagggctgagttatatcccgtggatgccacaacaaggcaggcaggcgccgctctgtgctagtggctgagtaggttgacaattcggtatgttgatttcctggtacccccccttcctttttttttttgagtcttgtgtatgtagatctgagtatgggttctttctttcacgtggccagaaagggcatggttggaagc

SEQ ID NO: 34578 - DNA, 2075 bp, Zea mays
  Clone ID: UC-ZMFLMO17287G04_FLI
tagagcaagagaactacatgatgaaaagcaggccgaatggccatcgaaagtcaatcgacctctatcctgcatgccatgccatcatgaacaattggctattcagcttgactgaaggtctcgggtctatatctcctttgtttatcttgtccagtcctaccatccctatccttattctcttccatcagctctggcagctttctgcacaagtgacctcggtctcaccgtcagtgctggcatgatgcaggtctgaatctacatcgatattaacaaaatactgccattaacatacagtgttctccatttccttcccccttctgtgcccatagcatactgtgtttgtgcttgttcagacaatgccggctgcagcggctgatggtcttgattccatgtgtcgcaatttaatttagtaaaacattaaatccttgacagcatattcagaattccacaatctagattgatacttaatcctaatcaaaattttaccttttcaagatttgaggttatgattttattaaagtcgaacccatgtgtgcaaggtcatcctctgacagatcatctagatcgccttatgcgtgctcggcctttgacaaccttcctatgacaattgacaagagatttatttcctttttaaaaaaaacaaaagactggtctttctttaaaggaaactgatgaggatcctcctggaccaatatgtgttactgagacctgagaagttagtacagttttttccacttgaaatatttcggtttagtgtgcttgattgggtatttttttgtcagggtggtggtccaaacactgtacaccagcagaggagtggggtgatgacttctgagtgtcaatgcaagtaagatgttgcactttttttttcaaatactggcaggagctctgcctgccagttaaaagtaagatgctgctagttgttgcttcctcagataattgcgagaaacttctccctattgcgtcgattcagttttattgtcttccctcattttgctctcactgttcatagcaacaaggacattgacgaatcatccgccgagaggctgtacgacgcagtgaagtacaccacggccaacatgatgctgatccaggtcccagtgttaggaacaacgaaggaattctggcgattatctgacaaagcgactaggatcagcagaaaacttgcattgatactgaggagccaccactcagtcggcaagtacctagctgctcctctgcaggtgtccaacatctggattgggaacaatgggagtgtcaagctaaggggggtcggtttcactggtaaaggcttcagcactgagcgtgtgagagatgactacaaacgcatgtccaggatcctgatggcgttaattactctctcgggtggggacagaagcaaattgcctccggactacaaagagttcctcctgctcttggaatcggacacccttacaatggaagatgaattcttgattgtaaacaatgctgcactgctgcccataaaaaaccgcactgaggtctttctgatgctacacgatagaattgtcgattatcttgggtgtgcggacaaaacgaagaagaagaaaaagaagaggatactctctagtcttccctacaaggaagactggctagatactgccaaggcaaatacaaaaatcaaccagtgggttgccaatgttcagaacgagtacagagcgactccacatgatctgctgcggctcaacagaaatgtaagaagccacatgcatcgctacagcgacggtgacgacatcgaggaagttctgtattgtgaatggcccgagctgctcatggtcatgcagaagatgttgcacttggaaggcgagctcgaaggcactgacattcagaacaagtttggctaggcgtcctacttaagctactgttcttcgatccagttcagggccgaaagtttatgctggtggagtgatggtcgatgtaagtttgtcgctctcatcatgaaggtaaagctggatcagctttataaaatgtatgttaaaatgtaaagtaaactttaaaccattctctctgagaaggtctcttcttaatacaataccgggagtctgtctcgtcttgcttgt

SEQ ID NO: 34579 - DNA, 1452 bp, Zea mays
  Clone ID: UC-ZMFLMO17287G05_FLI
tctgcacgctactctctcccttctcactagcccgcccgtcaaagcgagagcgccgtatcaccggtctatccatcccttcaccgctgcctcgatccgcgccgaaagatacctttcccccccttcctctcgcgccgccgttttggtgcgaccatggcggcggagggggaggccaagaacccgtccggcggtggcgaagggggtaacccccagcaccagcaggcagtgcaggctgcgccgccggagccgccaacggcacaggggggagcggtgcaggaggctggagcgcatgtgacggaacaagagccggagggggagaaggcgaatcgagatggggagggcggcgcgggggagaaggacgacggcgcgtgcagagatctggttctggttgaggatccggaggtgctcgccgtcgaggatccggaggaagctgcagcaaccgcggcactccaggaagaaatgaaagcgctcgtggcatccgtccctgacggtgctggggcagcattcacagccatgcagcttcaggagctagagcagcagtcccgggtttatcagtacatggctgcccgagtacctgtgcctactcacctcgtcttccccgtatggaagagtgtaaccggcgcatcctctgaaggcgcccagaagtaccctactttgctgggcttagcaacactctgcttggacttcgggaagaaccctgaaccagaaccagggaggtgccggcgaacggatggcaaaaaatggcgatgttggagaaacactattccaaacgagaagtactgcgaacgccacatgcatcgcggtcgcaagcgtcctgtacaggtcgtcgaggaagccgagcctgactctgcttcaggctcaaaatctgctcccggcaaggccaccgaaggcgccaagaaggttgacgacaagagcccaggtagcaagaagcttgccgtggcggcggcagctgcagctgctgtgcagtctacgtaattgatgcagcattttaatagtcgcaggaagagcatggcggcgctggcaactagcgccttcttttcattgcatgtgatctttagctataacctcatttagcacactcccagtggtgtccgtgggaggaggaagccgcaagaacttcccccgtagggtgtcgactgaaaaaattcacttgtagctgtatagtttgatctctagctttgtcgtgcctccggccttcaggtaggcgatgcggcatgatgttataaatcctctcccagaactgacaatatcgcattgtaacccaagaagccggtgcaagaacctgtgaaactgcattgatgtgccttttgacgtccacctttattttgggctgtgctgtgcgcaattatgtgattcatcagttgtataacaaagtggaaggtgcataattttatgcctcgtggaggctgtgactgtcattctgatagtaatgagtaggccagagattggatgtcg

SEQ ID NO: 34580 - DNA, 1353 bp, Zea mays
  Clone ID: UC-ZMFLMO17287G11_FLI
ttccctctcatcctctcgacctcgcttcctccctcccaccgtgccctgccttttcctcacgacctcgccgctgattgcggtcccccatggaaccgtcgtcctctcaatccgtccgccgctccatcgtcttcctgtatttgtgctgctgatatgtgtaacttgtgtttctccaggtgaaggcggccgagcacgcggccgagatggaggcgacggtggtcgtcgcggctgccgtggaggccgaggaggaggaggctgctgctgctgcggcttcgacgccgcagcggtctgggaggaaacggccccgcgcgattgggagtgggcggtaccgctcggtgtccaggtgtttctcccaatctcccctgctttcctcatcctgctgccgcttttgcttttaatcgctgtgacagcatagcacccgcctcgtctcgctgccggctgccgctggtgatcctgctccctgtggcattggccctagccagcaggcaggcagtcggccagggacggatggacggagacgacggatggaagccgcagccactagccagccacaccgcagaccgcgcacgcaagagaaagaagcggtgtttgcatggactgggattgccgacttgactgcggattgacggggacaggtgggagccagaaccgcccgaggaccctcttctcctcggccaagagacccacaccgcaactggaaccctcttctcctcatccgacgacagtggtggccactgctccggccaggcatagcataggcagcctggttacacaaaccaaaaaaggtatcccatacccacgctactgcctacacctacgaaacctgcttatcctgctgcaatttctgctaaattcgtggctaaattcaaagaatggtagtgtgaagtggaatcaaaatgggaactgggtgcagactgcctcaaaggatcagattattaaggtccgtggcttgtgctttttatttttctatcttcttcaaagaattttcggattacagtgtgcactctataaccagaattctatactatctatggagatggcctaatccatcctataaccaggatcgataagtttgttttttgatgccagtaaattattgattttggtccatttgctaattcattttgcaactgtatgacattagatccatgaaagagcagcaatccttctgaggggacgtcgctggttagatagttattacagtatcaagatttttatatgttcctttacatattttaaggttcacaaattgatactggttttatatgtagcagttcattgttcactgtaaccatacatgtaaaccataagcaaatgtgatgtaggagattgttatataaagagacttttgcagcc

SEQ ID NO: 34581 - DNA, 439 bp, Zea mays
  Clone ID: UC-ZMFLMO17288A09_FLI
ctaacacaaaagctggaggttcagacacagaggcttgaactattgacttctcaaaggatggctaacgagaatgccctggcgaaaccaattgacacacgccccatcaacgaggcaacaatgtatgcggatgaaggagacgaggttgttgaacgggtgcttggctggataatgaagctcttcccaggtgggccaaagcggcgaaccagcaagcttctgtaatgaaaatagagctcctagtataccagatatttcttccatttagggtgtgtttggcatggctctgctccaccccagagcagctctactctaaaactctgggtggagcagctctgctccagagtttagattgtttctcataaccagtgacaatggcgggtaaataactcaaaactccatgactaggttgcttttttggagttttcagagcagcaaaagaggt

SEQ ID NO: 34582 - DNA, 934 bp, Zea mays
  Clone ID: UC-ZMFLMO17288A11_FLI
gcaaagccgacatcagtcagcccattctcatttggtctccagatcaagcagttcttcgccttcaagaacaaagtcactaagctcctgtctgaaggagatatgcacagccgatacattcctcagcaagattacttctcagagggactctacacgttcgatattgggcagaatgaccttgctggtgagttctattcaagaacagaggaccaggtcatcgcatccattccaactattttgctggaatttgagaatggtctcaagaaactgtatgaccaaggtgctaggaagttctggattcacaacacgggccccctcggttgcttgcctcaaaacattgccctcttcggcaaagacccatcccaactggacgagctccactgtgtggcgaagcacaaccgtgccgcaaagcttttcaacttacagctgcacgcactttgcacgaagctgagggcagaattcgatggagccagcatcacttacgtggacatccacacgatcaaatacagcctgatcgccaactactctcgatacgggttcgagcacgccactcaggcgtgctgtggatacggaggcccacccctgaactacgatggtaacgtaccatgtggacacacggtgtctctggatggtaagatggtcaccgcaaaagggtgcagcgacactactgaattcgtcaactgggatgggatacattacacggaagctgcgaatttccatatcgcctcgcagatcctgaccgggaagtattctgatcctccgttcgtggataagatgccgttcgtcataaaacctagattctgattggcatacaattttccctctttactcacccactttacagcaccggttgcagatacgatgtatacttattacttgccaataaccatatatagcttgagtaaaaaatcatatatacggcttggtttcagttgtc

SEQ ID NO: 34583 - DNA, 2984 bp, Zea mays
  Clone ID: UC-ZMFLMO17288D12_FLI
ctaccaactggcggcggcggttcataccctcgcgaagaccactagggccgccgccggcgaatctcaagttctcaacacctggcagaagcaaatcggcgtggcactcgccgggcaccgctcccttctccctcctcccacttcccagttctcgatcgtctcaactctgcgggctgcggttccgcctccgcctcctgacgacctcgcccacacgaccgctgcccgcttcggtcgtcgcccacaccgccgttctctcccccgggtgcccataaacccccttctccgcgccatcgttggcccggcgtaaccatctccgctgcggggacgaggaggagcaagcaaacaggaagcagccgagtatcttgccagtatattatatgcgttgaggtggcattgctgatgaaagtgaagacatgaggcttgaatgaaccctaactgcccccgccaaccgccgccgccgcagcagtcaccgactcctccagtcaaatcagccatgtcgccgccgccctgtgacgccctgcccaccgctgccaacaacatccagccatttcttgtccttcacaaggctgctgcctcctcggtgccatcttcccggtctcagcgccagattcagacctcacagccatcctcacccaaccgcaaatcagcaaacagatgtcgtcaaccagcgggtgaggagtgtgaggacgaaggggattcggagctatatgagcagctgcgtgctgaggccttccaccgaacttggtccaagatccagtccaccatcgacgaggtcctcagggccatcaacctcaagctgttcgaccaggtgctgcagtgggcgaaggagtccttcgcttcggcccatgccatcacgaaaaagcaccacactgaagtccagcagccataccctctcctgactgatgtgatctgcagaaggatcccgacggtattcgtcctcaccaagaatgcagagtttgttgatgatatcacaacgtttcatgaccttgcagggcatatgaagtccaatggatgtcacatagtcaagctgtcagcggctgagttatcagcaaaacatggagttggtggttgcttcaggagcctgttgggacagctattatccgatgttccagatgttgctgatgtatctgcgctagcatcatggtattgtgaagctgagaactttgatcagcctatcattgtcataattgatgatttggagcaatgttctggcgatgtgcttggagagtttgtgatgatgctgagtgagtgggtgtttaaaattccagtcttctttgtaatggggatagcaactacccttgatgctccaaagaagcttctctcgtcagaggctcttcaacgattagagccctgcaaacttaccttggggtctccctcagatagattgaatgcacttgttgaggctgtccttgttaaaccatgcgctggattttgcatcagtcatgaagtcgcactgttcgtcagaaattacttttttaggcatgatgggacaataacttcttttattactgctctcaagcttgcatgcagtaagcacttctccatggaacctctaagctttttgtgcttaggaatggtggaggaagattctgaggaattttggcatgataagcttgaatcgctccctcaaacaatatggaaacatgctttcgatctaccctcaaacaaaaatgcaaggaattcttgcaacatggtagaaggattgtctaggctgctgaaatcgcaaaaggattggagttctgttctcttgtgcctgtatgaagctggaaggcatgacaaagtgcagcttttggatatcttctgtgaggcagccagcccagattggcaaactgaaaatgcaccagatagttacctatttgcttctaaagtggctttattaggagtaaagtcagggtctgctagaagatttatagcccaagtaatgaatacaataaggtacttgcctacggaaattttgttacacgtccttgaggtttggagcatccatttaaaaggaatgagtgagatcaacgacagagtgaaggagcttcggtcaaaaggttgtggtgcagatagtgttagggccaaaaggaaatcaaccgccaatactggaaatggagtggttctaataaacgaggaagcggctgcgctgttacaggatgttatcaggaaatatttggtacctgctgaatgcttacctttccatgaaatagtctgcttcaagaatgttgacatcctccgatctgcgctgattggaaacccaagaagaatgattcaactcgatcttctgaggtcacagagccatctgaaatgctcttgttgcagtaggagtggtgctgccgtgtcaggatcgttgcacgacacatcaatcctgtgcagtctagcccaagagtatggtgacatgattaacctccatgactggtacacggcctttgaagggattataaagagcacaaactcaaaagccaaagggaaatcttgcagctctccctcgaagaagaagaagaaatcaaaccccacgcctctggagggtgatggcatgatccaagcaaggttctgcagcgccgttactgagatgcaggtcactggccttgttcggatgccgagcaagagaaggcccgatcttgtgcagagaatcgcgttcggtccttaacagctcggtgattacatgcatgctatacagacgaaacgttttgtgcacgctgacgataatcccaccatgtggtaaattgggcagccgtggaaggaaggtttggttacttgtatcggtgcttcgaagagagctgtgagatggagcagcagccgccgcttcagatatgcagtgctgatgttgcgtctgatggctaagctatgtcgttattttttttcctcttaagagcagtattaaacatgttttagctattgattcggctctctgtagagctgacatgggctcatgtagcccaaggggtacatttgagaaatttttatccttgaaacaaagggcatttcgaattatttcccctttt

SEQ ID NO: 34584 - DNA, 370 bp, Zea mays
  Clone ID: UC-ZMFLMO17288E01_FLI
gggcttgaccaagggctcctgacgaaggctttcatcttcggcgtcgcgcggaaattcgtcgggcagaggaagacactgtagcatctctggcatttatttctcagcgtcgtccgcttggcccgtggtccgcactaaccggacctgtcctttcactgtcgtagagtggaggatagaggtggttcagtgtctgcctaattggggcaaatgccattgaccattgtggctgaaagagaacagagctgatgaaaaacattttggtgtacagatatgctgccggctgttggatagcgaggaatggggaatagagcaaacaatgtacttctcgtttggagaacggaactcctacgatatatataaatgtgtttcatct

SEQ ID NO: 34585 - DNA, 2257 bp, Zea mays
  Clone ID: UC-ZMFLMO17288E02_FLI
gaatcagcaaagactaattgaagcggatgcatcaaatgcttcacttaatcagcctcgcattttcgctgtatcttctgataataaagatatagagcgtgaatgtcctagcccaactccaaggtctgaatgcaaggaatctcttatgaagaactcagtattaacatcagcggcgcctgaaattcttgtaagatcttctgcatccgcttctgatacatgcaaaatggaggagtttgtgaatcagcaaagaccaattgaagtggatgcatcgaatgcttcacttaatcagcctcctcgttgtcacattttcactgcttcttccaataatcaagatattgagcgtgaatgtcctagctcaactccaaggtctgacagtaaggaaccttttgtggacaacttagtgttaacatcagcagtgcctggaaatctactgacaagttctgcagttgcctctgatacatgcaagatggagatcttcaataagaaaataacacttgaagcagatgcatcaaatgctccacttaatcagcctcctctctctagcgttttcgcttcatcttctggtgatgaccaagataatgtgtatggacgtcctagtccaaatccaagacctgagggtgagcagcctctcatgggtaactcagggttaatatcaacagtgcctcgaaatctaacttctacttctgcatctgcttccgacatatgcaaaatggagatcttgaatgagaaaagaacacttgaagcaaacccatcaaatggtttgattactcaatctcctcaacccaaggttttccttgtaccatctcctgatatcctagagtgtgaattttctagtgaaacacctaggcatgagtttaaggaacctgttgcggacagctctgggttaacttcagcagcacatgaaaatttagggactaagccacatgtccactcaccagatgcctttgtaccaccaaagtctggtgctctaactggggaattaggtgacacgaaatcagattttaaaggtgaagaaactattcaaaaagagcaacattttggaagtgaatctattgccgctacaagagagaatttgttaattgatccttcctctggtgttgagtcgatagatgtgtcagatgtactggattctttaatggaagaaaggagtggaacttcgtacatgccaggatcaatagaggacttcctagccgaagaagaaccacaatactctagccctatcgcattatctccttggggtgaacctagttactaccaaggtgatgctgttgattctgcgctatggggtactcaagatttgatcaatgatatgtggtcattgctttcaccaagacctatgctccaaccttcatctggtattggaactgaggggaaggaaacttttgatatcaacgaggtggctgtgacccatgttagtagtgattattttcaaaaaggatcaatgtttggggaggaaaatgtgaaccaggcaaacttgagtgctgctgcagactggatgctgcctgagcaggtcccatcaataccaaatggtatgtcaacatcgtcagtagatgagagcaccatagttttaggttctcagccatcaaccaatcagagcttagactggggtggtactacatggagtactggccagaatgtcagcgtgtatagcaatgaaaaagcagagccctcgagtaaaagctattgggaagaaccaaggaagcaggaaaccaccaaatccagtgtttctatttcaggacaggccattgcaaacaacaagggcttggaccctcgtgataatgctgctaatcggggcagccggctgagtcatcatcaccgtggcaggtactcccaaatcagtgaatcttggctacttagttcaagtcactctaggagtaggtctgatagatttggcagcggtgggtcatcaagatcaacttcaaaggggcaatctaggggctaatgtaaattgtcaagtgcaggagagaaaggatgcatcttgtagctaacctgcatccttgatctctgcagcaggaatagttttctttttaaaattctttgtcatatctttgcagtttgtataggctaattacagtttagtccactcagactgtagcaaggagcatatatgtttagcatagagggtatttgactgcccaaggagtagattcggctcttgggcatggtctgtatcatcctgacattctgttggatggagctgcaattgtaccaccggcatctctcttgacaccgaaacgcctgatgcgttggaaacatttat

SEQ ID NO: 34586 - DNA, 567 bp, Zea mays
  Clone ID: UC-ZMFLMO17288E05_FLI
cagggtgccctatgggaagcaagctccttataacgtgacggtaactttacttgttccggggaattatcaaggagataggcgcattgttgtcagtggtgtgtatcatcaaccagggaagcaacggatgatgcttcccactgttcctgttagaactactggaactgtggtcgtggagatgatcgataaaaatgggctgtacttctccgacgagttctcactcaccttccacatgcattactataagctgctgaaatggcttctgctactgccaatgcttggaatgtttggtgttctcgtcatcttgaggccccaagaaggtgcgccgctgccatcgttttcacggaatatcgactagtggtgaaatgccggtgacccattgaagctgacgaagtgactccccaacatctccatgacctaaatgtcttgttcagtgtagtatcccaacagttaaccatttcatggattatagttatattttttacaatgtacccatttagttctgcagaacaattttgtacacagccattttcaatattggctcacccaaagaacaagcatattgtcacc

SEQ ID NO: 34587 - DNA, 1656 bp, Zea mays
  Clone ID: UC-ZMFLMO17288E11_FLI
gcccgcttcccgtccatttattaaactttcgcaagcgcaggtatctccccacagggcagcgcgtgcggaaaccctagtcgccgccgatgtcggaccctttctacccgtactaccgcggagccttcccgggcggcgacggtgcgcagccgccgccacgttactcggattttgaggtcgacctcatcgcggcccgttacgccggcaccctattgccttatccatcctctgccgacgtcggcgccttcgactcgtatgtcggcgcgagacgatccgcggaagttctctatcaccaatcttttatgggaagtcatagtactgttggccagaatgaggctttatattcatcgaatactatggctaaacgccctaggcttgaaagcagccttcctatatatccacaacgaccggggcaaaaggactgtgccttctatatgagcactggaacctgtaagtatggagagacctgcaaatttgaccatccacaacgggttccagagggtggggttccaaactggaaagaggccccgaatgttgaagattcttatcctgagcgaccaggggaaccagattgtccttatttattgaataatagatgtaagtttaaatctaaatgcaagttcaaccatccgaaggatatggtgaatgcattaggaacaggaacaaacaatgaatctctaattgctgatagcgctgtcttaccagtgaggccttctgaacccatttgtgtgttctatgcaaaaacaggcaaatgcaaatttggtgccatttgcaagttcaatcatccaaaagatattaagacatcacctttgattgcaaaggaaaccatatatacagcaacaactgatgcagcagatgccccgaccgaggcgtgtaacgcaaaggggcttcctataagacaaggtgaagtggattgctcgttttatatgaagacaggcagctgcaaatatggttctatttgtcgcttcaaccatcctgatcggccagggccagctgcggatatagcttttatggttccactggttcaagctactcttccttcatcagcacccattgtccctgcagtggttgaacctttgccaatgatctatcctcaaaggccaggagaaactgtttgtgatttttacatgaagacaggatcttgcaagtattctcagaaatgcaagtttcaccaccccatcagtcgttttgccccgcattccaaagaaaacggggatcctcaacagcctgcgacacttgctagcctgccaaggagagaggacgctgaggcttgtgccttctacatgaggtctggcatgtgcaggttcggtgcgcactgcaagttcgaccaccctcctcgcgaggaggctatttccgagctgcaggcagccggaaaggaaggaatagaagggccgagcctcgtccagcgcgaccatgatgtctaatactgtatcctgcttcagtatgtaataccatgtgaatcgcactgttagttaatgcttggtgctgtcagtcttgttgggagtctgactcgtaaagctcattatcatcggaagtgtttgtcggaggagtgctggcactaactatttatcttcagttggttgtcgtgttgccaacttgcgatgtcaaggtgcatatttcagttttttagagtaaaaatgcactttacatcctgccgcc

SEQ ID NO: 34588 - DNA, 1229 bp, Zea mays
  Clone ID: UC-ZMFLMO17288F09_FLI
agagacgggcaggggagagaaaaaaaaaaatctaaccctagcatccgcagcgctagggttcgggggttgcgatggcggcggcggcgagacagcgggggacggtgaagtggttcaacgacaccaagggcttcgggttcatctcccccgaggacggcagcgaagatctcttcgtgcaccagtcgtcgatcaagtcggagggcttccgctcgctcgcggagggcgaggaggtggagttttccgtctcggagggtgacgacggccgcactaaggccgtcgacgtgaccggccccgacggatccttcgtcaggggcggcggaggcggaggaggaggcggcggcggctacggctcccgcggcggtggcggatctggcggcggcggtcgcagctacggtggtagctggggcggcggccggagatccggcggcgggggcggtcccggcgcgtgctacaagtgcggcgagcccggccacatggcaagggactgccctagcgccgacggcggaggcggctatggcggaggcggctacgggggcggcggctacggaggaggaggaggaggcggtggctgcttcaagtgcggcgagcctggccacatggccagggactgctccagcggcggcggcggctacggcggtggcggcggcggtggtggtggcggctgctacaactgcggccaggccggccacatggccagggactgcccaagcggtggcggcggtggcggagggaggttcggcggcggcgggggtggaggcgaccgctcctgctacaactgcggcgaggccggccacatcgcccgcgactgtcccacgtgaggtgtgtccgcgtccgtccagccagccagatcggatcggatcgctccaccacctgctggtctgatggcgccgcccccttctagatctcgcttaaaaaaacatccccctctcgctgtgtgtcggagtaccgctttagttttgccgatccgggcacgagtgcccgctgcctctttcgtaagaggatcccgtccgccgttttcagatttcgttcggttcgtagaagaactctcaagttaagttaagttatcatggtgtgtgcttggtcgtcgtccgtcgttcgtcgtcgtcgttaaggttttaagagatgatttggtcctgtgttgccgaggggaagtccaatctgcttttcttttcttttttgtggtttgttccatcagactgaggaaggagatgagatgattattctcccagatt

SEQ ID NO: 34589 - DNA, 1430 bp, Zea mays
  Clone ID: UC-ZMFLMO17288F10_FLI
ggccagagccagcggaaccgaacggaagcgagaccccccggcggctagcgagatggacggcggcgccggcgaggaggggaagcaggagcggcacctggtgctggcccacaagctcttccttctatcccacccctccgttgatgacctctccaaggtcgccctccgcgccgaagtcctcgacaccgtgaaatccgatgatatggcgacgctgtttgagtcgctggtcgccgcgggtgtgctggagggggacgccgcgctgctggccgagatgcgtgggaggattgacgaggagatccgcaagcttgatgagaaaattgctgatgcggaggagaacttgggtgagagcgaagtccgtgaagcacatcttgccaaatctttgtactttataagggtcggtgagaaggaaaaggccctggaacagcttaaagtcactgaaggaaaaactgtagctgttggccaaaagatggatcttgtgttccacactttgcagattggttttttctacatggattttgatctgatatcaaaatccatcgataaggcaaagaacttgtttgaggaaggaggcgattgggagaggaagaacaggttgaaagtatatgaaggcttgtactgcatggcaaccagaaacttcaagaaagctgccagcttatttttagactcgatttcgactttcacaacttatgagatattcccatatgatacgttcatcttctatacagtcctcacaagtgtcatcacattggatcgtgtatctctgaaacaaaaggtggtagatgcaccagaaatcctggctgtaattggcaaagtacctcacctctccgagtttctcaactccctgtacaactgccagtataagtcgttcttcgttgcattttctggtctgacagagcaaatcaagttagaccgttatcttcagcctcatttccgctactacatgagggaagtgcgcaccgtggtatactcacagttcttagagtcatacaagagtgtgacaatggaagcaatggccactgcgttcggtgtaactgttgatttcattgaccaggaactgtcacggttcattgcagctgggaagctgcactgcaagattgataaggttgctggtgttctggagactaaccgacctgatgagaggaatgctttctaccaggccaccatcaagcaaggggacttcttgctgaaccgcatccagaagctttcacgggtcattgatctttaaggactgtctgtgttggagctcttcctgcaatcggcgcctgcaaatgtttcccaccctacggcttccacaagacatgaccatttctctcgagcggggaacaagtcttaagaacatctgtgttttaagtgcagaatatttgtgttttaatcagtaaacgctgtcctgtcatttcaagtttcctatctgtggctctgtctgtgattttctt

SEQ ID NO: 34590 - DNA, 1871 bp, Zea mays
  Clone ID: UC-ZMFLMO17288G02_FLI
gcaaccagcagagtctgttgaaagttgaaaccttgtcaatcagcctatctcaatacttacataacttcttggttagaaaactacagacattactacctgattggagtattggatacactcacacacactaaggaaaaatatcaatttatagtgcaataaatgctattacttgactattgtatgaatttgcttttttgtcactgcagagttttaattcaagcgacagcatcttctgtggtgtgtttgatggccatgggccatacggtcattttgttgcaaagaaagttagagattcacttcctgtcaagttgcgcacacaatggcaaactagtgctaatgggggctctagtcctcatcaaaatggaagcatcaactccgaagaaacagggtctattgttgacgatgaatggggtgatggtgatgacactgaaaagctccctgagatgtttcttccactgaagcaatcttacctaaaagctttcaaattgatggacaaggaactcaagctgcatcccacagttgactgtttctgcagtggatctacggcagtaacattggtgaaacagggattggaccttgtaatcggaaatcttggggactcaagagcaattatggggagaagagacgcctctaacaatctaactgctctgcaactcacagttgatttgaagcctaaccttcccagggaagctgcgaggatacaacaatgtaaaggacgggtctttgctcttcaggatgagccagaagttgccagggtatggttgccaaataatgactctcctggattggcaatggcaagagccttcggggacttctgccttaaagattatggtttaatatctgttccagagatatcatatcgccgccttaccgaaaaggatgaatttataatactagccaccgatggggtatgggatgttctctcaaataaggaggctgtcgacatagtagcatcagccccatctcgtgcgacggcagccagggcccttgttgactgtgctgtcaggtcatggaggttgaagttcccaacatccaagagcgatgactgtgctgttgtctgcttattcttgggtcacgagaagtcggccgactcggttcaagggagtgaacccaatgtggagacagcagaacccaccgtggaggtttccagttccacacaggattccagtgcaggggttgacgaagacattgcagatgctggcatgcatgtatctagtgcagtgcacatttccgaggccacgctgcagcactccaccacgttaagggaggtcgacgagattgtaccggtcgacgaacctacagcctcgaaggagcctggaaggtgcgggtctgctcgcagcctggcagattgcatatcgacaaacgaggaagaggaatggtccgcgctcgaaggcgtgacacgggtgaattccctcctgaacctccctagactactgtcgggcgacaagcgatcgaccagctggaggaagcggcggtgaccggtgaggaagctctcctacaattctttgccgagttcaggtgggggttcatgcagaggcgcgtgcaaaatcctttagggcttgttcgtttacgtcggattgcacccggaatcgttccagctaatcaaagtttatataaattagagaaacaatccggctaagaatcgttccgacccaccaatccgacacaaacgaacaaggccttagtctctgggaatttgttatagctgatttttaggcttccccagattgttttgccggcaggcgcgggcgtttcagattgcttcttcattcttgtgcctttgccgggaggtgttcccagaaccattcttgggcttctctgtgtccgtttgtgcataaggaagtttttgttctgtgagaagcttcttttgt

SEQ ID NO: 34591 - DNA, 1500 bp, Zea mays
  Clone ID: UC-ZMFLMO17289A06_FLI
gaactactctcaccattaactataacaaattttgtcaccaaaatttggtggctggtggatctacttaagaatcaaaagtcagacaaggtggacatcaccatccaaccggaggagcaggaagccatgaatgatgttctagcagccagccatgaccgcgtccacgtcatcaactttgacatcaagcaggggctacagtggccgggcctcctccagaaaaagaggaattgaagcagtatctgactcgaacatttttgtagaaaacttggtagaaaaagaggaattcctgcatacattttcgaaggaatgtgaatatatcagaactgcagtgacaaatggtagtgccattaagcatgatggctcatatgaatcagatcctgcagttgagattgttcgagttgaactccaaggtgctgctgcatttcttttattctcgtctggtacctcttgtacttcttctggttgaaggttccacgcctatatatattggagaacatggatgggaaatgcttctggtagtaaaaaaggcaacacaagaggctggttcaaaatttgaactgctaggttttgcatctgtgcataacttctatcattatcctgagagtattcgcttacgaatcagccagatacttgtgttgccaccttatcagggtgaaggccatggtcttggtcttcttgaagcaatcaattatattgcacagtctgagaacatttacgatgttacaatagaaagcccttctgattacctgcagtatgtgagatcatccattgactgcctctgtttgctcatgtttgatccgatcaaacctgcacttggtgctattgtctcgtctctgaaggagaccaacctgtcaaaaagggcccaaagtttgagaatggttccaccggttgacctgatggagactgtccgttagaagctgaagataaagaagaaacagttcctccggtgctgggaaattctggtcttcctaagcctcgactctcaggatcataagagcatggacaacttcagggcctgcatatatgacctcatgaagggggagatccttggcagtgcctctggaactaacaggaagcgtctattgcagatgccaaccagtttcaataaggaggcatcttttgctgtgtattggacacatgagattggggatgtggatgaacaaactgtttagcagcagccagaggatctcaggacgcaggagcaacagctcaatgagctcgtggacatccaaatcgaggagattgatggggtcgccaagaacgtcacttcacgtggcaaggataagatggcagagctggcggttcaatgaatctgggtgaggttcctacttcaaacgatgttaaaatgttgtcgtagcttatctggtgaggtctcttttacgagttggcttcttggtagaaagggaatgtcacggcataggcactgagtagattgtcacgacagattattatatacttcaattctggaatatttgatggaaatgctattttagattgcttggt

SEQ ID NO: 34592 - DNA, 1513 bp, Zea mays
  Clone ID: UC-ZMFLMO17289B04_FLI
ccgtgccctacgccccagaacctcccaccgcatcggagggctccgcgcctccgccacgccgatggcgtcccagccgccgccagagcccgcaccggccgaggcgggtctggaaagcatggagggcctcgtcctcgacacggtcatctcaagagccggcgcgcgccccgcagcggcgctcgcctgcgccagcacgcgcctccgcaccgccgttgccgacgactccctctggcgcagattctgcggtgaggacctggggctcgacgctcccgtcgatccagagggccggcctcttccctccttccaggttgcatataaagtttggtcggagtcttttggcatgtaccctctacctatggtaaagagagtgagacaattctggacttcaatgaaaacttggttgtctgaaaactttcctgaggcatacaaaacgttatgcgaaggtgtttctgaagctcaattaaagtcagcagaggatgatcttggtttcaagctccctatgcccacaaagctgttgtatcgcttttgcaatgctcaactgccttttagtgaggaccatgacacaaataaaagcatttccacttatggattgattgggggctatgcgttttatgatcattgggtgaatgtgcatttgtcaccgcttgagcaaatagttgaagagacgaaggacttctatcgggagttccctgatgtatttcatgggcgcaaattcattgtagtggcaacttcatggtttcatccgaaaacatttcttctagattgctcaaatggtgaactttatgttggtacatacaacttaccgataggaggaatgcttccctgtgtgcccaaagcattgataaagccagcaggtaatgatctagcacaagatggactactcctgtggttagaagaacaccttaggcgtttacagagtggcatgatcaagacccgtatgctgatggcatcgagatatatcagcttatatccagaagcacctccatcatgcagttcagctgttacaaatggcattaaggtacgctcatctgctgtctttgtgccagaacatcctgggaggcctggggaaaaatttatgttcacttactcaattcgcatgtcagttccagaggcatgcatgctaggtggcgtgtactattcttcctgccagctttgctcccgccactggaccatcagatcgtgtgacagggttgtttctgatgtgagcggaggaggggttattggagagtatcctctactgttacctggtgaggatgagtttgtctacgagagttgcacgccactgccccaagtaccaggatctgtggagggctctttttcgtttgtgccgggcaagttgagccgacctgaagggaagccgttcgaagtcatggtggcgcctttccctcttgatgtgccagaatacatcttctgatgatcacagcagaaataaatgtatgtatggttgttgggaaaaagttcggatgcttgtaataaccttattggagtaatgtaaaataaggaaccgtgcgctctt

SEQ ID NO: 34593 - DNA, 738 bp, Zea mays
  Clone ID: UC-ZMFLMO17289C05_FLI
ccgctccaccaacgaggcgatgctggtcatcgaggcctaccgcacgctgcgcgaccgcgggccctacccggccgaccaggtcgtcaaggacctcgccggcgccttcgccttcgtcgtcttcgacagccgctccggcgccgtcttcgccgccctcggcgccgccgacgccgggggagcgccggtgccgctgtactggggcgtcgcggccgacgggtccgcggtgatcagcgacgaccgggacctggtcaagcgcggctgcggcaagtcctacgcgcccttccccgcgggctgcatgttccacagcgacggagggctcaagagcttcgagcaccccatgaacaggctcaaggccatgccgcgcgtcgacagcgagggcgccatgtgcggcgccaccttcaaggtcgacaccttcaccaagatcaactccatgccccgtgttggcagcgccgccaactgggccgcctgggacgaagccatctagtagatctagccttgccatgtacactgcgctgcctgcaacccgttcgccggtgcccctgcccctgcccgtggtcttttatcatccttccaaccacgagactttgcttctaaaccagaggctccatctgtgtgccgccttgttttactagaaatctttttttttatcctttttcacttttcctgcctagtttttccccttatcctggcattgtacaaataatttctccagtgcttgtagcttgtggacttgggttgtcc

SEQ ID NO: 34594 - DNA, 1308 bp, Zea mays
  Clone ID: UC-ZMFLMO17289D02_FLI
cagacggaaagaacaccggaggcggagagccacaggaggaggagctcgagggacgacgaccagctgaattaggactggagggggcagacgacgtcgtcgtagcggcagcagcaggagaagggaagactcaaacgagggatctccgagagaggagtgtggtaggcaggaagaaagaataaggcgagccgagagccattcgcatggaggcggcgatggatctgatgcggcggatgccgccacggagcgcggagacggcgctcaacgcgctgctctccctcctccccgaccactccctcgacctcctctcccaggtcgacctcccgctccaggtttgcatggataaggagagcctgaaggaatacattctatgcgaatataaccgtgatgctgactcctaccgatctccttggtcaaacaaatatgacccccctttggaagatgggacagttccttctcaagggatgaggaatcttgaggttgaggcaaacgaagttttctcagtgtatcgtgaccagtactatgaaggtggcatctcatctgtttacatttgggaggatgaagataatgggtttatcgcatgcttcttaattaagaaagatggacaaggaaaaagagggtacatgcagattggttcatgggatgctattcatgttgttcaggttggtcctgaagaagaaggagcggcacattactgcttgaacagcactgtgatgctctcattgacaacagacaacaagcagtctggaaccttcaacctgtctggatccattagacggcagatgagtatgactcttgctgtagctgatggacaccttgttaatatggggaaaatgatagaagaaatggaggggaagctgagaaattcactggaccaagtttattttgggaagaccagagaaatggtttgcactcttcggccaccaccagaagttcttaatatgagactacctgacagctgagccagtgcatagaagtgtcaacttaacaaagaaaaacgtattcttctccactctaggcgtggtctgttcttgcttcgtagttaatagtctgtgcatctgtatcgacatctgttgaggtatctatgataggagcttattatcttctgatcttttgtgattagctgtaatccgcgaagtgtttgacaggagccagtgtttgcagtggaactcagttaccaacagatgaatctccacaaaacgttgtgttggcgttctgtatcttctgaagaatctgatggtgttgtggctggacttgctatctgtcaaagtactaatgcggtgtttgttttgaggagtcgcctcatatcgg

SEQ ID NO: 34595 - DNA, 2105 bp, Zea mays
  Clone ID: UC-ZMFLMO17289E05_FLI
gaaaaatattcaaatttaaaattccttgcagtttcgaaacttcttatgtcactacaacaaaggtttattcatccaagctgtataatttcatcattagcttcaagcacctgttaacttagagtgctccaatacgcttaggcccaattacaaagttacatataccaaaataaaactcgacaaggaaaattatctagtaccctagagtaaattttgaatagttggcgccaagcaggtaacatagagtgctccaatactcttaggccctttcacttgaaacatcgagggggaaatagctatgaagtatggccctttgacctatgtctcttccatggaggacaccactggagcctccaacgccgtgcagatttggcgacacagggtgtggaggcacactgtgactcaccatgccatgccgaggacgaagacgccgatggagacggcgatgcccaaggcagagaagatgaagggcgatatctgcaccacgggtgagcggcctctgtcggggtggggcgagaaacacgtatggggacgctggggacgcctgctccggcctcggctatatactgctccatcacaggtgtctgcctgctgtgcaacgacatccgctgagttgttgccttgccttcgtaagcttctccatgcggcaaaggggttgtctccctccgtgaaactcaatcccaaagtgcaaggcgacgggctcgtcccacgacgcctccatgaagtccaagctgcctatctcggatcctacagttatctaagaaccttgttacatgcagctaattgtaaagctccctataggcatcagcctaatgaattaaaataccaccatcaaattttggaactaatgaaaatgtgtagcagactggttaattgtacgatcccatatgaaatgagttagaaaactgtgtaagaaatatatagggaacaccagagcatgctagcacaacactacatcaagcagatgtggtgttatagtatcgtaatcttgcaattcttgttcatgggccttgtacaagtcttcaactctttttcttactccagcaaaaccagtggggttaacgtacatgaaggatagatattccagctcagactacaaagacaagagctgctggtcaaaaggaagaaagaactaagagtaaatgaaacatagattgatatactgatatatgcctacatgaaaagagaagtatccaaaacaaaagttcttttacacggaaaaagtagcagtacaataaaacctattataacaaaaaaaataaaataaagggcacaagtatttctttactctttacttctttagtccctcaattttgagagataggccattccctacctcagttttgagagatagtccattccctacctcaattttgtcatcttgcttctctttatatgttctttgtcatctgaattttatgcaaaagatcaatggtacctggtctttaggccactgaattaaccaaaattctgtcgagtctgttggtgatatatcaagcatggcttattctttgacctcctcaaaagccggtccaggctcatagcagacccttgcttttgccttgaccatctctagcgcgagtccagcctctagtgatccctcacccgcacgggcgcagttgacgcagtttttgctgaacacccccaaatatagtttgggaaattaactgcacccagcaccttagtggattgatatcgtgcactgaagaacgagaaccaattggggaggtggatgggggcgaggcgaaggggccagctccgcctgatgtgcagcttcgggggccggatcgtcccgcgcccgaccgataagtcgctctgctacttgggcggggagacccggatcgtggccgtggacaggcacgcgtcgctcaccgaaagcaaatatggcgggtcggtcttaatgttcaatgatttaacatgtccctagcatcagaacatcaagataacacatgcttaaaccagtatccagcagttttggacaatgaacaagaagaaattggagaaaatggagcagaaatcacaacagtattgcatacctcatcatactaattttcttttgatgcatcacattacatttcatagtaaaacatcacattacagcagttttg

SEQ ID NO: 34596 - DNA, 2226 bp, Zea mays
  Clone ID: UC-ZMFLMO17289E08_FLI
gagaaatctctcgcctcccgtcggagagtatcggtgaccgatgtgtcccgacggcggcggaagctgagggaggtcctggcggcgtcgtcagctcaggggtggcgctgtggcaacctgcgcgcgcgcggttttggctaccgagaggcgggtcgggcgtcggcgggatggcggcgtcgctgaggtggtggtggtcggcggtggtattgtcggtggtggtcggcgtgagcccggttgtcgccaacacggagggtgatgctctatacagcctacgacaaagcctgaaagataacaacaacgtgctgcagagttgggatccaactctggttaatccatgtacatggttccatgttacttgtaaccctgataacagtgtcatcagacttgatcttggaaatgcacaactatcaggtccattggtgccacagcttgggcaattgaaaaatatgcaatatctggaactttacagtaacaacataagtgggccaataccacctgaactggggaacttgactaacctggtcagtttggacctgtacctcaacaacttcactggcggtattcctgacaccttgggccaactatcaaagttgcggtttctccgtcttaataacaacagtctttctggtcaaattccgaaaaccttgaccaatatcaacactctccaagttctggatctatcaaacaacaatctctcgggaggggtgccatcaagcggttcgttttctctgtttacacctataagttttgctaacaacccaaatctttgcggccctggtactacaaagccttgtcctggggctcctccattttctccaccccctccatacaatcccccagcaccaacttcatcaaaaggcgtgtccagcactggagcagtagctggaggtgttgcagctggcacagcgttgctgatcgcagtgcctgctattgggtacgcattgtggcggaggcgaaaacccgaagagcaattcttcgatgtccctgccgaggaggatcccgaagttcaccttggacagctcaagaggttctcgctgagagagctgcaagtcgccacggacaattttaacaacaggaatgtcctgggaagaggcggttttggaaaggtgtacaaagggagactaacggacggttcactggtagccgtgaagagattgaaggaggaacgcacccccggcggagagctccagttccaaacggaggttgaactgattagcatggcggtgcacaggaaccttctccggctccgtggattctgcatgacccctacagagcggctgctagtgtatccatacatggctaacgggagcgtcgcatcgcgccttcgagaacgcgcgccaaatgagccccccctcgaatgggaaacgagggctcggatcgcgctggggtcagccagaggcctgtcctacctgcacgaccactgcgatcccaagatcatccaccgcgacgtgaaggccgccaacatcctgctggacgaggacttcgaagccgtcgtgggtgacttcggcctggccaagctcatggactacaaggacacccacgtgacgaccgccgtccgtgggacgatcggccacatcgcccccgagtacctctccacggggaagtcctccgagaagacggacgtcttcggctacgggatcatgctcctggaactcatcaccgggcagagggcgttcgacctcgctcgtctcgcgaacgatgacgacgtcatgctccttgactgggtgaaggcgctgctgaaggagaagaagctggagcagctggtggacccggacctgcagggccggtacgtggaccaggaggtggagtcgctgatccaggtggcgctgctgtgcacgcagggctccccgatggagcggcccaagatgtcggaggtggcgcggatgctggagggcgacgggctggcggagcggtgggagcagtggcagaaggtggaggtgatgcggcaggaggcggagctcgccccgcgccacaacgactggatcgtcgactccacctacaacctcagggccgtcgaactgtccggcccgaggtagggaggtagatgatcgccgtcgggatccttgtcgtctgtgaatatgacagcggataggtagcttggtggttggtcctgtctttattgatagctgcgaaactgtagatgaaattgtgtgcccgtcttctgtaacctgagtacctgacatctctgacatttttttttctgatattagagagccgtatgacaccagc

SEQ ID NO: 34597 - DNA, 1124 bp, Zea mays
  Clone ID: UC-ZMFLMO17289F04_FLI
agcctcatttgttggaaggtgatgccgatgatgttgatacatccaccataggggcaaatcatgaccagccaggagaaaattctgaaaagagcatatcaaacttagtagtgagcactgaacagaaacaagatggttcacattccaatgcagctaaggatactgaattggatgaagcttccaatgaaacacaaccagaaacaggttctccattaagaaaaagtataacaagcacatatgcagatgctgatcaacatggattggaacctagattttgctcagtccagggtacgaatgaagaaccttctggtggagtgaccctgacagagatgcatgcaaacaattccaggtcaactgaggtcagcacaatcacagaatcattagttaacagggaaaaagaaaaacaagggctgtatgacagaatgaatgagtttgatcctatcaagcagcaccggacgttctgcccttggacttcccctgattacggcgaacccttgcctggatggaggcttactctctcggcattacttgctggggacaagagatctgatggggacttgcaagtggatgttcagaccagccttctcgatgaggatgatgaccctcttacctctgttaggaagcttttcatgacaccacctccgaaaaggcggaggatacagcaatctgaaaagagctgagaagtgaactgtatccacatgttgggaaagctggggtcaaacccatacggttagacaatatcatggggcagatccagaatgccatatgaattgaatattggaactggaaatgtttacgctgcacatctgtgcgatgtacaaattcttgaggcagcagctgggaaaaggattgatgacatggttaactgttccaggatgatactgctgttgtagtcttgtagaagccattgttgtggtggttaaggaatgtagaagttgggttacctcttccccgtttgaaaccacctgagcatatacaccatgatttcgtagcttagtaatgttgtcaacttgttatattgcattctttatattgctgtacgagcacctgttaactgttaaaccctcggggaattttgattggcaagagcgaattcgtttgacgcctttgctggctgacttacctgt

SEQ ID NO: 34598 - DNA, 1016 bp, Zea mays
  Clone ID: UC-ZMFLMO17289F06_FLI
cgcctgggcgcgtcgctgcactggtcctacgacgccgcggcggcgtccctgtccgtggcgttcctggcggccccgccttccgcgggcggctgggtcgcctggggcctcaaccccagggcgcagagcatggacggcacgcaggcgctggtcgccgtccccagctccggcggcggcggcgcgtacgaggtgcagacctacagcatctccgggacctcgctcggcgccccgggcccgctctccgcctaccggacgtcgggcctcgccgccgaggtcggcggcgacggccgcgtccgcgtgttcgcgaccctcgtgctccccaacggcacgggcgccgaggtcaaccacgtctggcaggtcgggccctactccggcgggatccagatacacgacaccaagggcgacaacatgaacgccaaggggacgctcaaccttctaaccggcgccactgccgccgccagcggagggggcagcatcatcaggaagaaaaatactcatgggatcctgaatgcggtgagctgggggcttctgctgcccatgggagccatcttcgcgagatacctcaagacgttcaggtcggctgacccggcgtggttctacctgcacgtcgcttgccagctgctcgggtacggcgtcggggtgtccggctgggcgaccggcatccatctcggaaacctgtccaaggggatcacctactcgctccacaggaacatcgggatcacagtcttcgctctcggcactctgcagatcttcgcgctcttcctgaggccgaagaaggaccacaagtaccgggtgtactggaacgcctaccaccactcggtcggctacaccgtcatcgtgctgggcgtcgtcaacatcttcaagggcatggccatcctcgacgtggagcagaggtggaagacgggctacatcgccgccatctccgtcctcggcgccgtcgccgtggccctggaggccgtcacgtggggcgtcgttctgaggcggaggaaggaggaaagcaagagctacaacggcacctc

SEQ ID NO: 34599 - DNA, 1272 bp, Zea mays
  Clone ID: UC-ZMFLMO17290C06_FLI
gtttgatttcatgagaagcttccgagtagaattcgatgagtattttgaggatgggatcatctcagaaattgagattggactaggggcttgtggagagctgcgatatccatcttatccagcaaaacatggctggaaataccctggcattggagaatttcagtgctatgacaggtacttacagaaaagtttgagaaaggctgcagaagcacgagggcataccatatgggcaagaggacctgacaatgctggccattataattctgaaccaaatctcactggatttttttgtgatggaggagattatgatagctactatggccgttttttcctcagctggtactcccaggcattggtggatcacgcggaccgtgtactgatgttagcaaggctggcttttgagggtacaaacattgctgttaaggtctccggggtgcactggtggtataaaactgccagtcatgctgctgaattgactgccggattttacaacccgtgtaaccgtgatggctatgctccaattgctgcagtattaaagaaatacgatgctgctttgaactttacatgtgttgaattgcgcaccatggaccagcatgaggtataccctgaggcatttgcagatccagagggcctagtatggcaggtatggatccattgttacattgcatgttttgcatttcgtagcaacagcttactagctgatgttttgtattctctagtgagcaaacacatgttactgtttggtaggttttctctgaatgagtggttgacacttagtacaacaccatatgctttttatttaaatttggaatcgatttttcaggtgctaaatgctgcgtgggatgctggtatacaagtggctagtgagaacgctctaccttgctatgatagggatggattcaacaagattttggagaatgccaaacctctgaatgacccagacggacggcatttgttaggtttcacctacctaaggcttggcaaagatctgtttgagagacccaacttttttgaatttgagcgcttcatcaagagaatgcatggtgaggcggttcttgatctgcaagtataagattggtagcatattgcatacacgtatacaagtgactgattggctcaggccttatggcttacattttttcttcttttgctttgtgtttttaggcggtaatatcagctgatttttgagctgttaaatagagaactcgctgctcaatttttaactctagtcttcaagaaggaagacgagttgagttccgtataatcggtgaattc

SEQ ID NO: 34600 - DNA, 1289 bp, Zea mays
  Clone ID: UC-ZMFLMO17290D03_FLI
cgaatttctatttaatgttcctgttcttcccctccgatccgatgtccccaactgcgctcccgtcggcgatcaaacaccggatcgcggcactcgccgccgttgaggaggaggtttccggcgctgcttccagcgccttgccgtcagcaccatgaggaagaagctggacacgcgtttccccgctcctcggattaaaaagatcatgcaaacagatgaagacgtcggcaagattgctcaagctgtacctgttctagtgtccaaagcattggagctatttctgcaagatttatgtgataggacatatgatattacaattcggaagggggtcaagactgtgggttcttcccatttgaaacaatgcatacaaacgtacaacgtctatgacttcttgagggaagtagtcagcaaagttccagacattggtccttctgatgttattgctgatgataagcttggcaaaaggaggaaagccgaagaagatggaagtgaggaagaattgaagaggacaagaaatgagacagaaagctatacaagcaatggcagaggccgtgggagaggtcgtgggagaggtcgccgtggtgtacgtggagcttggcgggaggtggtcacaagtcctgagcaattcaaggaggagaatcaatctagcaaggtagccagcctaaaggtggaggtagcagatgaggtctcgaatgtaactgaagcaaaacaggacactacaccaatgagcaacgccaggccttccttaaggaacattgacttgaatttagatccaaccgatgaagaggatgaggttacagtgccaccccaaccccagctgtcagctccagcaactagttgcgatgcagccactgcagcacctggaccatctgttccacggttaagggaaggagcaaaactcaaggacttctttggtgcttgggaactggctgacatgaacaagatggagatggaccctgtccagtttgctctgtcaacaaaccatagattggaggaggacgaggattatgacaatgaagactagctccgccgttatatagcttcagagttgatgagtaggaatagcaggacaactgtaggttcagcttaactctgtagcagttctcatgtatcatatagccgccaaagctgccgatgtagcttataatgtcccagaggttaaggtcgtttgactagttgactgtaatgttctcaagttaggttctattagcagctattgctttcgcagatagtaccgtttgtacattccagttgctctccagttttatgttatctatccttctgctttcttggat

SEQ ID NO: 34601 - DNA, 488 bp, Zea mays
  Clone ID: UC-ZMFLMO17290D08_FLI
actgcggcctgctgctttcacctccctctccctctcgggctctctcctaacatctcgagctcgatcgcaagccctcaccccctcagacactccttccccaccaccgacatacgtacatgaagcacccgagagacgccggcgccgtgccgctctccctcgcgctgtccctgggcggcggcggtggcgtggccaccaagcacggcatcagcaagaagccccggcgcgcggcgggcggcgagttcgtctgcaagacgtgcagccgcgccttcgggtcgttccaggcgctgggcgggcaccgcaccagccacctgcgggcccgccacggcctcgcgctcggcgtgcccgccgccgcgccggcgaaggaggataccgcgacgaagccggcagcggcggaacccgcgcccgcgagccacctgtgccacgtctgcggcctcggcttcgacatgggccaggcgctcggcggacacatgcgccgccaccgcgaggaa

SEQ ID NO: 34602 - DNA, 2147 bp, Zea mays
  Clone ID: UC-ZMFLMO17290F04_FLI
tggagatctccaacgccgactcggcgacagatgacgaccggagccgggacctggaccgggcggcgctgatgcggcagctggacgagacgcagcagagctggctcctggccgggcccggcgaccaggcgggcaagaagaagaagaggtacgtcgacctgggctgcgtcgtcgtcgaccgcaagatcttcatgtggaccgtcggcaccatcctcggcctcggcgtcttcatcggcttcatcatgatgatcgtcaagctcgtcccgcacaagcgcccgccgccgccgccgcccgaccagtacacgcaggcgctgcacaaggcgctcatgttcttcaacgcgcagcgatccggtccgctgccgaagcacaacggcgtcagctggaggggcaattcctgcatgaaggatggcctctccgacagcaccgtccgccggagcttggtcggaggcttctacgatgcgggggacgccatcaagttcaactaccccatggcctggtccatgaccatgctcagctggagtgtgatcgagtacagggcgaagtatgaggccatcggtgagctcgaccatatcaaggagctgatcaagtggggaacagactacatcctcaaaaccttcaattcatctgctgacacgatagacaggattgtcgctcaggtgggtgtaggtgacacctctaaaggcagcagtcagcctaatgaccattactgctggatgagaccagaggacatcgactacaaaaggccagtcaccgagtgtcactcttgctcagatctagcgtctgaaatggctgctgccctggctgcagcttccatagtgttcaaggacagcaaaacctactccgacaagctcgtcaaaggcgcaaaagccctgtacaagttcggaaggctgcagcgcgggcgatacagccccaatgggtctgaccaggcaatcttctacaattccaccagctactgggatgagtttgtgtggggtggtgcgtggatgtactttgccacagggaacaattcatacctcacggtcgccacagccccaggaatggcgaagcatgctggagcctactggtttggaagtccaaactatggagtatttacctgggatgacaaacttccaggagctcaggttcttctcagcaggttgcgactcttcctaagtccagggtacccttacgaagaaatactgaggacattccacaaccaaaccgacaatgttatgtgctcatatctgcctctattcaattcattcaacttcactaaaggaggactaatacaactcaaccatggaaggcctcagccacttcagtatgctgtcaacgcagctttccttgcttctctatacagcgactatcttgaagctgcagacacgcctgggtggtactgcggacctaacttctacaccacagaagtcctccgcaagtttgccaggtcacagctcgactacatccttggcaagaacccattgaagatgagctacgttgtgggtttcggaaacaagtacccgaagcgccctcatcacagaggcgcgtcgatacctcacaacggcgtcaagtatgggtgcaaaggaggttacaagtggagggacacaaagaaggcaaaccctaacatccttgtcggagcaatggtggctggccccgacaggcgcgatggctacaaagatgtccgcacgaactacaactacacggagcctactctcgcagcgaatgctggtctggttgcagcgctgatctctatatccgatatcaaaaccggacggttcggcatcgataagaacaccatcttctctgcgattcctccgatgttcccaacacccccgccgccgccatcagcatggaaaccatagaggcaatacctctgaatgtttttccaaagcatcgaacagggaagtggagcaaacgtgtgatcatttggtacagcgaaggccagagacaggaaagctgacagcataagtttatagagcttctatttctgtaccaatatgacagatcagtataagatcctctgtcagacatagatcggaagctgtgtgcatcgcgtggagctaatttttgggggtcttgttgctattggcactccagctcatgtgtgaagttctttttgtagaaatggtacctttacaaattgttttataggagtgacttttcattattatagt

SEQ ID NO: 34603 - DNA, 2600 bp, Zea mays
  Clone ID: UC-ZMFLMO17290F07_FLI
aagaggatgaaagtaaaccaaaggatgttgcaaaacaaactgtgaacggtgatgttacaatagctgatgaaggttcacagaagagccaggatagttctagtaaaacaaaaccaggaaaatctgtccttattaagcaagaggaaagggaaactggggttgtcagtgcgagggtcctttcacgttacaaaaatgcactgggagggatatgggtggtgtccatactcttcttttgctatgcactgactgaagttcttcgcatttcaagtagcacatggttgagcatttggactgatgagggttctctgaaaattcatggctctggttattataatttgatctatggaattctttcctttgggcaggttctagtcacactctcaaattcatactggttgattatatcaagtcttcgggcagccaaaaggcttcatgatgccatgctccgatcaatattgagagctcccatggtattttttcatacaaacccacttggacggatcatcaacagattttcgaaggatatgggtgacattgaccgaaatgtcgctgtatttgtcaatatgtttatggcacaaatatctcagttgctctcaactttcgttctcatcggctttgtcagcaccatgtctctttgggctatcatgccactcctgattttgttttatgcagcttacctctattaccaggcaacatctcgcgaggtgaagcgtctggattccattaccaggtctcctgtgtatgctcagttttcagaggctttgaatggtctgtccacaatccgtgcctataaagcctatgatagaatggcaaacatcaatgggagatcaatggacaacaacattaggttcacacttgtgaacatgggtgcaaataggtggctagctattcgtctggagacattgggtggcatcatgatatggtttacagcaacatttgctgttatgcaaaatcaacgagcagagaatcagaaggcctttgcttctacaatgggtcttcttcttacttacactctcaatattaccaatttactcacagctgttcttcgtcttgctagtcttgctgaaaatagtttaaatgctgttgaacgggtcggaacatacattgagttaccttcagaagctcctcctgtcattgaggatcataggccaccccctggttggccatcatcaggtgtcatcaagtttgaagacgttgtgcttcgatatcgaccagaacttcctcctgttcttcatggcatatcttttgttattaatggaagtgagaaggtaggaatagttggcagaacaggtgctggcaaatctagcatgcttaatgctttgttccgtatcgtggagcttgaacgagggagaatattaattgatgattgtgacacttctaagtttggaatttgggacttgcgcaaagttctaggaataataccacaggcaccagttctattctcaggttctgttcggtttaatctggatccctttaatgagcacaatgatgcggacctctgggaggctctggaaagggctcatctaaaagatgttataaggaggaattctttaggattggatgctgaggtttctgaagctggtgaaaatttcagtgttggacaacgacagctgttgagcttagctcgtgcgctgctgagaagagcaaagatacttgtccttgatgaggcaacagcagcagttgacgtgcggactgatgctcttattcagaaaacaatccgagaagaattcaagagttgcacaatgctcataattgcccatcgtttgaacacggtcattgactgtgacaggttgcttattctaagttctgggcaggttctggaattcgactctcctgagaatcttctaagcaacgaggggagcgctttctccaagatggtgcaaagtacaggacctagcaacgcagaatacctcaagagtcttgtatttggaagtggagaagagaggtcccggagggaagaaatcaagctgcaagatatccaaaggagatgggttgcatctaaccgatgggctgaagctgcccagtttgcgcttgctagaagcctcacatcatcacatagtgacctccttgcattagaagctgccgagggaaataatattctgaggagaacaaaggatgctgtaatcactctgcaaagcgtactggaagggaagcacaatactgaaatcgatgaatctctaactcagtatcaggtcccagctgatcgatggtggtcttcactttacaaagtgatcgaaggcctcgccacaatgagcagattgggccgcaaccgtctgcagcaaccttcttataattttgagaacaacaattctattgactgggaccaaatgtagatgtagaattatggatcacaacggcattgtggagtaggctggaggtgtagttatttctggcggatttgattcctgcggtgtgtaaacgctgcagcaacacgtaacttgcgaataacgaacgagttttgccacagcaggacgatccttgtaccgtcgtccgcaagggttgtaatttctcacggaccgttacgacatgattgtatgtcaggttttgacagtttgtgccaatgcaattcttctaatgaaaaagacaagtgcatgtgagtggtt

SEQ ID NO: 34604 - DNA, 1104 bp, Zea mays
  Clone ID: UC-ZMFLMO17290G05_FLI
acacagactctttctctctcctcccctctctcgtcctttctctctcgtccgatctgcatctgcttttctccccccttgtctgtctccctcctgtccgtggcgtgcgcaaagatttgattttttttttctcggggaggagccggagtccgagcagcagtggcggctggagggaggagatcctgatctgttgtcgcagcggggaggggaggaccggaggaggaagatggctgcgcaggagcaggagcaggagaagcagcaggcgaagacgagcaccacgagctcgctgccctccagcagcgagcgctcctccagctccgctcgcaacaacctcacggaaggaggggcggagagcgacgaggagatacggcgggtgccggagatgggcggcgcgtcggcgtcggcctcgtcgggcgccggcgcggatgagcgtcccaagggggaggacggcaagcaggggcaggtggcggcgggggcgcagcctccggcgggcgggaagaagcgcgggcgcaccgcgggggacaaggagcagaaccggctgaagcggctgctgcggaaccgcgtgtccgcgcagcaggcgcgggagcggaagaaggcgtacctgacggagctggaggcgaaggccaagggcctggagctccgcaatgcggagctggagcagcgggtgtccacgctccagaacgagaacaacacgctccgccagattctgaagaacacgacggcgcacgcgagcaagaggtccggcggcggcgccggcggcaagggcggagacggcggcaagaagcaccacctcgccaagagctagtgagaaatgagagagggagctggttcgtgccctgctcgcgctcgcctgatctgaccattgctggcgtgttgctgttcctgacgacgccttctctttttcttctttttctcctactgttacccgtgtttcgtctctcgcctcgctgatgcacactgttttaactgttagccatcccgtctactcaccagtgaacactgctgctagttaatttctcggtggtttagggtgccgtgccagaacgccgtgtaacttcgttcttgtactatcttgtagttcagccttgcggtttggcaattcgattc

SEQ ID NO: 34605 - DNA, 920 bp, Zea mays
  Clone ID: UC-ZMFLMO17290H05_FLI
ccgccgccgacgacgactaccccgagcgcgccttcgcggcggtgcgcgccttcaacgaactccccgcccacgagcgcgcgccgcactacagccgcgccgtggacggcggggtcaactactcctccaacgtcgacctgtacaactcccccgcggccagctggcgcgacaccatccagatcctgctgggccccaaccgccacccggacctcgccgaccggatcccggccgcctgccgcgccgaggtgctcgagtgggaggtccgcgccaccgccgtcgcccgcgccttgctcaggctcctctcccaggggctcggcctccgccccgaggcgctggaggacgcgtcctgcgccgacgggaagctcatggtgtgccactactacccgcactgccccgagccggagcggaccatgggcatcgtcccgcacacggaccccggcgtgctcaccgtgctcgcgcaggacggcgtcgggggcctgcaggtgaagcaccaggatgaggacggcaaaatctcatgggtggatgtgaagcccgtgcccggagcgctcgtcatcaacgtcggggacctcttgcagataatgtctaatgacgagtacacgagcgtcgagcatcgggtggtcatgaacacgcgtgaagaacccagggtttccatcggcatcttcttcagccctgggaagagaggggactcggtgttctatgggccgctgccagagctggtctcttcagagaacccgcccaagtacaggaacttcaccatgtccgagttttacgggaccttcttctcacgagaccttgccagcaaggctctactcgataacttcaagctgtcaccgtaaagtgtcgactccagctcgaagagtttagatagactcgtgtatactatagtcatgcgtgaattgtgattgccggctggcaatgtatag

SEQ ID NO: 34606 - DNA, 1030 bp, Zea mays
  Clone ID: UC-ZMFLMO17291D05_FLI
cgtctttcatcgacggccccactttacgggcgctgctccggccgtccaccaacgggcgccggaccaagatctcggacagcgggggcggcggcggcggcgggggcatcttcaagatgttcaagctcatgcccatgctctcgtccgggtgcaagatggtggcgctgctgggcaagcacaacaaccgggcgctgctggccgaccacgcgacgacggtgacgctgttcgggccgcgccggggccgcgtgagcctggccatccacgaggacacgcgcgcgccgccgctgttcctcatcgagctgcccatgctgacgagcgcgctgcaccgggagatctcgtccggggcgctcaagctggcgctggagagcgacacccgcagcgcgcgccgccgcctcgtggaggagtacgtctgggccgtctactgcaacggccgcaaggccggatactccatccgcaggaaggaggcctccgacgacgagcgccacgtgctgcgcctcctgcgcggcgtgtccatgggcgccggcgtgctcccggccgcccccggccccgagaaggagggcggcgtgcccgcggggcccgacggggagctcacgtacgtgcgcgcccgcgtcgagcgcgtcgtcggatccaaggactcggaggccttctacatgatcaaccccgaggagggcgggaacggcgccgataataacgggggcggtggaggcgccggcggcgcgccggagctgagcattttcctagtaaggatgaaatgaataaaccgtcatattattactgctacagcataaatatatataaatataatagggtgctatattgttttttacacacacccttgtgccttgttgcacacagcagatgtgttctatgaaactgtccatagatcgagtttgtaatctaactgatgtatatctccatgttagataattgattttgtgaatcgtgctgagatcaaatccggggtgcatattgttcttagcggagtagcaagaacattattatatatgaaagagagcggtacttcattcggttg

SEQ ID NO: 34607 - DNA, 1055 bp, Zea mays
  Clone ID: UC-ZMFLMO17291G03_FLI
gagcagactgcaatgaatcatatcctcaagaggataaaaaaactattacctcctgtgcagggcatcagcgacaggaaaagagagatgaatgaacgaacctaatccatccatcagcagcgtaaccaaatcaggcacaggtttgagtattaaaccagtggaagtgatgagctgggagcaggcctaacccttttccaccaactctacaagagctcccgcgatccagtcaagtgccctataaaatccagccccgcttggcttcacccacccttgggctcgcaatcgcagcaacgatggggagatcgccgtgctgcgagaaggcgcacacgaacaagggcgcgtggaccaaggaggaggacgaccgtctggtggcgtacatcaaggcgcacggcgaggggtgctggcgctcccttcccaaggccgccggacttgtgcgctgcggcaagagctgccgcctccggtggatcaactacctgcggcccgacctcaagcgcggcaacttcacggaggaggaggacgagctcatcatcaagctccacagcctactcggcaacaagtaggcagcccgaccgacctcaagcactaaggcacccactaaggcactaactgtgttgtctgtgtatgatctgtttgttgggtcacagatggtccctgatcgctggaaggctgccgggcaggaccgacaacgagatcaagaactactggaacacgcacatccggcggaagctgctgagcagggggatcgacccggtgacacaccgccccatcaacgagcacacgtccaacataaccatatcgttcgaggactggggccaggggaaggcgctcaagtgccccgacctgaacctggacctctgcatcagcccgccgtgccaggaggaggaggaggccatgctgctgaggccggtgaagcgggaggaggccgggctctgcttcagctgcagcctggggctccccaagagcgcggactgcaagtgcagcaacttcctcgggctcaggaccgccatgctcgacttcagaagactcgagatgaaatgagagcttccatccatctctgc

SEQ ID NO: 34608 - DNA, 3571 bp, Zea mays
  Clone ID: UC-ZMFLMO17292A08_FLI
aaaaagagctgcacactggtcactggaaaacgaaggcaaaccctagtcgctactccaccgcagcgcccattacaccgatcgggctccgatggacttcgcggagctggaggccgtggagggcctccggtggccgtggcactcgtggccgccgactacccccgccgccgcgtccctcgtcgtgcccacctccgtcctctgctcgccgctgcagcaccccacggcgccggacctcctcccgctgctaccctacgcgccgctccgctgcgcctccccgggttgcggcgccgcgctcaacccgttctcgcgcgtgcaccacggctccgcgcgctggtcctgcgccttctgtggcgccgccgccaacccgttcccccgcctactggcccccgacgcgctccccgccgaactcttccccacccactccagcgtcgagtacttgctgcccccggaccccgctgagcccgggggaccggggccacctgcgctcgtgttcgtgatcgatgcggccacggcggccgaggagctcgccgtgctcaaggacgaggtgcgcaggctcatgcaggggctgcccgaggggatcagggtggggctcgtcactttcgctgcgtcggtgtgggtgcacgatcttggatttgagggttgcgctcgggtggttgtgcttaatggcgagcgtgagctcgagtctgacaaggtttgtgaatttgtaatatgatccttaggacaccgaatttgtaatttggttctgcgccaatctatgtgtcatgatcagcattctagtttcatgagtatccacaatctgttcctgccgcagtcagccttgaaatttgaatgtaagtatcttgttataatgctagttcaggggcatgtattaaatttttgccattattagcatgactcatctaatccctctcacgctcacctgcttgtgcttcacacttgcaactagcccagtaccagtggcaactggtcaaatacagcaagtactatgtttccaatgaataaatgcaggggcaatgccgcaatgccatctttgaacttatgttacataacttttgtcttctgatagtattgcttatgttgagggccgttacatctactgaaatagtcaaatgtacattgtacatagcaacttgaaataattatgcttgtaaaattcttcgtggcctggacactttatcaatgcaatgtactcctctttttataagagctgtaggttcttcatgttctaaggtggtggttgttgttggatgtataacctgaatatctctgcactgtaggatagcactctcacaaatgcctatgtccatatataatgttagagaaaatgtggaaacttgaaactgcatagccagagaaaattttccctttgtctaaaactttgggtttggtttacagttcctgttgctatgatcctgttgtccaaacttgcgatataaaactgtctcactcatgttttgaatttcttgaggtttggtgatatgcttttgcaattcctggtattttgaaaattattgtggctactgtatatcacataaaccttcgtttatatttcagatacagaaacttttaggtattcaccgttcacagtacaagaacttggctatgccaaggtccactgaagtgcagcggtttttgctgcctgtttctgaatgtgaatttaacatcacatctgcaatagaggacctgagctccatgcctgcgtgtccacgtgggcatcgccctttaagagcaactggcgcagcgatttctactgctattgctcttctagagggttgctgctcacccagtaccggtggtcggattatgatctttacatctggtcctgcaacagttggtccagggtgtgtggtggaaactgatcttgggaaaacaattcgttctcatcgtgacatattcaatagcaacgcaccgctgactgacaaagcacgtgatttctataagaaagttgcaaagaggttgacagaccatgcattagttcttgatctattcgcctgctctcttgatcaggttggggctgcagagctgaggaatccaattgaagtgacagggggtttaatgatgcatacagagtcatttgagtatgagcagttcaaaatctgttttaggcatatgttccgtcgtgaaggcaccaattaccttaatatgaactttaatgcgacgattgaaatagtgacatcaaaggaggtgaagatttgtggtgcccttggtccctgcatttccctccgcaggaaaaataactcagttagtgataaggaaattggtgaaggtgggacaaattattggaaaactagttcactgagcagcaaaaccagcattgctttccttttccgagttgattgcaatcataaagctgatcccccgactgtcttctttattcagtttatgacaaggtaccgacatggtgatggtagttatcgcctgagggtgacgactgttgcaagaaggtgggctgctcctcgatctcctgaaattgctgcagggtttgatcaggaagctgctgcagctgtaatggccaggcttgctgtttacagggcagagacataccatgttagagatgttatacgatggcttgacaagatgcttattcgctttactgctaagttcggaaactatgttcctgaagatccatctacatttcggctgtcaacaaacttctccttgtatccgcagttcatgtactacttgcggagatcacagttcattgatgttttcaacagctctcccgatgaaactgctttcttcaggttgatgctgaatagggagggagttgtggggtctctaatcatgatccagcctactctattccagtactcatttgatgggccacctattcctgtactgttagatgtcagctccatctctcctgatgtcattttactatttgattcatacttctatattgtgattcattatggctcaaagattgctcaatggaggaagcttggctatcataaggacccaaaccatgaaaatttacggaagctccttgaagcaccagaagtagatgcagaggcactattggtagaccgtttccctgtgccaaaactcataaagtgtgatcatcatggtagtcaggccaggttcctgctcgctcgattgaatccatctgtgacacagaaaacacagttttcaaagggatctgaagtcattttcaccgacgatgttagtttgcaagtgtttattgaacacttgcaggagttggctgttcagggctagaaagtcatgaagcttgaccttgtctgctattccactttggtccattagatactgaagatatggctttgagagggactagacttcatattcacagatgaagcttgcaagtttttattgaacacttgcagtaattggtgtgcaggattaacgtgttcatgtggaattatttaaatgcaattttctgctcacttgcaaatactggggagctctactgccaggagtgagatctccctgagttgtacattgctcaagctccagtttgatgtaagacaattacattttacccgttttgtatagcatgtggtattatccactgggaacgtttgatttcttcagaaatgacttttgtcattccacc

SEQ ID NO: 34609 - DNA, 2062 bp, Zea mays
  Clone ID: UC-ZMFLMO17292A10_FLI
gctgcttctgctcctgctacttgccccctcttatcagagagagtggtgtggtggcgcctccccaccatcaccaccagccagcaccacccctcctgcccctctgcgctggcgggccgagcgccgcgagcgagctgggccgcgggcggaggaggagtcgaggctgaccgaccccgcggccggcggcgacgagcggacgcagattcggcagccgtgcgcggaatgcccgtggaaggaggggagggagggcgcaggcgcagctgagctgagcccgcgaggttcgcggtctgcggtgcggcggcggaggtctcgccagcgcgatggccagcggcggctcctccaggtacagctcgtacaaggcgccggggctgcgcggcgcgctgctggaggcggcgcacgtgtcgtgcctcgaggaccggtacgcgctgggcccgcagctggggtggggccagttcggcgtgatccggtcctgctccgacctggtcaccggcgaggcgctggcctgcaagtccatcgccaagggccggctcgtgtcccccgacgacgtgcgcggggtcaggctggagatcgacgtcatggcgcgcctggcgggccaccccaacgtcgtggggctcaaggccgtgtacgaggaccgcgactcggtgcacctcgtcatggagctctgcgccggcggcgagctcttccaccgcctccacgagcgcggctgcttccccgagcgcgaggccgccgcgctcttccgccacctcatggaggtcgtcgcgcactgccacgccaaggggatcgtgcaccgcgacctcaagcccgagaacatcctcctcgtcagcaggtcgccccagtcgccgatcaaactcgcggactttggactcgccacctacacccagcctggccgaagcttgagcggcatggtaggcagcccgttctacattgcgccggaggtgctctccggcgggtacaacgaggccgccgacgtctggagcgcgggggtcatactctacatcctcctcagcggcatcccgccgttttggggcaagaccaagtccaagatcttcgactgcatcaggtccatggagctgcggttcccttctgacccatgggacagggtttctgattccgccaaggagctcgtcaccgggatgctgcggcgcgaccctaggctgcggctcacggccaagcaggttctagagcatccgtggatgcaggaacacgcggacccacaagactcgtgcgggcagtgccacgagaccggcctccaacgggagggcgccggctcgtgctccttctccacgccgttggcgtcgcggagcagggacgtgagctttgacacgcgtggccccatcgcgtggaggggtgggggcgaggacgaggcgacctgctgctcgcccacgttcgccgccgtctgcaggtcgtcgttctcggcgttcatcaccgacccggccccgccgccctgctcggcctcctccgccttgggtggctctggcttctcgttcggtgagccctgcgaaccacttgacggaggaggaggaggagggttcccgatgcccatggcttccatgccgagcttctcgttcttctgcgcgcgggacagcagcgagccagctgagccacagccggtcgctgcctcctcgactccgaggacggcgaggggatccacgccacggggcgtcaacggcaggcggaaccacacgatcggcggcggcgggcgggagcacctggacgtggcggtggagtctgtcatccgctgggcgtcgtgcaccaacttctccacggcgccctcacttcgggcctccctcgtatgctagcactagcaacgtcgttccgcgcgccggcgccgccaacgccgggctgagggtgaggaggagaattccgacgagacgagcggtagagagtgtgcagtagcctcgaattgtataatatatatacagacacagtgctgttatagtggtgatgatagattagagagtgaaggtgaagttgctacggagggatggatgcatggagatggagagcgagtggcagagctggaactgatgtgttttattcttcgctgtcacgctgctggtcagat

SEQ ID NO: 34610 - DNA, 502 bp, Zea mays
  Clone ID: UC-ZMFLMO17292B07_FLI
tggagtcctctcgttcagaatatctcgccaaggagaaaaagcttaacattcgggagtcatcgacatcaagggcagagccatcttcatccgccgcaattagtggttcctcccgttcagttgctggagctgatagaggcaaagaggactactttgtgcttccagatactgcactaactcgcagcatgcagttgctcctcgcaatgggcttcagctacatccaggtcatggaggcctacagcatattcggcgaggacgtggactcgatggtctgctacctgttggagacaggaggcaccggagcctcagcaggcggtagcaatcaccggaaaggaaaggctgctgagtgatctgcacaccttcattgctgtggatgtaatcgttgatcgaaatcgttgggcatgaggaagcataccagataatgacagccttgtgagttgatatgtcgatacacctgctaccttttgggtgatgaataaatggaactcacacttgagacttctcg

SEQ ID NO: 34611 - DNA, 3134 bp, Zea mays
  Clone ID: UC-ZMFLMO17292B12_FLI
aaaagaaagaaaaggcgcatcgaaaaggcaaagagcgagctccctctacccgcgatccccgcacaccggccgccggcgttcgtcgccgccgcggatgagatgcgctccccctccggcggcggcagcgtggtggcccgcgcacgttcgtgaggggccctccgccacgcgcccaggttactgtggctccgagtccgagttcgctccccgcgcccgcgctatcgccgcggggcggagcggatcccccaacatgtggcttttctggcgcactaggaatcgcttctcccttgaggagctccggtatctaacagatcagctacaaaaggttcatgttgtcaatgaagctaataaggaatttgtgattgaagcattgcgatcaattgcggaacttatgatatacggtgaccagcatgatgctttgttttttgaatattttatggagaaacagatcatgggtgagtttgctcgtgttctaaggatctcaaagctgtcaagagtgtcactccaattgctacagacaatgagtatcatgatccaaaatctgagaaatgaacattcaatttattacatttttagcaatgagcacatcaacttcttggttacgtacccattcgattttcgaattgatgagatgttatcgtactacatatcttttctgcgggcgataagtgggaagttgaacaagaatacaatttctttgctcgtgaagacgaaaaatgatgaggtcacttcctttcctctttatgttgaggccttaaagtttgcttttcacgaggatagcatgattcgagttgctatacgtaccttgacactcaatgtctatcacgttggagatgaatctgttaacagatttgtttcccgcacgcctttatcagattatttttcagacatggttcagcattttcagaagcagtgcattgacttggataagttggttgcacgctcctcacgaaagggaaattcttctgtgccaatatcttctattgaagatgcaattgtgcaaattgaagacacactgtattatttcagtgatgttatgtcttctggtattcctgatcttgaaaggttcatcactgaaaatatcttgcgagttctggtatttcgattcttactcccgtcactgcagaggcagagcacagatttggacttaagtgtcactacatccatgtatctactttgttgtatactacacatttttaagaataaggatatggcaagtactgtagctgctgccctttttcatcaacctgatggccctgatgataggaagcaaaggacacctaatggatatacatctgagcatgatagttgcaaatctgagaatcattgcaccactgcctctggtatcgagcaatcaagtgaggagccaaattctttgtcttctgttagttggaaacacttgcccaacaattcatcgcgaagtgattgctgccaaggaaacacaccaagggaacacttgctgtcctatatcacagaaggagatgattcacaagctttgggttcattgtgcttattcgctacattattgcagacgaaagaacttgatgaatcaatgctggatgcccttggaatcctccctcaaagaaagcagcataagaaacttctattacaagctttagtaggtgaagaccttgctgaaacacaattattttcgtcaagcagcagtctaactgatgacagcatttgtagtgattttgatatttatgtaaggaagcttcaggataaatatgggctacaatgtcaccatccacggcaaatgacttccaaagctcacagatatcaggtgctcgatgctttagtcgaccttttctgcaggtcaaaggtttctgcagatgttcgtttggttggtggctggcttttccggcaactgctgccccatggagaggaagagttcactgcttttcatctaagacgactaaaggattcacacaaggattgtagctcaaagctttctgaggaatctggaggatgctggtgtgacatgcttcttcctattgttaaagaagcttggaggaactgcaagaaagcaattgaggcatcttcgccaccaaaaggatccaaatctattattgtacccatggatttgtgttcatttgaaggtgattcttctgttgccatcgcagaggcactctatgagatggttaagggttttgtgctgcagcatcaagttatactcttctgtcttggagaaactttcacagagctacctcctatttaccctctggttgatttgcctataaatactagggcaagcgctgcagattttggtggttcagttcctaaacctgggcttgaagtcaacttagtcgacgctgttccttgtcgaatagcatttgagaggggcaaagaacggcacttctgctttttagccatagctcatggaacttctggttggattcttcttctagaagaattacctctaaaacgggaacgaggaattgtccgtgtcatggcacctttggcaggatctgatccaagaatagatacaaagcatgggaagtggttacatctacgcattcgcccttcttcggtcccttttttggacactgagaagcataaagcgaagacaaagaagtatcttgttgatgggagatggacccttgcttttagggacgagcagtcctgtaaggttgcagagagtatggttattgaagagatgaaactccaacgaggtgctgttgcagagcaattgaagccattggttgaatttgacatgcctgaggatggaatgcagcacccccagacttcacatgaaaccccttctgatgatggatcatgactaaattttcatcaagtgcagtgttgagcttctcaattaaggagacatggcaacagatggccgcaaaagtgccgcattgaacatttcaagcatgctggcaggaaaacccaccatggcaagtcatcgacaattctgtacattacattgggagattagagatgtctccttgttaacacacaactgtagagtttcgggccgtcctgagttgaactagctggataggattctttgtacaatagtttgtttctctccttgcccgttgtaaccttatatatcacatcaaaacccattctttgttaagtttcagggcacagttgtgttgtgcacacgaaatgtttaaagaaatttgcagttagtc

SEQ ID NO: 34612 - DNA, 1803 bp, Zea mays
  Clone ID: UC-ZMFLMO17292C12_FLI
aaaattgttagaataatctatttagttgtgtgcacaggagtcatcttttgtgagtggttcattactgacaagtcctgttggtgagactctgtcaacatcaatgattcaggaaatatttcttcttgctaaggatgctaaggataagcacatacaagattatgctgcatgggctatttcatttctcagaagcaggtggtcgaagaatcagaatcagattctttatgaggacaatggttctaatagaagtcctgatgatcatgatcaagcttcaagtttttctgaacaaagcttgtttggaacttaagtctctggttgagtgatctaaaatttgaaaagtctggtgatgtggtgccaataagtacagttggaacagttttaaaatgcctttccaaagctccccgattgccaactacagactggggagctattgtacggaggtgcattaaagctgaggcgcagatttctcataagttaaccaatcaggaagatcctaagatactaaaggaggcatgcttatatttgactctagctcatgctgctcacataagtccccttctgcagtttttggatgatctgactgacatactcagattccagagattagatataaatgttcagtctattttgctcaaacatttgttacacctaatgaagctattctctgattcaagattggataaattgcatgaggattttaccgaatacttgtattcccccacttcttcatacttgaattactcatctgaacagaaaagcatgctaagaatgtcgttctgggaaggcatttatacgtgcctggtggatgtttctgaagaatctggtgttttttcattcattgaaaaatgcattcagtgcttgttgcctcttttgacgctccatagtgatggtcaacctgaattcatgaaagagtggtctgttgctatcttatgtcttacaaacgcccagaaaaaatggctggatgatattttgcagattcgcagtactgccttagtcaatgaaggacatgttgatgttgcaaaaaagattatcctcagagcaagattgtgtgcaactggttgtggttcaacacatgagctgggaaatataaagacagcaatattgtgtacaaaagctgatggtgtttggtggagtgtccttgttgagatcacttcagccttaaactcagccgaaaacatcatcaaaagacagtggcttctggatgcattagacattggctgtgttacagctcacccctcaacggtgctgtgttttgttggcttgctttgtggtagctgctgcatctatatgccgcttcttcttgttaattcgataaatgtactgagcgacttgccggtcaccctgcctgcctttctctccaccatcgtttctgatgatttcaggaactctgtggcagacaggctatggctgttgactactgacatctatacttgggctgaacaattagctcacggacacgatcaacctggacatgatcgtattcatagaagtgaaactgagattgcgacttttttggccaatattctgctctctacatgcattacagtcgaggactacctgtctgttgataagcggctaaagcttgcaaatcttgaagcactctaatcaaagggagatgtgtttcttttctattttatgtatgtatttatgtacggtatcagtcatgttttaatagttgatgtccctgctgatgatccagcaatgtttttttcatgtacataattaatttaactaactcatcttatgcactgaaaacaatctattgttcaaagatagatagacctatgaaataatattgttgtgcac

SEQ ID NO: 34613 - DNA, 1001 bp, Zea mays
  Clone ID: UC-ZMFLMO17292D01_FLI
gcgccggaggtgttccggaacaagggctacgacggcgccaaggctgacatctggtcgtgcggcgtcatcctctacgtcctcctcgcagggtcgctgccgttcccggacgacaacgttgccgccatgttccggaagatgagccgcggcgactaccggtgcccgccgtggctgtccacggaggcgcgcaggctcatccccaagctgctcgaccccgaccccgacacccgcatcaccatcgcccagctcgtcgagacgccgtggttcaacaagccgtccgtctcgaggtccgtcagagccgccgccggcggcgcaaccgagccgccggccgagcctgcctcctcggcaaaggacggcggcgacaaggacgagccaccggagacgatgaacgcgttccacctgatctccctctccgcggggttcgacctctcaccgctgttcgacgtggaaggcggtccggcgagggggccccgggagggcggcatgcggttcgcgacgcgggagccggcgagcggcgtcgtctcccgtctcgaggaggtggccgcccgcggcggcgggcggatgcgggtgaccaagagcggcgcccgcggcgttcggctcgagggcgcggagcgcgggggccgcaagggccggctagccgtggcggccgacatcttctgcgtggcgccgtcggtgctcgtcgtcgacgtgaagaaggacggcggcgactccctcgagtaccgctccttctgcagcgaggagctccggccggcgctcaaagacatcgtctgggcggccgacccccagcccgccgtcgtgtgacgcccgtgctgccgcctgcccgctcattgtttctggatcgcagtggtgccatagtttagtcagtgtcagttccatttccaaagtgattgcgtcactgttctcgattcgataatgatgtgagatctactgtttgtggggggcgtcaagaatatgtatctccctcggcataattgcgttattattattattattgtgaatggttt

SEQ ID NO: 34614 - DNA, 3076 bp, Zea mays
  Clone ID: UC-ZMFLMO17292D06_FLI
attgcactttggtaaggtttatggatttttcaatcattctaaaatgtaaacaatcattggacaaaactgtggaaaagttgcctcattagtttatggcttccttttaagctcctccgacaagtgtttgcaacaccaggggtccttataaccgctttcttgctccatttcatatctagaatcaaaatctgcagtttcttcatttcctttctggtttctgaaaacttctctggaaatgctttcaaagaaactgggaactctcagtttcatagtcatttttggtaaacttagcatcaatgttttaattgaatttttgtttttggagccaacaacttgtttgctctgtttcacgcacatgtatagtgtttgctctagaatgtattccatgacaactttttttttatggttttgagctgtgaatttgatcatttagctgtaattcattttatttgattacttaattatgaaattggttctagaataaaatattttcagtagttttatacagttcaatgcaatgatgtaaaattttacctagttaagggtatttaaacatcagacaagaaatttttcatggggaggggtgtggagtaactcttggcagttgtgttgtcctaaactaaggaaataacaatcatttctgtggcacagaaggtctacaactcttcacaatctctctttttaagcgatctttataccttttggggcttagatggaatacatttcaaatggaaaattatatagggttcaggcatatgtatgctcgctggtaatttagttaaatcttttggactttcattggaaagccattttactatgtgcatggttggtacaaccaattaatgacaaggcatctctgggaacacaaatatgcgtaaacaggtaattatggctgcacctgtatgtggcccaggttctctatttcctagtacttttttgtcgtcagcaagaaatttcttgagaagagcaaattgcttctaacgaaggtagtaaatggttgagctgttctctcattccacagatttgcatctaccataatggtcaactgggggtaaacaagcttgaaaaatgctgacagtggcacaaattagcatagatcactttgtatttttcaaaaagcagcttgtctgtagacagggattttctactgtatgtaggcttaattgggtaggcttgctggtgagtatagtatttatagttccttcagattagctatgaaagctatcactgctaccaaattttggttgtggagcaatcagcaaccttacacaatactaattgcatctctcaactcctagagtcgaagatccatcgattttgtgcataaggggtatacatcactcacttggtatttatcacctttctgttaacttcgttatcattctgtttgtttggaaaacgaaggctgaacaaatttcaccgatggagggcaacttggtatagtatttagttctatcgtacaccctttcctttagtataaaattccctggtaaggggatatccaatttatttcccaacgtatgccaatcggccagacagcgcttttcctccaactgtgttgatctgtgctggatttcactcctcgtgtggaagctctacatgtgcaaggttagcacggctgttttaggctttatgcctgtctgtcgtgcagcataaaatatgctaaaaattaaaagaacaaacacaattacaactaaaaatataacatattcttaacttcaggggaactttcttattgaatattgtttcattactaaatttgatctttccaggttcgtcttgtaactgagaaagatacaagtaaacctagaggatatgcattcattgagtatgtgcacacacgagacatgaaaaatgcctacaagcaagcagatgggagaaaagtggacaacaggagggtattagttgatgttgagcgaggcagaactgttccaaattggcgtcctaggagattgggtggtgggttgggatcaagcaggatgggtggtactgatactgacaaaaaggattccactagggagcaacaacaaggtggacgccctagatcagaagagcctcggagggatgatcgtcgtgccgatagggatcgtgaaaaatctcgtgaaagggtacgggaaagagaccgtgaggagaggacccgtgaacgttcgcatgaccggactcgtgatagagatctacgagatgagaagcatcaccatagagaccgtgagaggactcgggatagggagagaggaaaggaccgtgaaagagaccacggccgtgaccgggagcgtgatcgtcgtgacagggacaaggatcgtggtcgggactatgatagagaaagggaccgtggtcgctctcatgatcgccatcgtgagagaggcagggaccgtggtgaaagagattatgagcgcaccagccatgaacgtgaccgtggtcacatgcatgagagggatgcagactatggcaatggtgggacaaagcatgacaaaaatctgtctagttatgggcaggattatggctatggtcagtatgagcaacacaaaggtcatgatgcatatggttacagtcaagatgtacgtggacatgaaactgaacactcaaagcggcatgagcacgaatattatcgtgttgactcgtatggtaaaatggaagctaactatcagatgccgccaaacaatgctgagccagaaggccctgaggaaggtgaggcatatgaggaaggcgactaccagtatcaccggtctggtgaacacatgaaggaagcttgattgcagcgatgagatttgcctgcagctttatactgatacacaacgatggtttcaatgttggttctttgtatgaattagtttcagctgcatagtgcctgtcagttgtgttcttccatgttggggaattctcaaaaggaagcaaaatcttgcccaactgcgtggatttttgaatttgaagcctatggctgccaatatcttgtggaataagatatttgtgtaatctggttgtggagatccatatgatctgccgttatccatctactcttctgttaagaagttttgtatgacagttccttcaaattatttgttccaacattttgcagaacttc

SEQ ID NO: 34615 - DNA, 1364 bp, Zea mays
  Clone ID: UC-ZMFLMO17292D07_FLI
aaaagtcagacagggataagtcacatggttcagtggggccaattgttataatacaaggatcatctactgtgaagggtcttgagggtgctgagttgctggacactcttgttacttatttatggcgtatccatggtgtggattattatggtatgtctgagacaaatgaacctaaaggcctaaggcatgtgaaagctgatgcaaggacatataatggggctagctcaaatggtgctgaatgggagaataaacttgattcattctggcaagacagaattcaaggtcaggatccattagaaatgttgaaaggaaaggagaagattgatggagctgctactgaagtcttggatccatatgtgaggaaaataagggatgagaaatatgggtggaaatatggatgtggagccaagggctgcacgaaacttttccatgccgctgagtttgtccagaagcatcttaaactgaagcatgcagacttggtggttgatctaacttcaaaagtgagagaggatatttactttgagaactatatgaatgacccaaaggcgcctggtggtacacctatcatgcagcaacctgctccaaggggaaaaggcagacaaaggccaccaatagagagtcggctgagggatgagcgtgggaatcataggttcgacaggaatgttgattcaccaaaacgtgatgggtctggtgaaaatcccgatgatcctatttatgattcgtttggtgatccagctatgcatggtgccttccctccagatatccctgctcccccggttctaatgcctgtgcctggtgctggtccgctcggaccgtttattcccgcaccacccgaagttgccatgcacatgttgagagatcagggtgcgccgccacctattgagccaaccggaggtccacatcctaggaaagcagggacgggtggtggtccttcaatgcgtggcccatccccaatctttggcgctccttcccctcatcatatgcatgatcctcgcagaatacgaagctaccaagacctcgatgctccggaggacgaagtgactgtcatggactaccgaagcttgtagacttcctccagttcttgtgcatccagatacctttgtagtcaacatttttagcgcgagagaaaaacaccttgctctttctagaatcgccgcggaggaaaccccggcaggctttttgtgtcgcgaccactgagatgtcagcttctcagtgttttgtaaaacgaaacacaggaagtacattacaacttctccccattaaacaaggtgaaagatttccatcagtgttttgtttttttggtcagcccagcattgatgtacatgtacgtaccttggcaaatagggcgggggttcgtttgtcgctgc

SEQ ID NO: 34616 - DNA, 1308 bp, Zea mays
  Clone ID: UC-ZMFLMO17292E04_FLI
tgaagatgcacaggatgatactttagaaaatcaagttcaagacgagaatgtagaggataatcacttactggaggatgggcatgatttgacgaggtatgatgtgaacaatgaggctggtgagcatgcacatgataaccacctggtgaaaaatgcggaaatacttctaaatcatattatggttgcatgtatatcagataattgccatatgaacaatgagaaaatgcttctaaagcaaaatgtggatgagcaacagatggagaacgagcagatgcttatagatcaggtcactagtgttcaagttttggatagtcaccatgtgcacgatgaacagttgctggtaggtcatgctgcagatgatcatcaccaaatggaaccaaatcccatggctttttctttgggcgttcatgatctggataactactatttgagtagcaagcaaatacttctgtataatgatgcaggaggtatacaccatttgaaggatgggcaaattattttagatgaggctgcagatggacaagctagagttcacaatatgggccatggacgaacgattcctggaattgatctggaagatgattatgcacaggtgtctgccatcagaaatacaggagaatgtctagaatctgcgtaagtttcttttagattcttttctatggtagtttcgagggggagaggaaaatccatgacacctggacatgtttgctgtactgtacagaagtgatacctcgcacgaatacacggataatgttctacaagaacatatgtgttctcaagactagcaaacctcaagttttggtgacaatcctaagactaacacacaagcagcttcttcttcaactgtcaccagattttcaaaactggtgtactggaaatgatgctgtgaaggcacaggtgattcccatttctcagtgatgatgtgttgtatattggattcaacaatatgccattagaacttgtgaatgtctgggacctgccatcctctgagcttgggaaatccttgtgagctctggcaccctgttgtctgtgcattcagatcctaacacaccggaccatgggaggtctgcaccggaccgatcgctggagctagttagtcgactggtcgttgttatgtacggagtatgttgtgcaatagtagtttcttttggattcctagtgctcactctcttttttttttccagagcttttcattgacaagtcggtttagtgacacttctgccttcccgagatatagctgcgatgtcagtatgtctcagtagctgaatatgtcatatatttttttaactagaaatgatttgatgggcgttt

SEQ ID NO: 34617 - DNA, 2039 bp, Zea mays
  Clone ID: UC-ZMFLMO17292E05_FLI
ggcctctctcctttctcgagagagcgaagtaaacgggacagcggctgcagccacccagtgtacgagcgctccgacttgtgtgctctcatgccgtgctgctacagagctgcctcataaaagctccctgagcctgctcctgtttgcagcttgcaaggcgccaaggacggacggaggcgacgactcgcaaggtagctctgctcgggcgaggcagcagcagcacgcagcagtactccgttcagaatcaggagagaagacgttgttctccgggcactcgagtcgaagtcctgacgagatggacggcaatgcgaggtcggcggcaacgaatcagaagaagcccgtcgtcgcggacgacgacctcgtggagctgctgtggcacaacgggagcgtcgtcgcgcagccccaggcgcaccagaggccggcgcccacctacgaccccgaccgcccgggcaccagcggcctcaccggcgaagagaccgccgcgtggttcccggacaccctcgacgacgcgctggagaaggacctgtacacgcagctctggtacagcaccatcgccgacgccgccccgcagcacgagggaacgctcccgggccctacctcgcagccttcgccttcgccgcccgttgggagcagcggcgtcgagtcgagctgggctggcgacatctgctcgaccttctgcggaagcaaccaggtgctcaggacgccggcaaggatcagggggaaggacgcggcattgcagtcggagttgccgagcaataccggcgcgcacgacggcacatcgtcatccggcgggtctggaagcaactatgggggatccgggctgcccagtgacagcgtccatgtacagaagagaaaggggaggtgtagagacgactcagatagtccgagtgaggatgccgagtgtgaggaggcaagtgaggaaacgaaaccatcaaggcgatatgggacgaaacgccggactcgtgcagctgaagttcacaatctctcagagaggagaagaagggaccggatcaatgaaaagatgcgcgcgttgcaagagctcatcccgcactgcaacaagactgacaaagcgtcgatattagacgagacgattgagtatctgaagtcactccaaatgcaagttcagatcatgtggatgacttctgggatggcgccaatgatgtttcctggtgttcaccaattcattccacagatggctctaggaatgaatccaggttgcatccctgcagcacagggcctaagtcagatgccaagattaccatacatgaaccacaccctgccaaaccatatccctctgaactcgtctccagctatgaatctaatgaatccactgaacgccgcgaaccaggtgcaaatcggtcacctcagggatgcaggtagccacgtccttcacctagatggcgggcgagcagcagtggtaccccaggtaccaggaccaggaccccatgtcgttcatggacatcaaatagcacaagccgaagaacacaataagatactggaagtggcagctagtactgttataccaacttctaaggcagggcaaccaccaactttccatggagtttagagtgatcaaaatcatgccttaagctgtatatctgtacagaagtgtcagaaccatattctttgacatgtaagcttagttctagagttattatcaggagtcttgtataggttacaagacaacagcctgtctaccgccgtattctatctacggaagaactcgagctgcatactgctgtgcagactgcagtacagcgttcaagagaattgaatgggatcaagaaagggtctttcttttctggcaatccctggaaatactgacgtgatgaggagcggatggcatctctgtagctgcgctgcagtgtatctacatcaatatggcaatgcttgtctggacacgaatgctacatctacatgtaaatgcagagttgcaggtagatagcaacccctctcccctgagatgccaactccgactcctgtcctactgtgtgtactgatctgtacagcaagcaatattcaatcagcagtcaattcctagg

SEQ ID NO: 34618 - DNA, 1632 bp, Zea mays
  Clone ID: UC-ZMFLMO17292G10_FLI
cgtttgcctcttctccctcttgccggtcccgaataaagagcagcagcgcaagaggtcggtagagcgagaagaaggcaatggcggccgagagcttcctgttcacctcggagtccgtgaacgaggggcaccccgacaagctgtgcgaccaggtgtcggacgccgtgcttgacgcatgcctcgcgcaggaccccgacagcaaggtggcctgcgagacctgcaccaagaccaacatggtgatggtgttcggcgagatcacgaccaaggcgaccgtggactacgagaagatcgtgcgcgatacctgccgcgagatcgggttcacctccgacgacgtgggcctcgacgccgaccgctgcaaggtgctggtgaacatcgagcagcagtcccccgacatcgcgcagggcgtgcacgggcacttcacgaagcggcccgaggagatcggcgcgggcgaccagggccacatgttcgggtacgccaccgacgagacccccgagctgatgccgctcagccacgtgctggccaccaagctgggcgcgcgcctcaccgaggtgcgcaagaacggcacctgcgcctggctgaggcccgacggcaagacccaggtgacggtggagtacgtgaacgagggcggcgccatggtgcccgtccgcgtgcacaccgtgctcatctccacccagcacgacgagaccgtcaccaacgacgagatcgccgccgacctcaaggagcacgtcatcaagcccgtgatccctgagaagtacctcgacgagaagaccatcttccacctcaacccgtccgggcgcttcgtcatcggcgggccccacggtgacgccggcctcaccggccgcaagatcatcatcgacacgtacggcggctggggagcccacggcggtggcgccttctccggcaaggaccccaccaaggtggaccgcagcggcgcctacgtggccaggcaggccgccaagagcatcgtggccagcggcctcgcccgccgctgcctcgtgcaggtgtcgtacgccatcggcgtgccggagcccctgtccgtgttcgtcgactcgtacggcaccggcacgatccccgacaaggagatcctcaagatcgtgaaggagaacttcgacttcaggcccgggatgatcagcatcaacctcgacctgaagaagggcggcaacaggttcatcaagaccgccgcttacggccatttcggccgtgacgacgccgacttcacctgggaggtggtgaagcccctcaagttcgacaaggcatcggcttaaggttgggagtgttcactgtggacatgaggactaccttcctctggctctgctgttacctgcaagcattgctgctgctggatgtttgtgtttgatcagtgactggctgctgctccatagaagatgaacggagagaaggatgatgaagggctttggcaatcgccgctgcaactgcaacccatgccatgccggcttagtgattgggtataatttggcttggcagcagccagcattattatgtgctgatctgttatcttttactagtttggtcgtccgatatctttctttctttctttttccccccttttcgactctgtactgaaactgctgagagattcgcagtattgttgtatcgtattcatatgctactgtt

SEQ ID NO: 34619 - DNA, 1457 bp, Zea mays
  Clone ID: UC-ZMFLMO17293D03_FLI
aggcggtcttacctccacaggtcgagtttttttattagtcacatagcattttctcgacagttttacagttttaacttcaataaatatttctaagtatgaatctttgaggctgtagattgaacactcttgattcattccttaccacttgataaaaactggcaatataacaattgcatatgtcgcacacttataggagcaagagcaatcttatttactatgttatatatttatcttccgtacttcacttgaaaatcatttttcaatcctaaaataatatttgttgcaacattgtgagtagttttgagctgataaaatacaagtatgtgatttggtttgcatctttgtatgatgtgctctgagttggctaattataattgtatgctttgggtgggggattcatctatatttaatacagggacatacttctgcattaggttgtcttaaaaatgcattacgtagagcatgtaccaaaatttttattagctataattgatgtttagtacatatagtataaaaggcaaggtttttgttacaaagaaaatactctctgtttgtgtgtgtgtttgcttaagtgttatggattattcattttttgtaaatttagtgatatttttatttgacctgctgcacacctagctaatagttcatttctctgttggcatagcaagaagtggtacacaggttgcatttggacaaggaaactcttattatgcaagaaattttcccatgcccaaaaaggattcttcagcaggtggagcttcgaagttaccaaaagaatatgcagaaccatgggactatagccatgattatcctgttactctcccactaaggaagccctactctggaaatcctgaaattctggatgaggaagaatttggagaatcttctgccagcaggacccaagatgatgaattatctgcagcagagcagcttggattaatggatatgtcgtcggaatcacagttcctcttcttccagttgccatcctctcttcctttaccgaggcagccacaatcaggtgctgaccctaacgaagtccgcgatgagaaacgtgaggacatgaggccatcatcgcacaatggctcgaaactcaaagaggttcctgaaggctatatggggaaaatgctcgtatataagagtggtaaagtgaagatgaagataggagacactctctttgatgttatttggctcgaattgcatgttttcccaggaggttgcagcaatcaacatcagagaaaaacattgctgtacggtgggagagatcagcaagcgtgctatcatcaccccagatattaactacatgttgggttctgttgacaagatggaagaatagtccattggtttctttcgcgcaaaccatatagaccatattatgccattacaagatagttttgctttcttatagagaacgacctgtgataccctctcagacttcttcaagaaaagatgcctcaaac

SEQ ID NO: 34620 - DNA, 1078 bp, Zea mays
  Clone ID: UC-ZMFLMO17293D05_FLI
cggtgggggtatgaacatctcccgccaccacgcccggatattctacgacttccagcgccgcaggttcgcgctcgatgtcattggcaagaacgggtgccttgtcgagggcgtcctgcaccttccagggaacccccctgtcaagcttgactcgcaggatctgctgcagattggggacaagaagttctacttcctactgccaacacggtccatcttcgcttcggctgctgctgctcggcatgctcctattattccacagcagcttcctcctccaccgtatgcacatgcacgggcaggccgccctcgtttgtccgagtttcatgaccgctccttcgaaggtgattatgggcgggaggttgatgagattgggaatggtatcagtgaaactgggatgaggggaaagctggtaaagaggaacaagaagtcttctggcgacttggatatctatggtgggcatagaatcaatgtggaaccaatagggacgctaggtgaagacagtagatcagaaataagatcaaggggtgacagggatattgacaaccaacaagcccttcaagcagaagagaaggatgttgtgtcatctgtggccacagtgttatctgatctctgtggccctggagaatggatgcccatggcaaaactccacaacgagcttcttgagcagttcggcaacgtgtggcaccccagcagggtccggaagtacctgacacaggacgactggtcgccgacggagaccaagggcaggccttggttcggccttctggcgcttctcaggaagtacccggagcactttgtcatcaacacgaggtccaagggcaggatgacctcggagttcgtctcgctggtctccttgctctcctagagggacggagatggcgtgttgtgtccagcccgtgtccagaagggtcggaggtgtactggctctcgtttgcttgccccttgctgtgtttcagcagctgttatatggacccaccctgttgtgctgtagtatctcgtgtggtcgatcgaggcagctgcactggtccgtgaccgtctctgtagtgtcggcagcagtgtatggaaagcatgcgttttaagtttt

SEQ ID NO: 34621 - DNA, 971 bp, Zea mays
  Clone ID: UC-ZMFLMO17293D11_FLI
cgggccgcgcccgcgccagtccgcattcgccgcaaacggacgcacgcgggacacctccccgctccccccccccccccccctcgtcgccacgtgtgtgctagggttccggcgtccggcgcgggcggtggcggccattccgatggaggcggatacggggtgtcggttggaggtggacgacgtcctctccttcgccgacgacctcgtcggagtgctccgccgcagcgacgacgccgacgccaacgcgcaggtgatcgcgggcgcggggttgctgcggaccgcctgccgctccgagtccgaccacctccacctgcagctgaaagattatcagcaaaaactatggtcctgcaaggacaagacagacaaagcaaaagctgaaacgattgctgctgatgaactgagtgtactgcaaaataaaatggaagaaaatcttcaggaagataaacagcttcgtgaagaattgagagctacacataatgaccttgaaaacctagaccatcaaagggcttctatacaagacaggaagaatgctatcaagaagaaggatgaaaacatgcggaaagccacatataaactttccatgtgcgtgtcagttacaaatatcataccaaatttggaagatcgggataagatctcaagctatactgtcgacaagaatgggaagaagatacagaagttcgagtttgagaagacgacgccaccagttgagatctgtaacacgctttggaaaacaatttagggcgtgcagatcgttgttactgtctgttaacgaagattgtcaattgtacttgtatatatagctgactagctgaggatggtggacctctcatcttcaattgtgcttgtttataactttatatagctgaggattgtcaattgtgcttgaatttagggcgtgcaaaccgtcattagtgtctgttgatttacagtgttttgatttcagtcagtataagatcggaagatttgcgctttgc

SEQ ID NO: 34622 - DNA, 2099 bp, Zea mays
  Clone ID: UC-ZMFLMO17293E09_FLI
gtctagctcccatccgacctcctgcattccccactagtcccaactcccaaccaccgccagccgtccgctctccgcaagcgcgaccttccggccagatccgccgcgtcgcgccgacgagcggtccttctgcctagtttctccgcccagcgagcggcgggttcctcggagattcccgctggccgcggggatccatttgtgactgctcgcgttgcgcctggatctggtttgggacggaggagtgaaacgcgacggtgatcgtgcgaggtgggacgccatcagtgctctgtctggggttcggtctcttcttcggctgcagatctggaagggtttcgtgggatccgtcgctacggtctatcccagtcagagcacctgcatcatctcggttcgggccatggagactctgctcatctcggaggagcgcaaccaccagctccaccacttctcgggtcgccggaagaaggcgttagcagcgtcgcctcagtccacgcgcagctaccatgcgggcaactgccgggcgttccactccggcatcaccgtcggcatcctgccgtccccgcccgcgcagagggttgcactgacccactcctctcctgagcccaagacaccgaaacatcagcttcaccatgggaaaaagcgcagccgagcaatctctataaacctttcgacgtcccctccctctcgccctgagctctgggctggcccggggttctgcaattcgccgcctcccagctccctcccgatccccaagttctcactccaccagaagcgcagtgtctcacttgaatttccacctgctgaccggtcagacgacgaagaggtgcccgtgcatgccaagtcggcaccttcatcgccgactgcaggctcaggtgttaccttcttcagtggtactgatgctaccattgccaccgagaatctgaggaggatccttaacctcaaaattgaggataactgaatggcggttgggtagttctgtgtacatagtttaactacaactgacctttgtagtatgtatagggtaaccggggataaccactgtgtacctggcggtggttccttctgcagcagtactgtaggcggttagcaagcacagcgaggagtttaggaagtttggaaatgcagtgagaaggatgttgtggtaatggagatttggtggatttgcatatcactgcagtttcagagtcacctttgttccttgtaccttgtagttgcctattagtagtccaatactccatttagatgttatagtatttgcatcttccctgcccatcattaaccagtagccacagccttcatatcataatccttgtcatgtagttcatctcaggcagggcattgtaggctagctagtactgttcaagttctgtcatatatgtagtcttctgtaggattgctgcatcccttgaaacttgcattctgtatcacattgcatcctgctgactcacctcccttcataacatctccctgtgttatgcaaagcgcacaaggatctcccctctggcacttctgttttttggaatgaagatgctcagaggagttgttatgaagtcccgatccaatgttctttgtcctccatgtctgtactgactttagctatgcatctcctttgtcaccccagtcccattgcatgtgccatccaatccgtttcgaaccattcatctcaaaaattgcatttagtggtggttttccttcgtcttattatcttttgtgcctcatgatcctggagcatgcccaggattctagtctcctccatgtattctcataaaggacttcatgtatcagagatctgcgaatgctcaaccctgaatatggtttgcttgtccgatgccacttcgcctcatccatacctggagttcagaattggcgaagcacctatcacttagctatctgtttcttagtcagtattgtgtcagactgttgtttttgtgcaatatttgattggctactagtctgtttgtgttactgttcaagtttatggtactgatcatatatggcggccggagtgttccacgtcgatgctgtggcattctgttgctttcaagtaaaactagtcaatgttatgtaccttcatgttattttttggtcctgtttctgtatgctcc

SEQ ID NO: 34623 - DNA, 3328 bp, Zea mays
  Clone ID: UC-ZMFLMO17293F04_FLI
cttagctgcttggcctgaggcctccgccggtagcagcaacagtcaatcacagtccccgcttcccggcggccaccgctgcatcctcccctttccacgctccactctcctagcgcgcccgccttaatgggccccgttcgactcgccctcctcctttccgtcgccgccgtcctcgccgccgcgggtgcggtgtacatcccctacaacacgtcggcgggggtggtgccggggaagctcaacgtgcacgtcgtgccgcacacccacgacgacgtcggatggctcaagaccgtagaccagtactacgtcggatccaacaactccatccagggggcatgcgtgcagaacgtgctggattcgctcatcccagcgcttctcaaggacgagaaccgaaagttcatctatgttgagcaggcattcttccaaagatggtggaggaaccagaatgacatgatcaaggatacagtgaaggggctcatcagctctggacggctggaattaataaatggtggcatgtgcatgcacgatgaggcggctgtacactatattgacatgatcgatcagactacacttggacacaagtacatcaaggaggagtttggccagatcccacggattggctggcagattgatccgtttgggcactctgcggttcaggcttaccttcttggtgcagaagtaggattcgatgctttctatttcttccggattgattaccaagaccgtgatacacggaaaggaacaaaagaactcgaggttgtatggaggggctccaagaccttgggctcatcggctgatatctttgctggcatctttccaaaaaactatgaaccacctcctggtgatttttattttgaagttgatgataattcccctgttgtccaggatgatccccttcttttcgattataatgttgaagaacgagtaaatgattttgttgctgcagctgtagcacaggcaaatatcacgaggacaaatcatatcatgtttacaatgggaacagacttcaaataccaatacgcagagagttggttcagaaatatggacaaactaattcactatgtgaacaaggatggccgtatcaatgctctttattccacaccttcgatttataccgatgcaaaatatgctgcaaatgagcagtggcctctcaagaccaatgatttcttcccatatgcagacaacccaaatgcctattggacgggttactttacaagcagacctgccttaaaacgatatgtccgcacgatgagtgggtattacctggcagctagacaactggagttctttaaagggagatatagctcaggtctctcaacggatagtctaggtgatgctctagctcttgcacagcaccatgatgctgttacaggaacagagaaacaacatgttgcaaatgattatgcaaagagattgtcaattggatatacacaagcccaggagctcgtttcaacttctcttgcttgcttgacagagtctggctcaaaatcacgttgtgcatccccagtgacaaaattttcacaatgtcttctgctaaatgttacgtattgccctccttctgagatggacttaacgaaaggaaaaagcttggttgttcttgtatacaactcgcttgggtggaaacaagaagacgtcattcgtataccggttttcagtgattcgattgtcgttcatgattctgaaggacgagaaattgaatcacaacttctgcctatagctacagcctcgttgaacataagagaaaagcatgtcaaggcttacctgggcacaacgccaggtgcaaagcccaagttttggcttgcttttcctgtgtctgttccacctcttggtttcaatacttatttcgtctcaaacttgaagaaatcagcacatatttcttcgaagtccactcagtactcacctcaaggaagtgaaagtagtaatctacaagttggtcaaggcaacttgaaacttcaatataatgaagctggaaaattatccctgtactccgatagtaagactatggttcaagcaaactttgagcagaaatacaagtattatattggacaggatggaaatggaagtgatcctcaggcttctggagcatacatattccgccctaatggcacagttccaatcagtactgatgggcaggtttctctcacagttctgcgtgggcccatattggatgaagtgcaccagcagataaattcatggatttatcagattaccagggtttacaaggagaaggactttttggaaactgaatttatagttgggcccataccagtagatgatggaaatggaaaagaagtagcaactgaaattgttacaaacatggtgacaaacaaaacattctacactgattccagtggacgtgatttcatcaaaaggataagagattatcgatcggagtggaagattgaagtgcaccagcctattgctggaaactattatcctgttaatcttggcatctatgtggaggatggcagcaaagagctgtctgtactggtagacaggtcaattggaggttccagtataaaggatggacaaatagagctaatgctacacaggaggctactccatgatgatgggaaaggagtcgccgaggcgctaaatgaaacagtctgtctcgataagcaatgtgaaggactcatcatacaaggaaaatactatgtcaaaatagaccaacaaggagaaggagctcgatggcgtaggacatttggccagaaaatatactcccctctccttcttgctttcacagagcaggatggaggcaactgggcgaattcacatgtttcaaaattctctgcgatggattcaacttacagcttgcctgataatgttgcaatgcttacccttcaggagcttgaagatggaagtgttctccttcggtttgctcatctatatgaggccggggaggacaaggatctttcgtctttagcgagtatcgacctcaagagagtgttcccggagaagaagattggcaaggtcatcgagacaagcttatcggcaaaccaagaacgcgcagccatggagaagaagcgtttgaaatggaaggcgcaaggttctgcggcggacgagaaggtggttcggggtggccctgtggatccttcgaagctcgtcgttgagctggggccaatggagatccgcacattcatcgtcagctttgatcacatcagtgacaagcaacagctctaatcgtctccgactagacgactaggtctggatgaagttgtcgtgcggcttcgaaataaaaaataataatgtggcctgctgtgtacctgtggttcaacccatgatatggcctgctgtgggtcagcacggttctaaagctaaggacattttataaggc

SEQ ID NO: 34624 - DNA, 1407 bp, Zea mays
  Clone ID: UC-ZMFLMO17293G07_FLI
catttctacagggaaagaggcaaatgtctatcatgcaacaaagacggatggccaggagcttgcaattaaagtctacaaaacctctgtccttgtttttaaggatagagaccgatatgtccaaggagattatcgttttagacatggttactgcaagcataatcctcggaaaatggttaagacctgggctgaaaaggaaatgagaaatcttctacgagtgagggcagctggaatccgatgccctgcaccattactcctaaggcttcatgtactggtgatggaattcatagggaaaggaggctgggctgctcctcgtctcaaggacgctgctttgtcagatgacaagttgcatgaaagttactttgagataattacaacaatgcggactctttaccaaacgtgcaaactggtccatggtgatttgagtgaatacaatattctatattttgagggtcacttgtatattattgatgtttcacaatccgtcgatcttgatcacccttcagctttggattttctgaaggaagattgcttgcatgtttctgagttctttaaaaaacgtggtgttcctgtcatgacagtaacggatttgtttaattttgttattgatcaaagcatttctgatgaagatgttgatgattacctggaaaaggctcagcaaaagattttggaaaatggtggtgcggttccaaatgatgatgaaattactcctacagtcatggtgcagacgttggactacgtgaagcaatgtgaggcagatattgtcaacatgtcaataatgcaacgttcatcctctggctatgagccaaccgcagataagctttatgaccaaccattgttagggtttgtgcggactaaaaacacaaacactgaaaaggagcaaggacaaccggcacgaaacttagttgaggttgaagaagacgagagcgaatcttgcttgagttctgatgaagatgattcgtggcacgaggatgatcctaaggtgggacccgaggaaaggaaggctgctcggaaggaaaacaagaagaaagtgaaggaagagaagagggaggcccgcaagaccaagatcccaaaagctgagaagaagaagaggaagaaaatggcgaaggcaaaatgcaagcggtagcgaatatctatgaacaatccagtagttaactccgtcagtagagatggataacttcgtcgtgaatcaaacaagatgatggataacttcattgtgaatcaaacaagatagcctttatgagggagtgcaggttggaagtttggttcacagcgctactttacacatcacaagattattcacgatgttttcaacctttttgttcgtttcaattttgtagagaactactgtacgtaatgtgaccacatatatgtttatcttgagtggaaccgtatagtatttttttagag

SEQ ID NO: 34625 - DNA, 1306 bp, Zea mays
  Clone ID: UC-ZMFLMO17293G10_FLI
ctcctcctccttccgaagggcgagttcgcatcgcagcgtcgcccgcagcagcagcggaccgcggaccacgccacctcatccagcggcagtgagcgagggagcgattcgatcagaatcgacatggacggcggcgagcacgaagcggaggagtcctcctctaagcgccgggagcgcctgctcgccctccgctccgccgcaaacgtgtcgccggcgggggctcctccgccgacggccgcggggagcctcctcccggatcctgacctcccgggcgacgaggccgcatccgtgtgcccgcccccgcccccgccccagcgtttctactactacaccaaccccgccgccgccttcacatcctcctcaggaggcgccacaaatcccacctggtcccacaagcgcaagagccctcccgcctgctacgccccgcctccgccggcttacgggaactacggcagcaactaccaccctccacaccagcagcctacatcttcatggcaagttcactctccatccccgatgccacaagatgcaccaaggagcagtccatggcaacgtcctatgcagttccaggatccaatgtcaggataccaaggaggtcctcccagcgcaccacctccttgggtgtcacattctggtcctcgaggccgaggttcttattcaaatccaccaagctttgggttcagacacccaaatcccagccgaggtggcagcacaatgaactatggaccaagaggtggcccatattcatcttatggacgtggcagggggcccaactactttggcagcccaggttcaagggggagaggggggaggggtggctggcaaggccagagttacatgaacaagtcaatgcttgatgacccttgggtggacctgcaacctggtgttggcaacatactaatacctagaggtgagtatgactccaacaagtcctggctcccagaatcgctgcgaaaaaagaaggaaacgccgcctgctcatggacaaattaaaccggcgccaggattgagcctatcagaataccttgacctgtctttcaatgaggtttctgataaagagaagtaggcctttatgtatgcatatctacgacgacagattgatgtagtctttgcgatcatttgcaatagatctgttccctctgaaatcatgtgcaccttttatcttcgctcctcccattgccctgtactgtgctgccatggcaattttactagtatttatgcgttatagcgatcttgttgtaattccttgaatttaaggaactgaataacttatgatctcttaatagatagaggaagcaaagttgtgctgc

SEQ ID NO: 34626 - DNA, 1853 bp, Zea mays
  Clone ID: UC-ZMFLMO17293H01_FLI
gcggtgcggtctccacgagcgctccagctccactcctcgcacccgaatcagccgctcagatccccaggcccgcctctccctccggcggcagttcctcgccggggtcctgcccgcctctcccttcatcccctcctcagaacttatggatggacaggtggagacctttgtcggagatgaggaaggcgggtcgcctcaagttccttacgatggggagcagccaacgctgtatgatagtgtcgcgaagcagtacagtgaagagctaggtgaccagtacaacgagcaacctcgtgcccaatatgatgaagggtctgggaatccgtataatgattatgaagagcaagcaaacctgtacagtgaggaaactgggaatcggtacaacgaggacccagcagattcttaccaggaagagcaggagaatgcattcagtgggggcataaaccaacaggacaacttgcaggtcaacaatgttgacgataacaaatggcctggatggcctggagagagtgttttccgcatactcgttccagctcagaaggttggagctatcattggccgcaaaggggagtttatcaagaagatgtgcgaggagactaaagcgcgcatcaaaatacttgatggcccacctggtgtaccagaaagagcagtaatgatttcagcaaaggatgaaccagatgcacctctctctccagctatggatggcttacttagagttcataaaagaataactgatagttcagatggtgaatctagtcaacctcaacgaagtgctggtaatataggaccaacacgacttctagtgccatcttcgcaagctggcagccttattggcaagcagggagcaactattaaatcaatacaagattcttcaaaatctattgtccgtattgttgagaatgtgcctcctgttgcactaaatgatgatagagttgtggagatacaaggcgagcctcttggtgtccaggaagcagtggaattaatatcgagtcacctgagaaaatttcttgttgaccgcagtgttctaccattgtttgaagcgcatatgaaaatgcatggtatgccgagggagcaaccagtgccacctccccagcattggggccctcctcaaacctggatccgccctccaaacattcctccaggtggtcctggttttggaggaaatccacagttcatgcatccaaggccgcaagacagttactatccttctcctgatgtcccccatatggaaaagcagccgcactacggtatttctgcatacggccgggaggccccaccaagtggtgcttctgctacagggaatcaaccaccctctcatgcaggttctcaggtggctcatgacatgcacattccccttgcctacgctgatgctgtgattggggcagctggtgctagtatcagttatatccgtagacacagcggcgcaacagtaactattcaagagagcagaggtgcacccggagagatgaccgtggagataactgggactgcagcccaagttcaaactgcgcagcagctgatccagaatttcatggcagaagctgccccaccaccaccaggcccggcgccagcttccaaccctcccgcaccaccagttgatccaagctatggctcttacccaccaccatatggagcagctccttcttatggttcttccgcagctgctgggcctccgcagtacaatggtgggaactacggtggcccgacctaccctcccagctatggctattagtagacaagtgtagcataccaaggatttgcccccccccccccctctttttttccgaataacgacagtgttgggcttgacatccccctgcccctggttgggagtgcagtttttaaaaccacaatttttc

SEQ ID NO: 34627 - DNA, 1321 bp, Zea mays
  Clone ID: UC-ZMFLMO17294A01_FLI
gcagccacagccatccatggaggcgctctacttgctggcctccctggccgcgactgtcgtcacctccgccttccactcgctcctgctgttcctccgcctcctcctccgctacccgcgccgcgctgcccctaccgatgatgggcccgccgcggcggcgcggctctacgagggccgggtccggcacgcgcgacggcgcccggcggcgcacaccttcgagtaccccgcgcgctacgccctcgtcgacctcgaccgactgccgctccccggccacctctccgccgacgatgcccgccgcgtcgcctccacctccggccccgtgcacctcttgacggtacccgagagcgtggggtacgagcagaacccgctgagcatttactactgctacgattctgcaggacaggggcaagatggagagctcagaacgtgcattgccgaggtcacaaacaccccctgggcagagagagtgatgtttaccttccaaccgggctctgatctcattgcgaagcccttgcatgtcagcccctttatggatatgctcagcaactggagtattcgcgctgatgctcctggtgatagactctatgttggtatatcagttcagcatccgacacttggggactacttcactgcagttttggatgccaaattggttgaacagacaagtaattctctgaggctggcaaccttcttctggctgatgccgcacaaagttgctgcatggatatactgggaggccctcaaactttggctgaagaacgtcaagttcctggaccatcccaggtatctgaacccgaggtacagggacgaagcgctggcgcgcgaccttgagctccgcacctcttgctgccaccttcagcggcaggagcagaacgaccgaagaagcagaaccgcagaaaagacagctgaaatcacggaccacgtagatggcaagggcgatgcggacatcgcgaagaggtggtgcgtttggagggacgctcggtggccgtggtcatgaaaaaaaaactcagacatgccgttttgtgttcagattcagcctggtgctcccgtttcgaccaaatatcgtagttttaattggttggtgccttcgcagccgccactacgagttgacagtatcgatactgggtaacgttgttcgctgttaaagaagaagagattactagggacatgtttttttttcctcaaaagatgcattttcttgttcgtaatatccagtttttgaccaattattcggcttcaatgtataacctttggaatgtgcaagaggtgcgcgtcagcgcgtgtatgctgccatcttcaatgcacatgcgtgcctgattgctgc

SEQ ID NO: 34628 - DNA, 1642 bp, Zea mays
  Clone ID: UC-ZMFLMO17294C10_FLI
tgacgaattcaggacagacaacaatagcggtcttggcatcgaagaatatcgtatccccagtgcgtagaatccccgttggagggctttcttatggaaccgatgatcacagtctcagagatgagtttgccaaatatggagaagtcgttgaaggtatcaagctcattgctgcacttggtggtctgctcaagaatggtatgagttcaaatctgtctgtctaccaagcaatcagatgtatgtcatcatccaagctctttgttggagggctttcttatggaactgatgatcacagtctcagagtcgagtttgccaaatatggagaagtcgttgaaggattatcgttgatcgtgagtctaggaggtctagaggttttggctttgtaacttacacatcttgaggaggcttcagctaccatcactgccatgtatggaaaggttcttggacatgtatgttatcacatcatagcagctggtttgaacggctacatggcaattgtgaccaaccttaacagtccggtaaacaaatggaaatgtgctgctgctcccattattgtatacatgaattaacttttcagaattcaggttaaattctaagaagagtaaatatttccttgttaccggtctatgatgactgtgaagagatggtcacatggtcctgccaccactcaaatcgataagcttgttgtccacatggcgtgtgttaaaatgccagttgttgtgctcattaatcggcttattttcccctttatcgatttgtctgcctatgggctcttaggttggtactacgtctctagaaccatcaggctgctgtgggaggattttcatcacagttgacggttttgtcgtgctacctcaggtcatttggttaacgtttgttcccttcatccacaatagcttactgcatggcataatttctggttctttggctgttgctgatgttgcgatggtgcaagaggaggtgaacagataatgaagatttcaagtaaatggcgagttgaatccattgaacagataataagaatagttttaagtgtcattaatagtgcaagctactacactaggattttcaacatgatgaacagatcggccgatggatgctatgtggctgtatccagccaagggaacttctatttgatgtgggagcttgggcagccgttttggcaaccccacatcagggtggtggcatggagattctgaacatggggtggagagcggacagtggactttttgctgttgcgcggtggtgggctcttcctcagtataggaacagtcatataactgaagactttgaggaggtgcaggtgcagagctgatggtttgggatccttgacgtggggtaccgctcataggaggaggcttgggctgcttgtggcagcaacgtgttgcacaagaccataaataaagggaagagctggatgcacgacaaggctgtcgccaccaacctctactccgtcaagcaacgacgacgtgttgcttcggggtcttggctgaacgatcagacatcctatgtatatctgtgtacaacaaacgacatctgctactactactaccataaaagattgccgactgtgcttgcgttctctcatctgtaacacaaatgagtgtaaagagacatgtgctatttccttggaacttgaaaactttgt

SEQ ID NO: 34629 - DNA, 533 bp, Zea mays
  Clone ID: UC-ZMFLMO17294D07_FLI
acgttggtggcgcgggtgatgttaggtctgtgaagatcaaaggaacggagctaggatggctccctatgggccgcaactggggccaggtgtggcacatcaactgtgacatgaggggacagcctctatcgtttgagctcagctcaagcgatagcaagacgctgaccagtttcaacgtcgtgcccaaggattgggagttcggcaagacatacacggggaagcagtttcttctgtagagaatggagtgccgcaagatcagcttacagttcctcatttttcttctgatcctacgagttgggctgtggtgtatgtatattcctctgcagaagaagcaatatcgttattaggagaaaatcacttagtgcagggctcagatagttactatggctcataacgccttttcatgtacccttcatagttgtctaaagaggcttgatgtatcattcaaaataggaggccggattcgggtatgtccggtgtattacaatatattttttttcctggcaagcaatgataaaatgtctctccatttctgt

SEQ ID NO: 34630 - DNA, 1336 bp, Zea mays
  Clone ID: UC-ZMFLMO17294D09_FLI
tgcgtttgctggtcaccgtggagtcagctgtgaattgtcgtctcctgacgcgcccgtttcccctctgcatctgcagtgagcaagttcaactcactcaagacgagcaggaagggggttgtggcgatggcgatgatcgagtacccgtcgctggaggcggcgacggggaagttcagcgcgagcaacgtgctcggcgtcggcggcttcggttgcgtctacaaggcggttttcgatggcggtgtcgccgcggcggtcaagaggctggaagcaggcggccctgaatgcgagaaggaattcgagaatgagctggatttgctcggcaggattcggcaccccaacattgtgaccctgctgggcttttgtgttcacgaggggaatcactacattgtttatgagctcatgcacaagggatccctggacacacagctgcatggggcttcacgtggatcagccctgagctggcatgtccggatgaagatcgcactcgacatggccagggggttagagtatctccatgagcactgcagtccaccagtgatccatagggatctgaagtcatctaacatacttttagattctgacttcaatgctaagatttcagattttggtcttgcagtgaccagtgggaatattgacaagggaagcatgaagctttctgggaatttaggttacgtggctccagagtacctattagatgggaagctgactgaaaaaagcgatgtatacgcatttggagtggtgcttcttgagctactaatgggaaggaagcctgtcgagaagatgagtcaaactcagtgccaatcaattgtgacatgggccatgccgcagctgactgacagaacgaaactccccaacatagttgacccagtgatcagggacacgatggacccaaagcatctgtaccaagtggcagcagtggcggttctctgtgtgcaaccagaaccaagttacaggccgctgattactgatgttctccactcccttgtccctttagtgcccgtggagctcggagggacgttgagggttgcagagccaccttccccaaacctaaaacattctgcttgttgagatgtcatggtcggtcgaagatgacagttacgtgctgatgagcttggacgatgcttatcagtaacttatcactctagctgtgtgccagaggatgacggttccaacctgccggtcgctgagaattctggtttgcaaagagttgtctcctatgtctttgcttgtacaaagaagtgaaagaagcaacaccctttcccttagaatttagggtccttctgtacagatcaaagtttctccaacactataacataaagaatttgagaacgacgtgcat

SEQ ID NO: 34631 - DNA, 1226 bp, Zea mays
  Clone ID: UC-ZMFLMO17294D11_FLI
cgacactttcctcgcgttgcctcccttctggcggcggccatcgcctcccccgcatcggtcgtcgctcctcaccgagacccatttgaaaatgatgaggagccagctatggatgcatcatttgaagttatggatggagaaatcagtgaaccagaatttatcacgggtgtctcaacatctaatgaatggactgatttccgcaataatcttgctcaggggatgtataatagatatagagctaggtctaataactaaggacatgaaccaatcagagagctcaagtgttgctcggggaagagggaaaaacaaaaggatctggacttattatgaggatgaggagttaattaaagcactatatgagatatctttagatccaaagtggaaaagcgagggaggttttaagaatgggtattgttctgttctagaaaatgaactcaaagcaaggctactagggtgtggtctcagtgctattccacatattgagtctagagtgaggcattttaggaccaagtatggtgctattgaggtcatgcttgctaagagtggttttaattgggatgacaacagaaaaatggtgcaatgtgagaaacaacaatattaagcccattgtaaggataatcctgatgcaaagggactttatggtattgcatttccacattttgataccttggctgctatatatggcaaggacatagctactggagagggggccgaggggcttggtgaggctgtaattaacatggagaaagaaatagctatgggagaagattgtccagtagtggaagaggatatggtttctatggatacaccacaatggtctatggataataggaactcagatcattcaacttcatcgagcagcaaaagaaggaagaaacacaaagataatatgtcaagtgacccattcttggatctagcaagtggaattcgtggtgatcttaacaaaacctcacaacactttggaaggatggcagaagtgatggagatggaagcaaaaaaggatcaaatgcaagagttacaagagaagtttgttgttgagttgactagacttggttttggtgaagctcaaaggaagtgacttgttaaattatcaatgaagaatgtcatgagcatttggtgaagagtgatcggcatataaactcctgaaagttgcttagatctacttgagcaagtagatatgtttaccggtgaaacatatgtttacctgaagaccaagtactctgcggtct

SEQ ID NO: 34632 - DNA, 1213 bp, Zea mays
  Clone ID: UC-ZMFLMO17294G04_FLI
ctcaggaagtggctccaagaccatccccggttcgtgatgaatcctctttatattgctggagattcatacagtggtctcatcattcctactcttgcattagaaattgacagaagcatagaactcggtgaaaagatattttccggtctcaaggggtacattgctggcaacccgctgactggcggacagtttgatacggacagccaaattccatactttcatgccatgggacttgtatccgatgaactttacaagaatgctagggagaactgtggtggaaagtatagtgctccactgaatgctgtatgtgcagaggctgtccaagctatcaacaattgcacacgggatatcaataagcaatacatcttggatcctgcttgcccggatgatgatctgttgagccccaagactgtagcagagacagatggaacgagcaggttgatgctagagtctgcagattttctacttgattccaaatgtgcagaagctttatacattctatcctacgcttgggggaatgatgatacagttcaggagagcctcggtatccgcaaggggacaattggagcatggaaacgatacagccatgcattgccttacaattatgatatccagagtgcagtggattaccattcaaggctagccacaaaaggatacagggcgctgatatacagcggcgaccacgatgcggttgtaccccatgttggcacacaagcatggattagatacctcaacttgacaatcgttgatgattggcgaccatggtacgttggagaccaagttgctggattcacaaggagttatgcgagcggcctaacatttgccactgtgaagggtgctggacatgttgcgccgttgtataagaccttggaatgccaaaaaatgtttataacatggatttcagggaatcctctttgatgcaagtctaatagaatgacccatcggtcatctgagtgggcgtcaggaatcctctttgaagggtcagttgcttgggtttctttggtgtcaactggttcaaatccttgatcgatatggttgatcgtaatatttttggaacttatttcaagatttaacggtattgttctcttaagacctgcctgttgattctgttcatataggtgaacgtgcatatgttgtatgctatatgcatacatggggacatggggtgtatgggtgcttgtgcgttcgtacaaaaaataaagtgccaatttggatt

SEQ ID NO: 34633 - DNA, 3376 bp, Zea mays
  Clone ID: UC-ZMFLMO17294H10_FLI
gtcaacacagatgcaatcttcacagcagcccatgatgcaaatgtcatctggtcttcagcctgggcagactgccattccacaaactcagtccatgacgatgcattcagctacacaaagtggtattcaacaaaacccattgaattcagtacaacaatctgtgcaaccattactccatcagcctacacaatctgtagtgaggcagcagcaacatccacagtccatgcaccagcagtcttctctgcagcaaactcagccaactcaacagcccaacattcctttgcaacaacaacaaccacaattaatgaaccagcagtcaaatttacagcaaaatcagttaatgaatcaacagagtggtgttgtggagacgcaacagcaacaaaggctgccagttcagtcaaataatcttttgaatatgcagcaaacacagcagatgatgaaccagcaatctatgtccttgcaccagccacaacaattggcaaaccaaggaaatatgtcaagtctacatcagcagcagcatcagcaaaatcagcagcagcagcagcttctcggaactgggccaaatgcccgtatgcatatgttacagcagcaaaaggtaattcagcaaccacagcagcaacagcatgctcagcagacatcaatgggtttgatacaacctcagtctcagcagaaccaacttcagcaacctcagcaacatatgatgtcgcagttccagtctcagcctaatcaaatgcagcaacaattgggaatgcaacaaaggctccaaacttcagctggcatgctcttacaacaaaataacattgatcaaaagcaatatgttcaggcacagaggggccttcaagaagcacccagtacatctgtggattccactgctcaaactggtcatccaggcataggtgatttgcaagaggagttatatcaaatgattaagagtttaaaggaccaatactttgtggaattgaatgaattgtacaataaggtatctatcaagatacaacagattgacaaccaaatgcctgctcaaaagtcagcagagcagtatgaaaagatgaagggctttaaaggaatgctggagcgcactttgcatttcctgcaagttaacaagagcaacattcatccaggtttgagggaaaaaatccccatttacgagaggcaaattctcagtatcctaagttcacaaagaaggaaacctgtgcaggcacctgggcagcaaacgtttcagcaatctagtgggcaagctcctagctctaacatttcacagcaacttcagacttcccaaggtttgcagcagcatgatagtcatactagtcagatgcctcaagcaagtttaccaagtatgaacacaggagtacaaacctctggagcacctgcgcctcaaggaacaaactttggtgttccaacaacacagcaaaatgtcacaaatgcaccacaggctggctctaatttggagaatgctcagggaaataattttaatcatgtgcagcatggttcaatgggtgctgctttgcaacaggaaaggactggtcccatgcagggtgcattgaatgcacagcagcagtccagtagcaacatgatatccaacaatgcaatgagtacaatgcagactaataacaatgcaaatgcgaattcattgcagcagttaaagcagcaacgtcaggagcatcaaatgatgcaaagtcagcaaatgaagcagcgccagcagatgatgcaacagatacaacaaaagcaaacgcttcaaccgcagctcccaatacagcaactaaagaaacaacagcagcaagggcagatgcagtttccacagcttcattctggaaatgatgtgaatgagctaaaggttaggcaaggagctgcaatcaaatctggaatgtatcaacagctgagccagcgtaactattatcagcagataaaacagggtggtgtctttccaatttcttctccgcaaaccctccaaacatcgtccccacaaatttcacaccattctcctcaggttgatcagcacagtctgttgcaatctcaagtcaaaaccgggacaccattgcattcagctaactcaccatttgtcccatctccatcccctcctgtggccccatcaccgatgccaatggattcggataaaccactatccaacttatcttcagttactagtgctgggcaggctggacatcagcaaacatctcttgcacctcaaacacaatctatagccgttaacacaccaggtatatcagcgtcacccttgcttgcagaattcacaagtgctgatggaagtccggccaatgtaccaactcaagttccagccaaatcaagcgcagcagaaaggcctctggaccgtttgcttaaagcattgcgaacaacacagcgtgagtccctaagtgctgcagtcagcgatattggatctgtcgtgagtatgattgacaggattgctggatcagcgcctggtaatggttctagagctgctgtaggagaagatcttgtcgctatgacaaagtgccgcttacaagccaggaacttcataactcatgacgggagtggtgcatcaaagaaaatgaagcgggacacgagtgctatgcctcttaatgtgtcatcagctggaagcgtgaatgatagcttgaagcaatcatatggtgttggtactccagagctacaatcaactgcaacctcacgtgtcaagtggcaaagggctgaggtaaaccatgctctgatggaggagattcaggagataaaccaacagcttatagatacagagctccatgtctctgaggatgatgctgagtccttcactacatctgaggggggcaaagggacggtcattagatgcacattcactgctgttgctgtttgccccagcttgaaatccgtgtttgcgtcagcgcagatgagtccaattttgccgttgaggttgcttgttcctgctagctacccgaaatgctccccggtgcttctagacaagtttcctgatgaacaatgcaggaactcagacgacctgtctaccaaggccaagacaaagttcagcgtattgctccggggtctagctgagcccatgtcactgcgagaaatcgcaaggacatgggatgcttgcgctcgcaaagtgatcacagagtatgcccagcaaaccggaggaggcagtttcagctcgagctatggttgctgggaaagctgcgtaggcgcttgttaattgcttatattgtatctattattattattataagtatttatgtgtcgagtaaaatagaaaaaaaaacagtgtgtctgctgtatactccatccttttgctattgggtcaatgttggcttgataaatatggtcgtgtacagtacagtgtatgcgtcagtccggttagtatcatgtatgctttgcctctatttacagaacttggttttat

SEQ ID NO: 34634 - DNA, 1340 bp, Zea mays
  Clone ID: UC-ZMFLMO17295A02_FLI
gggaaatgacagatccagttcttgaaggagaaactagtgaaaagagcaactctaaggccagctctgctcaagactcggatagtacttcttcagttgctgaccaagaaagccagaaggatgttctagaggattgctcaaaccaaggacaacaatcttctttcagtcaaacagaggaacatgcacatatagctcggcatgcaagggaggtttctctttcccttgacatggaaccacctgtcttaattagtgattcctctgatgatgacatatcactgtctggtgaacatataaatgattgggaggaagcacaacagagtgaaaattttagtttgtcccagaatacatggcaagaggatcctaatgtcatgcaacaccatcaagaaatagatatcacaagcaatggattgaatcaaatgtcaccacattcgaatgatcttgagttgacgtcgtcatcaactgaaactactgatgatccttttgaagtgaatgacattgaaccaccagctaaggaagtggtggtcgttgatgatacccacgttgtggatcctgtatatgattcaagtccttcgggaagcgagaggcctgcacctactggtttagtaattgacggacctgtcctaaaagatggtcatgcttgtactcttgttgttgaagcaaccatcgaagaagggggttcatcatcaagaatggaggtttcttccagtgaggtagctggacctagtttgagttctgtggagcaaagcgaatccccagagaaagaagcctctgagataagagagcagtccatggttggccatgacgaggcacatggaggttctgtcagccatgctgatccttcagtatctgatataagttctcagccgagtactgaaagttcaacaaatggtgattctggcagtggtgtaacaccatccttcacaaacgcagttctttagtttcttcataaaaaaaatgacagcggcaccgatcgagcatcatcaggttggtcgtcttcagcagtacttcgagctaggcgacttttgtgtggggcgagttcattgctgaggaaaccactgggagggtatatgtttgttgcaggaaatttcttagtgcttcaaagggactaggcaacattagcattattagcactgcactgtaaaaatggctagatatggttgttgcttaatttggccaccactctcgtttgtgaataccttgtggatccgacagccaattttgtgccgtaaattaattgttaatttgctgcttcgagtaccgtagtctatggattgcctttggaactcatactacctgctgtgtgtaaggttttacacaagtctaaaatgaaaacgaaaaggatg

SEQ ID NO: 34635 - DNA, 1372 bp, Zea mays
  Clone ID: UC-ZMFLMO17295A11_FLI
tgttacacttatggtgaactaaggaccgctactgaaaattttagttctgctaatcttcttggtgaagggggatatggatcagtttataagaaaaattcaccttctggcagggtaaattagttgatggcagtgtggtggcaattaaacaactatctgaaacatctcgccaagggaagaaggaattcgtagctgaaatagaaactatttcccgagtgcagcaccgtaatcttgtgaagttgtttggtttttgccttgagggaaataaaccacttttggtttatgagtacatggagagtggaagccttgataaagcattgtttggaaatggaagattgaacttgaattggtcaacacgatataaaatatgcttggggattgcaagaggcttagcttatctccacgaagagtctagcatccgcattgtgcatagggacataaaggccagcaatgtattacttgatgccactttgaaccctaagatttcggatttcgggctcgccaaactttatgacgataaaaagacacatgttagcacaaaagttgctggtacatttggctatctttcacctgagtacgccatgagaggtcacatgactgagaaagttgatatttttgcttttggtgtggtcatgttggagattattgctggaaggccgaactatgatggtaagcttgaccaagacatggcttatcttttagaatgggtctggcaactttacgaggaagaccatccgctggacattgcggatcccaagctcacagaattcgatagtgtcgagttgctccgtgccatccgcatcgccctcctctgcatccagagctcacctcgtcaaaggccatccatgtcgagagtggtgtcaatgctcacaggagacagcgaggcgcctgaggcagtgtccaagcctagctatgttgccgaatggcagagcaacactgaagggacgtcaagctcagtgtccacagcagaggctgtgtccgtggctccattcctaaaccccgttgtggacgatggccggtgatgatggccatcgctaagatcatcttatgtcaagcactcaagccacagattgttttcttggagatccacctttaaaggccccattatttaggttgaatgtggatgacagatttatgttgttgactggatgagatgtcctagggtttcctcacgttgtagaatacaactctcacaagtataagaatctaggaacatattccttcgatgtaacatacctcttttgtttaatctgttttgtaagagaaaccagaagaacaccttgtatttcggttgatattttgaaacccacagccaattgaatgctgggtgtgtaggcatatatatgaccaataggttgattgtaagctttactac

SEQ ID NO: 34636 - DNA, 1117 bp, Zea mays
  Clone ID: UC-ZMFLMO17295A12_FLI
gctggagcatacacaaagacattcatgctaggtgtttaagatggacaatcagtgatgtatccttatcacctgatcagcggtatcttgcctactctagtctggcacctattatccatattgtcaatgttgggaatgcggcaagagaatcctatgctaacgtcactgacatccatgatggattggatttttcacagcatgaagatgttcaatattcatttggaatattttctgtaaaattttcctctgatggacgggaacttgttgctggcagcaatgatgactcaatatatgtctatgaccttcatgcaaacaaattgacattacgtttatctgctcatacatctgatgtcaatacagtagcatttgctgatgaaaccggccatctcatatattctggaagtgacgacactttatgcaaggtctgggacaggcggtgtttgtccgcaggacaggctgccggagttttgactggacatttgcatgggataacacatattgatagtcgtggagatggccgaagtttcatatccaatggaaaagatcaagcaatcaaactgtgggatatcaggaaaatgatgtccaatgctgatagttgtgcagatggagccccaacttgggactacagatattcaaggtatccgcatcaacataaacagttaaagcatccgcatgatcagtcaatagcgacgtaccgtggacatacagtcctccggacattgatccgttgctacttttctccttcgtatagcactgggcaaaaatacatatatacagggtcgtatgattccaatgtttgcatctatgatgtggtaagtggatcgcaggttgcgaagctgaaatggcatcaattggcgattcgggactgcagttggcacccatttgagcccacgcttgtgagctcatcctgggacggccgggtagtgaaatggaccagcgcacgtgatgaaggggcttctgatgtcgattgagttgagtcgaccgtgcaggtgcaggtgcagcgtgagtgatctttactgttcgtggttgtgggctaaaaaaaacatacccaatcttgcactaaaaaaaggagagtgagcacagctcgtaataaagaaagaagatcatgtgttgcagtggt

SEQ ID NO: 34637 - DNA, 733 bp, Zea mays
  Clone ID: UC-ZMFLMO17295C07_FLI
ggctattgaggatgagaagattaagcaggataagatgcataacttgtcccatattaaggacaagaagattacgcaggataatatgcagaatttgtcccatattaaggacgagcaggataacatgcagaacttgtccgacattgaggatgagaagattaagcaggatgagaggcagaacatgtcccatgctccagtggatcttcaaaccactgaccaagtaatggagaatggtcaccatgtcgagcctagtgtaccaacaactgtggaagacacggggtttccattggacaacaaagaacatcctccatttgataagcaaaatgatgttcctgagcacgagtcccagcagcttgaacacacattgaagcacgacctccctcagctggtaggggggcctgagcaggatgatggaacagactgtaaaaggcctaagctcgaagagtaggttctggatgatgctcactttattttggacagttttcctggagactggtgaactgcatacaacttggcacggagttggtgagcatggctttgccggtgccttgctgtgctgtgaaatatgccctacggctgattgcagtttacaattcgagggaggtcgtgctagcaaatatttttacgttccaacgaacattggaatatatggaccaaaacatgctcacgcttctgataacggttgcattcgttccttaaatgtgttccatgaaagtgaagcaaatgattttcatcc

SEQ ID NO: 34638 - DNA, 1508 bp, Zea mays
  Clone ID: UC-ZMFLMO17295D01_FLI
caggaagggtgtcaatcaggacgccatggtggtctgggagaattttggttcaaaggatgataccattttttgtggagtttttgatggccatggaccaaacggccatttggttgccaagagggtcagagatcttctccctgtaaagttgagtgcaaatttagggaagggtgaatgcaaagagatttctactagcgatgtcaagagtgggactactaaaggagttgcaaccgaacacagggttgaagatactgatgcttcccctggaaatgaagagaatggcgagtacccagaatttttcacagcactgagggcttcattcttgcaggcgttttatgtcatggacagggatctgaaggcacatagaaatattgattgtgaattcagtggtacaacagcagtcacagtaatcaagcagggacaaaatcttataattggcaacttgggagattctagagctgtcttgggcacaagaggtgaacataatcagctagttgctcttcagctgacagtggacctcaaacctagtatcccgagtgaagcagaacgaattaggcaacaaagtggcagagtattttctcttccagatgaaccagacgttgttcgtgtgtggcttccaactttcaactcgccagggttggccatggcaagatcatttggagacttctgtctgaagaaatatggaataatttctatgcctgatgttttctaccatcgcatcacggataaggatgaattcgttgtgctggcaactgacggggtgtgggatgtgctttccaatgctgaagctgttagcatcatcagcaatgctccttcacaggcctcagcagctcgatttctggttgaaaaggctcacagggcatggaggacacggtaccccacatcaaaaactgatgattgtgctgttgtctgcctctttctgaaaacagtagcagcaagtacatcctccagtgctgtaacaaaagattcggtgaagaacagagaaatgagcaatggtaagcattcattggctgttaaaacaagcaccaaggttcctgcaaatcttgttactgcaaaagatgagtggtcttttgttgatggttcctctgggtgtgtcgcgctgccaactttaccagagcccacttcagttgtgaaggatagctcaaaagattgagcttgcctgccaattgagatggcataatttttgctggaaatttgttcgccttcgtttgcaagcttgtgtgcatcagatttgttgtgacgtgaagaccagtgccagtttcattggcgagttgaggaagttattgcatagtggaatggataagtgtgcatattttgttctttttgtacagtattcaatcagtttagtgggatcagttggtagtaatgataactataataataccgtgcctattattgatggatgggggtgatcagatccatgcataggatgaagtttctcccttcttttgtaatataaatataaataattgtgtcggtttcagcagctctaataaattttcttttaggtg

SEQ ID NO: 34639 - DNA, 2185 bp, Zea mays
  Clone ID: UC-ZMFLMO17295D05_FLI
cgccagcccgcccacagaaaagccgttctcccctctttctcgattcgacgaggggaagactcgtcgagccgccggccagcccatctcggcgcattcccggagaatccctccggaaaccggtcgatcctgggtcatccaacacacagcacttcgcttctcccgcgtccccgacccgcgcgcaagccctcatgcggttagggctgtaacgatctcgtctcgctaccggcggccggctgcggaacgggccaccccacgcgctcctctgagttcgttcgactaatctaccgctgactgtactttgggctgtcgccaccagaaagccctcacgagtcctttgcctcctcactccgtcaggctcgtcgccacagggttttgttcctaacttttgagcttcaatttttgtcttgaatggcaacacctctggatgttccactggatgatttgattaagagcagagctgggaggggaacaggaagaggcaggggacaaggagggggtcgaggcagaggtgatggccaaaggttggctcgtggttcgtggcgtgggcgtggtactggcaacttccgtgaaaggggacttggggtgtcttcgcggaggccacttggtgttaatacttggtcctcatcatttgctattgccaaggcaagcacacaactataactgtttttctgttaccttcgagaatccaaattgcagtaggtacctgatgagaagtggctataaacttattaaaatggcacagcccaactgttccattcagaccatatctgtgaccatttaactgtggagcttcaaagaggatccaatggctttttcattgagacctgtctcttctctgccgagtatgtagggtggtgaggcatatgttggtttgtgctggctattgcttcaaagttcaaactgataactttgtctctactcgtgagcaagctgatggactacttaataatctgtggataaggccttttcatgtatacagaaatagcaccattatgtggaatggtatagggttttatgattttgctgatgctagttgcttcatcaagtactgtggattgatgagttttgagattttatgctaatacttgctcgtcacaacatcgacatgcatgatatggaatattacagtcattcaataaagcaaaggattttgtgtggagacatgatctctttgaggatagcatggtagcagctgggctttctgggatagaatctggaacaaagctttacatttcaaatttgcactatggagtgacaagtgaagatctacaggagcttttttcagaaatgggtcatttgaagcactgtgctgttcattatgacagttatagacacccaactggttccgctgaggtgatattcaccaggagaagtgaagctctcgcagcactgaagcgatataataatatgcgccttgatgggaaggccatgaagattgaagtaataggagcagaattgggtctatcagctgctgccgtaccccagattagtgttgttcctggtgcaagcagaagagggcagagagaagttgttatgatgcctggtggaagtgggtttggacaaggtgcatctggcccatctagttcgcttcctgggtggaagcgtggaggctttgttcgaagaggacaagggcgtgttagttttcctcaaagagggcgagggcaagtgcgcagccgtggccgtggccgtggccgcagtagctttgttcagagccgtggacgtggctatgtgcgcaggggtaatgcagagaaatcagccaaacaattggacaaggaacttgacaactacaactctggtgcgatgaatgtcgactaagttaatccatcgtgacatcattcaatccaacctggaagttggaactatgttgaagttaagcttgttttctgtcggtattctgtcaaatgtgcacacttctgtcatgctctagtggcatcagttgaagattagatattccattattcctactgcaatagtcttgtgatatcagaatttgctgtaattgaatgatgaattatgttttcaaccgtcgaaaggtttgctgtcaaaatttcaatattatcctagttattgtcagaattttcagtaggcattagccaaaaagtttggtgctgactacaggtatatcagaatttgctgtaattgaatgatgaattatgttttcaaccgttgaaaggtttggtgtcac

SEQ ID NO: 34640 - DNA, 2324 bp, Zea mays
  Clone ID: UC-ZMFLMO17295D09_FLI
ctcaaccatgctcgttgtcacaaaggggaccaagttatggttatcgaggtagagtgatgcttgcttttgaagataatggatcctcaaaaattggagtccggtttgacaagcagatccctgatggtaatgatcttggtggtttgtgcgaggaagatcatggcttcttctgctctgctgaattactgcgcccagacttttctgctggtgaagaagttgagaggctagctatgaccgagttaatagaggtcatttcagaagagaacaaatctggacctctgatagtgttacttaaggatgtcgagaaatcattcacgggagttacagagtcactatcatctttgaggagcaaacttgaatcgcttccacctggtgttcttattataggatcccacacccagatggacagccgcaaagagaaggcacatcctggaggttttcttttcacgaagtttgccagtagtagccagactctttttgaccttttcccggatagctttggtagcaggttgcatgaaagaagcaaagaaagtccgaaaacaatgaaacatctaaataaacttttcccaaacaaaattttgatccagcttccacaggatgaagctctacttacagattggaagcagcagttggatcgtgatgttgaaacccttaaagccaaatcaaatattggtagcattcgcatgtttctgagccgcaatggaattgaatgcaatgatcttgaagaattattcatcaaagaccaatcattgagtaatgaaaatgtggacaagattgttgggtacgcagtgagttatcaccttaatcagaataaaattgaaacctccaaggatgccaaacttgtactcacaactgaaagccttaagcatgggctcaacatgctccaaagcatgcaaaatgataacaagagctccaaaaaatcactgaaggatgttgtcacagagaatgagtttgagaaaaggcttttggcagatgttatacctccaaatgacattggagttacctttgatgatattggagccttggagaatgtaaaggacacgttaaaggagctggtgatgctccctttgcaaagacctgagttgttctgcaaagggcagttaacaaagccttgcaaggggatattgcttttcggacctcctggcactggaaaaactatgcttgccaaagcagtagcaactgaagcaggcgctaatttcatcaatatatcaatgtcgagcattacatctaagtggtttggtgaaggggagaagtatgtaaaggctgttttctcactagcaagtaaaatagcacccagtgttatatttattgatgaggtcgatagtatgctaggaaggagagaaaatccaggggagcatgaagcgatgcgcaagatgaagaatgaatttatggtaaattgggatgggttgcgcactaaagataaggagcgtgtgcttgttcttggtgctacaaatagaccttttgacctcgacgaggctgtgattaggaggttcccccgcaggttaatggtaaacttgcccgatgcatcaaacagagagaaaattctaaaagtaattttggcaaaagaagagctgggatctgatgttgatatggactcgcttgccaatatgactgatggttattcaggaagcgacctgaagaatctgtgtgtgaccgcggcgcattaccccatccgagaaattctggagaaggaaaagaaggagaagaatttggctaaaacagaaggtaagccggagcctgcattatatggaagcgaggacatccgtcctctcagcatagatgacttcaaatctgcccatgagcaggtttgtgcgagcgtttcgtccgactcggcgaacatgaacgagctccttcaatggaacgacctgtacggcgaaggcgggtcaaggaagaagaaagcgctgagctacttcatgtgatggggtgagagcatagaatccagaaggatcacagccgtggcataagatcagaaggaacacagagcggccatagtaccacacccactatggccctaaatccagtcaagttttcgctccttccccctccctcagtagccgccgccgccccgccgccgcctggtgtaattagaactgtgtacggagtcgagttggtttgccagctgtttcaaggttacagagttgagatttggaattacaatggcgccattgccctcctccaacccccctttttcttcctcccataagttgcgatcactgtccttcttggactctctcgcctttgttcttgtaaatgcgaaatgaagggatgtgaaataagaacatcttcgtcctgttgttgacagtatggtacacatatttaatttttgt

SEQ ID NO: 34641 - DNA, 1799 bp, Zea mays
  Clone ID: UC-ZMFLMO17300B04_FLI
gggtcgagctgggtcgaagaaacttcaacacacaacatacgtatacagtcagctgctgcagtacagtaggagctagatcgagctagcatggcggtgaaggtgtgggtgttcgccgtggcactgatgatgtgcgctggtgtaggccttggagctgacgacgacgacggcagcagtagtgccggtagtatggatgctgctggcagccgccttattagccgctgtcgtctgagctcgcccaactaccgcggcgccctggcaaaggccatcctcttcttcgaggggcagcggtcggggcggctgccggcaaaccagagagtcaggtggcgcggggactcggcgctcaccgacggccaacccgaaaacgtgaacttgacgggtggctactacgacgccggagacaacgtcaagttcggtttcccgatggcgttcagcgtcaccctcctgagctggagcgccgtcgagtaccgcgacgaggtggcggcggcgggtcagctccgccacctccggtccgccatccagtggggcgccgacttccttctccgtgcccacaccacgccgaccaccctctacactcaggttggcgacggcaacgccgaccaccaatgctgggagcggccagaggacatggacacgccgcggacgctgtacaagatcacccggagctcgcccgggtccgaggccgccggcgaggcggcggcagcgctcgccgccgcgtacctggtgttcagggacgaccgggacaagaccttagccacgcagctcctggccgcgtccagatccctattcgacttcgccaacgactataggggatcctaccagttgtcctgcccattctactgctcctattcaggctaccaggacgagctccagtgggcgtcggcatggctctaccgggcaaccaaggacagcaagtacctcgacttcctgcagaacaaccagggcggcagggccaccgagttcagctgggacaacaagtatcccggagctcagctgcttgcaacacaggagtacttggctggaaggacagagctggaaggctacaagaggggcctggactcgttcgtctgcgccgtgatgcccaacagcggcaacacgcagatccgcaccacccctggagggcttctcttcacccgcgactccgttaacctgcagtacacaaccaccgcgaccctgctgctgtcgatctacgcgaaggccctcctcgcttctgcagcaggagcagtccagtgcagcgccgcgagcttctctccggaccagatcagttcatttgcgacgtcacaggtggactacatcctgggagacaaccccaggagcgcgtcctacatggtcggcttcagctccaagttcccgaggcgcatccaccaccgcggctcctccattccgtccatcaaggtcctcccccggaaggtcacctgcagcgagggcttctcgtcgtggttcccgacggccaaccccaaccccaacttccacgtcggcgccatcgtcggcggacccgacgggaacgaccagttcggcgacaacagggaggactccacgcactccgagccggcaacgtacatcaacgctgcatttgtcggcgcctgcgctgctgcactggggcgcagccagcaggtgcctgtggacgaaacagcctcagcccacagtgatgttatgtaactagctacaacggaggagtatgcaagggcgggcaaccaaaccatgatatcgctttgtgtaacatcccaaggcccctaccccccactaccactcttgatcatcctgataagaagagataaataaataaataaataaataaatac

SEQ ID NO: 34642 - DNA, 1187 bp, Zea mays
  Clone ID: UC-ZMFLMO17300B05_FLI
gagcgcctccttgagtgcaacaagcagaccagggtcttcctcaggtaatgttcctgggataagccgtgccacctcattgtcctcaagttcggttccttcaatgagccgttccagctcacgatcatctacacctacacgacagcctgcaattcgctcatcagctccagctattggtcgttctccttctgttggacggacttctagcatcaacagctttacgacttcgtccaggtctgcagccagtactggcaggaactcagcaccttcatctgctccatcatctcgtccaagttctccaaacccacgaccccgagctccagtgcgacctcttgatatccccgattttccaaatgaaactccaccaaatctaaggacaaaattacctgaaagaccaccatctgctggcagatcacggccaggaatggctttaggcataagatcaaccccaaatactgaaccttcagctgcctcagctcctgtgaagaagatctctgtgcctgctgtgagccgaagtaaattttctgatgcatcatcaaagacctctactctcacaaatggacaccaaaatcgacaggctgacaggtccaatattgacagtcaagctaatagaccctcgagaccttccacgggtaccacagataatggatttgggaggtcgatatcaaggaggtcacttgacatggctatcaagcacatggacattcggcagaacttgggtggcattcgcggcacatccctgtttccccagagcatccgctcggctgctgccaaggtccgtccagctcgggcatcagacccagggcatggcatctcaaacggggaccagcgctacagtgacaatggaagcagcgtgaacggacacctctccggggactcaaacggggttctctcacgtaatggtggcagctcaaccgattcgccagacagggggagcatcgggaccaaggagaccctgagcgaactggacatctatggtagctcgcgctatgaagcgatgcttctcagggaggacgtgcggaacacaaactggctgcacgggcttgatgacaagcccgaccaaagccccctgttcgaccaccggttcgagccgctgccggagcccttcagcccgttatgacagctgctgcttgtaaattatggtcatcactatgattgactggtcgggttttctgtccttttgtgctgtc

SEQ ID NO: 34643 - DNA, 2917 bp, Zea mays
  Clone ID: UC-ZMFLMO17310D02_FLI
cccaactctcttcctcctctccctccccacaccaattcccattcccaattcgccctcctcaaatccggcgcccgcattcccgaccaccccgcagatctgggatccgccaccgccggatccctcgctgcccgcggcgccccgggacgcgcgtgatcctacccacaaccgtcaagttggcgccccagcgaaggtcgcagcgcctctccggcggcggcgcgggctccgccgccgcgcagccgcccggagcctccggcgcacaggcagcgatgggtgactcaggcgacgccgtcatggcgcgctggctgcagtccgcggggctgcagcacctcgcgacctcctccgccgctggtgctggcggtgccgactaccgcggtgggatgcctgggcttgggggctctggcgcggggagcatgctgtcgagcctgctcatgcagggctatgggccagaatcggttgaagaaaagcatagactttatactcttctaagaggtttaaattttaacggagagtctgcacccacatcaatgtctgagccttacacaccaacggctcagagctttggtggtgggaaccctgtggaggggttttattcacctgaacttagaggggaacttggtgctggacttctagaccttcacgctattgatgatactgagcttctgtctgaggatgtagcatcggaaccatttgagccatcaccttttatgccaaaggatattgatgatgatgatgaggacgtgatatcagggagtcaacaagcaccattagataattatggtttagtgaccagtgaaaaagagagcactactagagaaaataatgttgcaaagattaaagtagtggtaaggaaaagacctttgaacagaaaggagctatctcgaaaggaagaagacatcataaccgtgcatgattcatcatgtttgacagtatacgagcctaagctgaaggtggatttgacagcttatgtggagaagcatgaattttgtttcgatgctgtcctggacgaacatgtttccaatgatgaggtttaccgtgaaacagttgagcccataattccaattatatttcagagaacaaaagcaacatgttttgcttatggtcaaacaggcagtggcaagacatacacaatgcaacctttgcctctgagagctgcacaagacatggttcgtctattgcaccaacctgtctatcggaatcagaattttaagttgtggcttagctatttcgaaatatatggtgggaaactctttgatcttctatctgacagaaggcaactattgatgagggaagatggcaagaaacaagtttgcattgttggtctacaggaatttgaggtttctgatgttcagattgtcaaggaatatattgaaagagggaatgcagccaggagcacagggtcaacaggggccaatgaggaatcatcaaggtcacacgctattctgcaactggctgtgaagaagcatatcatagtaaaagataccaggagacagagagatcgtgatgctaatgaagctaaaaatacaaaggctgtggggaaaatatcatttattgatcttgctggaagtgagcgtggtgctgatactactgataatgatagacagacaaggattgagggagcagagataaataaaagtctgttagctcttaaggaatgcattcgagctcttgataatgatcagatacacattcctttcagaggaagcaaacttacagaggttcttcgtgattcatttgttggtaactctaggacggtgatgatttcttgcatttctccaaacgcaggctcatgtgaacacacactaaataccttgagatacgctgatagggtcaaaagtctttccaagggtggaaacacaagaaaagagcagcccacaggaccaactaccacttctagccgggagtcttcgtcagctccatcatattcattgcctgctgaagctgaagaaattcctaaccagattcaagagaagagaccagttgatacttatcggaaaggcactgaaaattttacctccaacccttccgcggagcctgatagaaattccttcagtatggttccaaattattctaataaagggagagaagacaatggtgcagcatctggtaatgatagggagaggtatgatttgaagtccacccaaactgcttacactagtaaggcacagttggttcagaattcaacaaacacacaggaggagaaagtcacaaaagtctcacctcctcggagaaaggcttataaagaagacaaatctgatcggcagggcaactacgtgaaaaaggataatggtcctgagacaggtcggactgggtataagatacaacaggcaaagcagctgcaacagcagcaaaggccaacatctgcttcagcttcgtcaaggcaatctgaaaaggaaagttcttgtgatgatgtagaaattgatgcaattcttgaggaagaggaggccctcattgcagctcacaggaaggagatcgagaatactatggagatcgtacgggaagaaatgaaccttttggcagaagttgatcaaccaggtagcctgattgacaactacgtgacccaactgagctttctgctgtcacgcaaggctgcaggcttggtcagcctccaagcacgcttggcacggttccagcaccggctcaaagagcaagagatccttagccgcaagaaacctcccagatagtatgatgatcagcaatgactctgtccttgtgccttgtaatctgattgcttggagctcagttgtggtccatcagctgttttttacgtgtgcgctccagtaaattctatagccccaagcaggccaagacatgtgggagtggcttagggcggtcttgatgtcgagggcgtggtcctggttgatatcacctgacactttttgtcagggccgataaccagtttggtaatagtcctttttct

SEQ ID NO: 34644 - DNA, 1441 bp, Zea mays
  Clone ID: UC-ZMFLMO17310D05_FLI
ccaaacttgttttgatgatcagcttctagggagccgtatcaagaatgaaattattgagaagaggcagttagttcgtgttctattgaataatgaggataacaagccatcttcatatgagcctttgccttccatgtgcgtggcttgcggagcttctacttttgaagtctggataaccgtgccaaaatgggcagcacaggttttgaaacatcttgcgccagaaatctcctacagaagcttggttgcacttggaattgcttgggtaaatggtacaccagtgtcctcatttgataggcaggatgcagaccggcttcttttcttttgctctaaccagtgcggagatcaagctattcaaaatggctcatatgctcatgtatccagctggtcagcaccccttaccaaggatagaaccactggaagtctcgagtcaaaacagatgtcatttggtgcaaaaggagttgtaggggataatacgatctccctatcatcattgaaaccaaggttaaagcctgcaacaatgagaccccttccccactctcgcaagcaacaaatgcatccctttatggggtttcctcagtccatcattcacgatgctagtcaagttaagcctagcttgccagcccctcctgtgaagcacaacgcagtacctgttaccgcagtgacaccgagaaaatcatcatctgggtcaccatcatcctggtcacgtgttcagctaccaatcccattgaatcctctgccaataaagaaacatgagtgcaatcggttgcctatccacatttgctctgaagaagacttcttgaaagatgtcatgcagtttctacttcagaggggccacatccgacttgtacctcagggaggactggcagaatttcctgacgcagtgttaaattcaaagcgtcttgatttatataacttatacaaagaggtggtataccgaggtggcttttatgtaggcaatggcataaattggaaaggtcaaatcttttcaaagatgcacaaccatacagttacaaacaaaatgacgggtgttgggaacaccctaaaaaggcattatgagacgtacttgcttgaatatgaacttgcacatgacgatattgatggggaatgttgcttgatttgccacagtggtgctctgggtgactgggtgaactgtggattatgtggagaatgggcccaccttggctgcgatagacggaaagagctaggcactttcaaggactactcgaaggcagatgggatggaatacatatgtccccagtgtagccttgcgaaatacaagccgccgttgcctgcaccatgaaatatgttgattaacttctgttactttcttaagggtgatggtttggatagaaattagtggctaaggatgtgtagtgttgacctgtactattgaatatgatcctgtacgatttgtacattttttttataaaatttctgatttccg

SEQ ID NO: 34645 - DNA, 1416 bp, Zea mays
  Clone ID: UC-ZMFLMO17310D06_FLI
gatcgcaccgagggcgaggaggcaaaggaataacctgtgaagctgctgccatccactcatctttctgccgtccttgattgcagtcattcctcccccaagtccatagagaatggaggataatctaccagttaatgtccgggaatatcaagaacttgctaagaaagcactaccaaagatgcactatgattatatcaacggaggagcagaagatgaatatacactgagggagaatattgcagcatatggaagaattctgttacggccacgagtccttatagatgtgagcaagatagacatgtcaacaagcttattaggatacaatatgccatcgccaataattgtcgcacctacaggggcacacaaattagccaatcccgaaggggaggtggccacagcaagagctgccgcagcatgtaacaccataatggtgctttccttctcatcaagctgcaggatcgaggaggttgcctccagttgcgacgctattcgcttttatcagttatatgtgtacaagagaagggatgtttcggcaactttggtacggcgggctgaaagtttaggattcagggcaattgttttgacagttgacacgcctgtgcttggcaggcgtgaagctgatatcagaaataagatgattgctccacctctgtcaaaccttgaaggtttaatgtcattagacgactttgacgatgctgaaggcggctccaagctggaacgattctcacgggagacgctggatccatcattgtcatggaaggacgtggagtggctcaagtccatcaccagcctgccgattctgctcaagggcatcgtcaccgcggaagacgcgaggaaggccgtggaggcgggggcggccggcgtgatcgtgtccaaccacggcgcccggcagctggactatgcgccggccaccatctcggcgctcgaagaggtggtcaaggcggtggcgggggctgtgccggtgctggtggacggcggcgtccggcgcggcaccgacgtgttgaaggcgctggcgctcggcgccaaggcagtcatggtgggcaggccggtgttcttcgggctggcggcgcgcggggaagccggcgcgaggcacgtgatcgagatgctgaacaaggagctggagttggccatggcgctctgcggctgccgtagcgtcgcggaggtcaccagggcgcacgtccagaccgagggcgaccggatcagggccctgctgtgacgtataaataagcgaccatatccgaggccgaccaccgtgctgtcagggttgcgatatgatttatatgatacgtgagggcatgtgatgtgacatccattgttgcctccacacagataagcttattactattgccagagcctgggctggactatgctttcagtgattatctaaatcaaatagactgaatgctaaagggaacatcc

SEQ ID NO: 34646 - DNA, 1104 bp, Zea mays
  Clone ID: UC-ZMFLMO17310D11_FLI
cttacatcggtctttgaaattattgaccgggagccaaggattgatcctgatgataccactggcttgaaaccacccaatgtctacggaagcattgaattcaagagtgttgatttctcttatcctgctcgccctgacattcttgtgctgagtaattttaatcttaaagtgagtggtgggcaaacagttgcagtggttggggttttaggatcagggaaaagcacccttatttctttgatcgagagattctatgaccctgttgctggccaagttctactggatggtcgagacatgaaatcatttaaccttagatggttgcgcagccacatgggcctgattcagcaagatccagttattttctcaacgacaataagagagaacattatctatgcaaggcacaatgcaaccgaggctgagatgaaggaagctgcaaggatagcaaatgcccatcatttcatcagcagcttgccacatggatacgacacccatgtgggaatgagaggggttgatctgacacctggacagaagcaacggattgccatcgctagggtggttttgaagaacgcacctatattgctgttggacgaggccagctctgcgatcgagtctgaatcgagtagagtggtgcaagaagctctagacactctggtcatgggtaacaagacaacgattctcattgcgcacagggcggcaatgatgaagcatgttgataacatcgtcgtcttgaatggcggtaggatagttgagcagggcacacatgactctctgatggaccagaacggtctatatgttagattgatgcaaccccattttggcaagggccttcgccagcatcggctaatgtaattattcttttgagtttgtttaggtgtaaattatcctaggggatgatcaggtttccttgtgcggccactcagtcaggggcccttttcggcacatgaaaaatgctgggagttgccgccctgttgctgttccgagtaagccgacctggtcttcttgacaaaaaaataaaaaaaaatagcttgcagatccaagtaattctggaaatagttagcaagtttggagggcattgtaattgttgtaatatatgagctgaaacattctttc

SEQ ID NO: 34647 - DNA, 1647 bp, Zea mays
  Clone ID: UC-ZMFLMO17320C05_FLI
agccagaggtggctgctgtaggaactgtggctgccaaattagaggatgaaaccgatcaagatgagaatgcctgtttccaggaagctgatcaattcaaggatgccgagctcgaggtctccaatctgctggacaaggacaccccgatgcttccttgcttcctcccctcgccctcagaagccattggcaccgatggaagcagcacaacctgcggcgcgggcggcagcgtttccaattccatcgtgccatctacaaccaccaacaccttcgccggtctgttcgcgtccgccacaacgagcaccacttcccagagcagatctctgcgcgacctcatcggtgtggatcccaccttcctttgccttgcgatcggggcgccctctctgttcccgcagacaagcgcaagcaactcaggcaccttcgctccgcccccggcgccacacatgtccgcgacagcgctcctgcagaaggcaacagaggctggagcgacgcaatcgagctcatcgttcttgaaggagtttgggctcgcttcttcgtcatcatcgcctcgaccaaagcagcagcaaccccatggaagggttgctgaaatcagcacggacccatggcagtaccggagcagtaatcagcaaatggagatggagcgccaccagagccatcaacggagggagatggagtccagttcgcaaccatggcagcacccccgtagtacccagcagatggagatggagcgccaccaccagcggagtcatcaacagagggagatggagtccagtttgcaaccgtggcagcacccccgcagtacccagcagatggagatggagcgccagcaccagcggaaccatcggcaaagggagacggagtccagctcgcaacaatggcaccaccaccaccaccacccgaatgaccagatgatggggctggagagctaccggagtaatcagcaaaggcagacggagtccagttcgcagcggtggccgccgcacaggagctaccagcaaatggagatggatcccagttcgcagcaacggtgggcgcagcaccagaggagcaaccagcagcagcagcagatggagatgatggagcggcaccacctgagtaaccagcaaatccggagtacccagcaaatggagaggagggcgatggtatccgggggtggtctgggacttggcctcgcatacgaaagtggaaacccaggcttgcccttgcccgacctgatgacgggaccatcgccactgttgggtcctaagcctgcgacgctggacttccttgggctcggcatcggaggagggaccatgggcggctccacggccagccgcggcctcccggcattgatggttggaagagagctggacatggggccttcggcacaggtgcctcctgctgctgctgcggcgccgtgggaggacgcaaagaggaagaccaacggccgcacgatcctgtgactgtgaggttttctccccccctttcttctctctctgtaatgcctcggcttgcctgcccattctttcagtcgcagctgtgcttttggtggagctagtagaagaagctcggtcggtaacatgcggacctgtacatagctagctcgatgcatctcatcccggttctggaaaaaaaaaactccgcccccgaattgaagctgttattattatagcc

SEQ ID NO: 34648 - DNA, 1302 bp, Zea mays
  Clone ID: UC-ZMFLMO17320D06_FLI
ctctgacataggaattccggtgtcccacaattctacagaagttgcactaacctactatccaatatttgagttgcttgctgttcaccctggtcgtctcatgccaagttcactatcatgttcattgacatggccactttcaatacatctacaacagcatcctgtacgcagcggtgtgcccctgctactgcttgtcacggagcaatgtataggtaatgttgctagagaaggagcagagctgagaagcacattactggttccaggtgctttgtggcctctggcccgttcaatgctgtcaaataggggctttacaacaagaactgctgtttgggcactgtcaaatatagcagcgagcagttttgagcataagaaactggtatttgctagtgaggtgactcaaaatgaagctgctccattggctgcaaaatatcgcagacaaggatttcaaactctgaagctcaagattggaaataacttcaattcagatatagaagttctggcatctatacgactcgaccatccagattactcatttattttgcatgcgaatgaggaatacacatatggttcattaaatttctttggtctggatacaaatacacagtatgatatggtttgtccctactgtgattctgggttcgtggctgaattggatgatgcaaatgctctcatgagccacttcgatgggatggaccctgatttccatcgtgacccaaggttcgggatcatggaggtaatctctgtcgtgatgcagcatgatatggcaaggatgaacaaggaggttgatgtcacaggaaggccgaacttcttttcagacctggagatagagtttgtgatcaaaattagggacagtccacccatgtcattggaggctttgctggaaacaatcagctgtctgtcagttcataattttttgtcatggtttgggatcccggtggaattgatgccatgtatcggcttgagggcaagccgatttttaagaaggggggaatgttagggaatgtgagcacaaagcccatgccggcccattttgctaaggaaaagactacaaaggagcagcgcagtctcaggaagggggatcgattatttcagaaaacacagacctccttccttcagattccagaagccacctcttctactgttcttcttcttcctctgcgcagtgatcttcttcctgcagatctcctcatgaatatctagccctcttcgattcccttgcttctctacatatctcaaactctatttcatcccatacttgtatcagtcactattatttcagttttactggttgttgcattggattag

SEQ ID NO: 34649 - DNA, 1341 bp, Zea mays
  Clone ID: UC-ZMFLMO17320D12_FLI
gatctatcagaagttcagaatctatctctctgctcctggttcaccattgcgcaaattggagcaagatgggaaggctagccctggctgtgccggtgatgcttctgctgcttgcacgacgtgcagactgacgctcggaattacagacggtctgctcccgaacggcaacttcgagcggagcccgctgccgtcgcagctgcgggggacccgggtggtgggcgcgtcggcgatcccgtcgtggcagacgtcggggttcgtggagtacatctcgtcggggcagaagcagggtgacatggtgctggtggtgcccgagggcgcctacgccgtgcggctcgggaacgaggcgtccatccggcagcggctccggggcgccgcccgcggcgcgcgctactcgctcacgttcagcgcggcgcggacgtgcgcgcaggcggagcagctgaacgtttctgcgtcggggcagtcgggcctgctggccatgcagaccatgtacagcagcaacgggtgggactcgtacgcctgggcctgggtcgccaacgccgacgaggtcgacatcgtcatccacaaccccggcgtcaccgaggaccccgcctgcggcccgctcatcgattccgtcgccatcaagacgctcaacccgcctcgtcgcaccaacaagaacttggtcaagaatggtgacttcgaggagggcccgtacatcatcccggggaccaagtggggcgtgctgatcccatcgcgcgtggtggaggaccattcgccgcttccggggtggatggtggagtcgctcaaggccatcaagtacatcgacggcgagagcttcgccgtgccgcggggtcggcgcgccgtggagctgctggccgggagggagagcgcgatcgcgcaggtcatccgcaccgtgccggggcgacagtacgtgctgtccttcaccatcggcgacgccagtaacgcctgccgcggctcgctcatggtggaggcatacgcgggccgggagtccaccaaggtggcgtacgagtcggcggggaagggcggcgtgaagcgcgccgtgctgccgttccgcgccgcgtcggcgcgcaccaggctcgtcttcttcagctccttctacagcaccaggagcgacgacctcagctcgctatgcgggccagtgcttgatgacgtcgtcgtcgtcagcgtgcgcacgaagcgcggctagagaagcgtgctctgtggagttggggcgtgccctgtgcgtgcgaaacggaggaatttttcatgctgctgtcatcgcacgggtactttactaccgtgtttgtaggtgctcgttgggggcatcagaaaattgctccaaccatcggaaatttgttgtgttagatt

SEQ ID NO: 34650 - DNA, 1705 bp, Zea mays
  Clone ID: UC-ZMFLMO17320E02_FLI
gcgcggagagcgctcgcgcgggcgcacacgcggaggggacgttcacaggagggggagggaggagatgccggggagccagaacggggggccgaggcctcggccggtcaaagtcgagaccatccacgatcttgcgcgcgccggcgacctcgccggcgtccagaggaagctgctggagaacccctccctcctcaatgacaaaaatcccatgtgtcaaacaccacttcatgttgctgctggctacaataatacagaaatagtcaagttcttgcttaaccagcaaggtacagaaacagttgatctggaggcaaagaacatgtatggggagactcctctgcatatggcagtgaagaacagttcttgtggatcaacaaatctactccttgaacatggtgcacacatagaagccaaagccaataatggcatgacaccattgcatttagctgtctggcatgcaattcaagctggagacttcagcacagttagcgtgttactaagctacaaccctgattgctttgtgaaagatgatgaaggcaaaatgcccttaaatcatattccaggaggagctggtagcgagaagctgctgaaactcctcactcatcatatggaagagcaaagaaaacggaaagctctcatgtcatgcctcgaagggaaagcaatgtcagagtttgaagaggcaatgtcacaaattgttggattgcaggagctaaaaatgcaattgcgccgatgggcacgaggaatgttttttgatgagaagcgacgggctatgggcttggggattgctaaaaggagagctccccatatggcatttcttggcaatccaggaactggcaaaactatggttgctcgaattcttggaaagctcctccacatggttggaattctccctactgacaaagtaactgaagttcagcgaactgatcttgttggagaatttgtggggcatactggaccaaagactaggaggaagatacatgatgcagagggaggtattctcttcgtggatgaagcttacaggttgataccaatgcaaaaatccgatgacaaggattatggtttagaagccttggaggagataatgtctgtaatggacagtggcaagatagttgtcgtatttgctgggtactgcgagccaatgaagcgagtcattgcctcgaatgatggcttctgcaggcgggtcacgaaattcttctatttcgatgatttcagtacgacagaactagcagagatcctacatatgaagatgaagagtccaagtgactgtagcttgctttacgggtttaagctgcacccaagctgcagcattgaagccattggagagctgattgccagggagatcactgaagagcagaggaagcagatgaatggaggccttgtagacacgctgctcatcaatgcccgcgagaacctggattcgcggcttgatttcaactgcaacgatgccgatactatgatcacgatcacgttggaagacctggaggcagggcttcgtcagatttccagacaacgtcacctgcagtgacatgtaatttaggagaattttttctcgatgatctcatgcttgtctccaagggcgaagttatggctgtatcgtctaatccaacgtttttggcttttctgactgtgttgtatctagtcgttgctatatagcagtaaaatgcatgtggtatatacaattatacatcatgccctaacaatatttgacatc

SEQ ID NO: 34651 - DNA, 823 bp, Zea mays
  Clone ID: UC-ZMFLMO17320E10_FLI
cgctgcgacatgcgtcgggcagattctgaccaaccaaatccagaggaggctgaaggtttcgtcgacgcagctgctgtaccagtcgtcgccgtaccagtccgcggtgctgctcgtcaccgggcctttcgtggacaagctcctcaccaagcgtgacgtcttcgcgttcagctacaccacccaagtcgtggtgttcatcctgctgtcgtgctcgatcgcggtgtgcgtaaacttcagcacgttcctggtgatcggcacgacgtcgcccgtgacgtaccaggtgctgggccacctcaagacgtgtttggtgctctccttcggctacatcatcctcaaagaccccttcagcgcgcgcaacgtggtgggcatcctcatcgccatcttcggcatgggcctctactcctactactccgtcgtcgagagcaggaagaagaccgaggacgctagctcgctgccggtcgccgcgcagatgagcgagaaggactcggcgccactcctcggcgccaagagctcgccgcggacagagaacaaggccgaggaaaccttcgactacatgccgaggacggccaagagcgcgttcaccggccggtgagcgcgtagcttgtaaggagtacgtatctttctagagttgtgggtagacgacgagcaacaaggcgggaatgtgttagtgaaagatgtaacggcagcaagtgacattccaattatcatttttgcgatttctcctctagggcggtccgcgtggtcatggtttaccagagcataaacatcagaatgtgtggtcttgcccgagcttgaaatagtagattggattggtggtaatacaact

SEQ ID NO: 34652 - DNA, 1244 bp, Zea mays
  Clone ID: UC-ZMFLMO17320F02_FLI
cgctggcattgagccccagaatattttctgaggtgaataaattcaagccggacataatccatgccacctcacctggaattatggttctcggcgctctggctatagcaaagatgatatcagttccaatggtgatgtcttatcacacacatcttccagcgtacataccgagatacaatttaaattggttacttgagcccacgtggagttttataagatgcctccacagatcagcagatcttactctagttccttcggtagctattgctgaagacttcgaaaccgctaaagtagtaccagcaaacagaatacgtctttggaataagggtgtagattctgaaagctttcattctaaatatcggaggcatgaaatgcgtgtcagattgagtggtggtgaaccagaaaagccattggtaatacatgtgggtcgttttggacgtgaaaaaaatttggattttctgaaaggggttatggagaggctcccaggagcaaggattgcctttgttggagacgggccatacaggtccgagttggaaaaaatgttcacgggcatgcctgcagtttttaccggaatgctccaaggtgaggagctctcacaagcgtacgccagtggagatgtatttgcaatgccttcagaatccgagaccctcgggcaagtagtgctggagtccatggcttctggagtcccagtcgttgctgctcgtgctggagggatacctgatataataccgaaggacaaggagggtaagacaagctttctgtttacacccggagatctcgatgagtgtgtgaggaagatagagcagctcctcagttcaaaagatctcagggaaaccattggaatggctgccagagaagagatggagaagtgtgactggagggcagcctcgaagaaaatccgcaacgagcactacagcaccgcaatatcgtactggcggaagaagatgggcaagactaactaggcctccttgtttccggattcttctgtcgctgccctctccaactagttgctgttaataactaaagaatttgtacattgtacccaaacagcttgcgagttttgtgtggctagctgcattcaattgtccacagtctgactgactacggcttgtatgcgattcatgtacatttagacagcacttaagattgccgatctgctaactcagaaggtttgacacaaatgctccgataatttttgacgtacttgtcgcatgtgctgatgtgcagtgtagaggcttgttgctgtt

SEQ ID NO: 34653 - DNA, 1595 bp, Zea mays
  Clone ID: UC-ZMFLMO17320F03_FLI
agctcagtcatgactgttgttacgagttcatcccctcgtccctttcctggaaacggatcttaggccgccgtcgctgtcgagtactccacgccgccgagacgtttcgtcgtcgcctagacattccacgccaccaccgagtactccatcttccctctcaggtacgagttcccatcttccgagtactcgtcgccgccgctgttttgcccttttccacgccgtcgctgctgcggcaggtactcccagagctcttcatctccatttccacggctcaggtaatccatggattccatttccacgttggcctctattgcttcgttctcctccacagaaaaggatgcaccgccagaaatggattccccccagaactggatgaccaagctcttgattggccctcgccggaaatggagtccccccaggcgcaatcaaccttatccctctcaacgagatagttgtcgacatcaatggaacatttgtgccttcactgagtgctcccgcgccaaccaacacaggcttctccctcaccattgatgaggtagacaacacttggttggaggcaccaccagcagctgaagcacccccttctctcgttactccccaggaacacggtcacttggtgacaaaacacagtttagattgtctgtctcatctcacgaaaaatgatttcgagggtatttcaccagatctccgatgggaggaagaaggacctcaacatgtaccaagtgagaaagtgatgtacctcaaacttggattagctgctaaggatgaacgcgaaaacaaagtagagaggatgcttgcaattatacaggtcatgcaaatattcgaaatgagttggaagatgatggttcagccgccttagattgtgttgattttatgccccacgagactagagtgttttatgactctaaccatccagtgatggaggttggcagcctatacgcatcgatgactgaattcaggcttgcaatgtggcaatatgacatagaaaaagaatttgagttaggcactgaggctagtactccgaagaaatacagagggtattgtcgaggtggcgactgtccatggagcatacatgcaagaattgagagggatggttcaccaaccataatcgtatgtttttatttgttcaccaaccatggagcatacatgcaagaattgagagcttgtatgaaaaaactaactccgaagaaaaagaagggatgtttgtaatttgtccccgcctactactatggatcaggtgtaatgtgtttctgtgtaatgtgtaaatggaactcagtctatggaattcagaatgtgtctgtgtaattggaacttgttttcagttcagtttgaatttcagaatgtgtctgtgtgtaattcggaatgtgtctgtgtgtaattttcagtttagttagggcacttgttttcagtctgaatttctgatgcaacttgttttcagtcagtctgaattcaataagttcagttcagttagtttagtaagtttagtctagtctgaacattctggcattccacacatttgctgacacattttctgtagccaagatgcaattttttcggaatggatttaacatgaactctgaaactgtgttttcagtctg

SEQ ID NO: 34654 - DNA, 956 bp, Zea mays
  Clone ID: UC-ZMFLMO17320F04_FLI
cagttgttggcagtgctctttcaaaaatccgaagcctggtgatgttgttgcacgcgtcaacattcttgctgctgaagggatacagaaaaattttgaaggcaaattggttggtgcagatcgtgctaaagatcttgctgttcttaaggttgatgctcctactgatctcttgaagccaattaatgtgggacaatcctcggccctaagagttggtcagcaatgcttagcaattggaaatccttttggttttgaccatactctaacagttggtgttatcagtggtttaaatcgagatattttaagtcaggctggggtgacaattggaggcggaattcaaacagatgcagctattaaccctggtaacagtggtggtcctttgcttgactcaaaggggcatatgattggtattaatgcagcaattttcacacagacagggacatccgctggtgttggcttcgctatcccatcatcaaccgtacttaaaatcgctcctcagttaatccagtttggaaaagttcgccgtgctggcttgaacgtggacttggctccagatccaattgcgtatcagcttaacgttcgcaacggagctcttatactcaaggtacctgggggcagcgccgcagccaaagcagggcttgctccgaccagcaggggttttgccggtaacatcgttctcggtgacatcgttgtcgctgtggatggcaagcctgttaaaggcaaatctgacctgctgagggttctagatgactacggtgtcggagaccaggtgagcttgacgatccggcgaggctccgagaccctggaggcgacgctgcctttagaagaggcagacatgtgaccagtttgtggaaaatagaacccacatataccgagctgtccacgactgtcgtcccattggaaacaattccatttcactaggaaatattgaagtgtcctttttcgctctggacattcccttc

SEQ ID NO: 34655 - DNA, 1310 bp, Zea mays
  Clone ID: UC-ZMFLMO17320F11_FLI
tgcctctctcgcccggaacgtcagtgggcgtggggaactacgttacccagctcggcctcggcacgccgtccacctcctacgcaatggtagtcgacacgggctcctcgctcacctggctgcagtgctcgccttgcgtcgtgtcgtgccaccgccaggtggggccgctcttcgaccccagggcctccagcacctacgcctccgtgcgctgctcggcgtcgcagtgcgacgagctccaggccgccacgctcaacccgtccgcctgctccgcctcaaacgtctgcatctaccaggccagctacggcgacagctccttctccgtcggctacctcagcacggacaccgtctccttcggctccaccagctacccgagcttctactacggctgcggccaggacaatgaggggctcttcggccgctcggcggggctcatcggcctcgcgcgcaacaagctctcgctgctctaccagctcgcgcccagcctcggctactccttctcctattgcctcccgacggctgcgtcaacggggtatctctccatcgggccctacaacacggggcactactactcgtacacgcccatggcctcgagctctctcgacgcctcgctctacttcatcaccctgtccgggatgtcggtcggcgggagcccactcgcggtctcgccgtcggagtacagcagcctgcccacgatcatagactcgggcacggtgatcacgcgcctgccgacggctgtgcacacggcgctcagcaaggcggtggcccaggccatggcaggggcgcagcgcgcaccggccttctccatcctggacacgtgcttcgagggccaggcgtcgcagctgcgcgtgcccaccgtggccatggcgttcgcggacggcgcctccatgaagctgacgacgcggaacgtgctcatagacgtcgacgactccacgacgtgcctggcgtttgcgcccaccgacagcacggccatcatcggcaacacgcagcagcagacgttcagcgtcttctacgacgtcgcgcaatccaggatcggcttctcggcaggcggatgcagctgaatagctgatgggtgaaaagtgaaaactgattattgagctctatggagtgggcagctcaagcttggtaatagaaaatgcgtacaaaacacaagtaaattcgctgaagtttatgaaatggtaatgttacaagctattgtattgttgattttacactcctggcaaattgtacatccttttacaggtaaattggagtgtctagatttttacatgtgtacggtcaaaaacagaaatctattttggatgatttggtctatt

SEQ ID NO: 34656 - DNA, 1058 bp, Zea mays
  Clone ID: UC-ZMFLMO17320G07_FLI
tcaggatctgacatttatggcaaaagagaggtcatacagaagctaagacagcacctcaagaaacgtgatgagatgatcatggagatgcaaactcagattgctgatcttaagaactctcttaacattcaggtgacacagtccagcaatctgcagtctcaattggatgctgccaatcgtgatctgtttgaatctgaacgagagattcagcatctaaggaagattattgcagatcattgtgtcacagaagcactctctcatgataaacctttgcaagctgcgcattggcagccagatgccgcaaatgggcattctaatggctatggtgatggttgtgttgatgatgctgacctgcattgtattagcatcgagaagaggaaggtagaagtagagagggtggagatgctcaagaaagaggtggttgaactgaaggaagtcattgagggaaaggactttgtgcttcagagctacaaggaacagaaggtggaactcttctcaaagatcagggagttgcaggaaaagctctcagcacaagtgccaatcatcttgtaggatctatctgtgatactttttagaagattgaatctaagcataatgttgccatgtcccatgagcagcagagggggtcccgcttcagtgaagattgcagaaggtcttggcatttggcaatcgtcacgcatgccaaacaccatgctaggatctttgtggaatgcttctcttttcctttgaggggagctttgcataatgttaggttgatttgtttctttcttggttgtcataatgttaggttggtttgctttcttccttcttcaatatctagcccttggttgctcaaagtttacaaagggattctttttttcagttgctaggcctcaggtaactcaattgaacttcatactcaagttgctgtacaggttctcagatttcaggagacacagaagtctgtactgtgcctctgcctcctgtttcatgctttttttttgttaagtgatctttggaatgttaggtccatgacatttctactatgagatttgaagactatggcattgcccttttttgtg

SEQ ID NO: 34657 - DNA, 2990 bp, Zea mays
  Clone ID: UC-ZMFLMO17321C01_FLI
cccgctgccgcctgccggcgtgcgtgacccgggtcccattccatatccggtgccattttttaatactactagtctcgttcgatcggaatcggcttcccgtcttggctgcatttttctatccccgcgtggccgcgtgtagtcctagtctctcgccagcaccatcatcatcaatcacggcggcgaccccgccccgcctcgatcgcccacgctgcccgactggaaccggacgctgctgctgctgctgctaggctgacagcgacgacgagggggccatggctcagatcttgctccacggcacgctccacgccaccatcttcgaggccgagtcgctctccaacccgcaccgcgccaccggcggcgcccccaagttcatccgcaagcttgtggaagggattgaggataccgtgggtatcggcaagggcaccaccaagatatacgccaccgttgatctggagaaggcccgcgtggggcgcacccggatggtctccaacgagcccgtgaaccctcgctggtacgagtccttccacatctactgcgcgcacatggccgccgacgtagtattcaccgtcaagatcgacaaccccatcggggcctcgctcatcgggagggcttacctgcctgtcgaggacatcctgggcggagacgagatcgacaagtggcttgagatatgcgatgagaagcgcgagcctattggggacagcaagatccacgtgaagcttcagtacttcgacgtcggcaaggaccgcaactgggccaggggtgtccggagcaccaagtaccctggtgttccttacaccttcttctcgcagaggcaggggtgcaaggttactctgtaccaggacgctcatgtcccggacaacttcgttcccaggatcccgctcgccgatggcaagaactacgagccacacaggtgctgggaggatatctttgatgccataagcaaggcccagcatctgatttacatcactggctggtccgtgtacaccgagatcaccttggttcgggacaccagcaggccgaaacctggaggcgatgttactcttggggagttgctcaagaggaaggccagcgaaggtgtccgtgtccttatgctagtgtgggatgataggacttcggtcggcttgcttaagaaggatggcttgatggctacccatgatgaggagactgcaaattacttccatggcacggacgtcaactgtgtcctgtgccctcgcaaccctgatgattctggcagctttgtccaggacctgcagatatcaactatgttcacgcaccatcagaagatagtagtggtagaccatgagttgccaaacgagggctcccagcagaggaggatcgtcagcttcgttggcggaattgacctttgtgatggaaggtatgatacccagtatcactccttgtttaggacacttgacactgtccatcatgatgacttccaccagccaaactttgagggtgggtcaatcaagaaaggtggtccgagagagccatggcatgatatccactcacggctggaagggccaattgcttgggatgttctttacaactttgagcagaggtggaggaagcagggtggtaaggacctccttgtacgtctcagggatctttctgacattattattcccccttctcctgtgatgttcccggaggacagagatacctggaatgttcagctctttagatccattgacggcggtgctgcttttggcttccccgagactcctgatgaagctgcaagagctgggcttgtgagtggaaaggatcaaatcatcgaccggagtatccaggatgcatacataaatgccatacggagggcgaagaacttcatctacattgagaatcagtacttccttggaagctcatatgactggaagccggaaggcatcaagccagaagatatcgattgtcttcacttgattccgaaggagctctcattgaagattgtcagcaagattgaggctggggagcggttcactgtttatgttgtggtgccaatgtggcctgagggtgttccagaaagtgcttccgttcaggcaatccttgactggcaaaggagaacaatggatatgatgtacactgacatcacacaagctctcgaagccaatggaatccaagcaaaccccaaggactatctcactttcttctgcttaggtaaccgtgaggtgaagcaggagggagaatatcaacctgaggaacacccagaacctggcactgattacatccgggctcaagaggctaggaggtttatgatctatgttcatgccaaaatgatgatagtggacgatgaatacatcatcattgggtccgccaacatcaaccagaggtccatggacggtgccagggactccgagatagccatgggcgcgtaccagccgtaccacctggcgactaggcagcctgcccgtggccagatccatggcttccggatgtctctttggtacgaacacctggggatgctggacgacgtcttccagcgccccgagagcgtagagtgcgtgcagaaggtgaacaagatcgccgagaagtactgggacctgtactcgagtgatgacctggagcaggacctcccgggccacctcctcagctacccgatcggtgtcactgccgacggcaccgttactgagctgcccgggatggagaacttccctgacacccgtgcccgcgtcctcggcaacaagtcggattacctcccgcccatcctcaccacataggctgcaggctgcaggcagcgccatggcttctctgtttgtgtttgagatactgaaagttcagatagcagtgtttttatagttattgagtgataataagtgcattgtgcatggtgggacgataggagttagagttgttcataaatcataactactatgtactgcaccagatgacgagattgtgttgccccttgtctggtgtagcttgtgtagctttctgcgttgcagtgctgtttgtaaaggcgacttcagagttcagaattaaaacatggttgttttttc

SEQ ID NO: 34658 - DNA, 1294 bp, Zea mays
  Clone ID: UC-ZMFLMO17328A04_FLI
gactcgctgcccttcggcctctccaacaagcccgccatcctcaaggtgcgggactggtacttggactcattccgggacatcagatacttccctgaagtgaggagccggaacgacgagctcgctttcacgcagatgatcaatatggtcaaggtgcggcataacaatgtggttccaaccatggccttgggagtgcagcagctgaagaaggagctgggccgctcaaggaaggttccattcgagttcgatgagatcgacgagttccttgaccggttctacatgtcaaggattggcatccgcatgctgatagggcagcatgtggctttgcatgaccctaaaccggagcctggtgttataggcctcatcaatacaagattatccccaatccaggtggctcaagctgcttgtgaagatgcccgttctgtctgtttaagggaatatggatcagctcctgatattaacatttatggcgatccaaattttacgtttccatacgtcacattacacctacacctgatgttatttgaattggtgaagaactctctccgcgcggtgcaagaacggtatatgaactctgataaagatgttcccccggttagaattatagttgctgatggagaagaggatgttactatcaaggttagcgatgaaggtggcgggataccaagaagcggcctcccgagaattttcacgtatctgtacagcaccgcaaagaatcctcctgagctagatagacctaatactgaaggggtaactatggctgggtatggtttcgggctcccgatcagccgactctacgctcggtattttggcggcgacctgcaaatcatctcgatggaaggatacggtaccgatgcttacctccacttgtcgcggctgggagattcagaggagcccttgccttgacgacatatttttgtggacctccagtaccactcttctcctgtaactatgtggctcgatcttcttgtaatccagtgctggcctcgacctatatatatatagctatagttggcctcgaccttatttcactgcctgctctgctgcattgtgaacacagcactgctacgtcctgcttacttccgccatgtactatgatctctctgccggccttcaacaggaaaaaagaaaggacgagggaaatcatggggagcagctaggcggatgagcgcattctcggtagctgctaatctcattttcatagctgcgtctcttgtgttgtacattacatagtctggatttgagcttttgctatggcaagtatcacatgttacctgggtaattgagaaatataagt

SEQ ID NO: 34659 - DNA, 899 bp, Zea mays
  Clone ID: UC-ZMFLMO17342H10_FLI
ggccgcagcacatcgctctcttgatctcagccatggcggaggtggagcagcaacaggacacgccgaagctcttcaaccgctggaccttcgatgatgtccaggtgaacgacatctcgctgaacgactacctcgctgtgaacgcgacgaagcacgcgatgtacctgccgcacaccgcggggcgctactccaagaagcggttccgcaaggcgcagtgcccgatcgttgagcgccttacaaactccctcatgatgcacgggcgcaacaacggcaagaaggtcatggctgtccgcatcatcaagcataccctggagatcattcacctgctcaccgatgccaaccccatccaggtcgtcgtcgacgcgatcatcaacagtggcccccgtgaggatgccacccgtattggttccgctggtgttgtgagaaggcaggccgtggatatctcacccctgaggagggtgaaccaggccatctacctcctcaccactggtgccagggagagtgctttccggaacatcaaaaccattgccgagtgccttgcagatgagctgatcaacgctgccaagggctcatccaacagttacgccatcaagaagaaggacgagattgagcgtgttgccaaggccaaccgttgaacggagcttgtatcctggtgcactctgcgctggaaacttttatgttgctggcagtcgtatcggttcctgttttaccaatgtttagagttttttgagacctatatgcggttttggttttcagtgcacaattaaaattactgagtaatgtagttgattgggaacagaaagtgcctggtttaccgaactccatttctcttgtcatttttctttattctgtagtctgtattatgtatgcgtatgagtattgagatgattctgcatttgaat

SEQ ID NO: 34660 - DNA, 1518 bp, Zea mays
  Clone ID: UC-ZMFLMO17342H11_FLI
atcaataaatcatgtactttcttatttcataaacatgaataaatatccacaatatttatattacattgataccttcggcttgtcagaaggtgaaaatgtgagtgacgcgagagcgattacaatgcagtgtgaacagtacgatgctactgttcatctatttataggcacgagatacaacccgagcaaaattacattcatatccctgacatttactggtaatcataaggcgagctatcaagggctaagtagtcttttcccttttaggtcggtttcatcttccaccttcatcatcatactaagccgaaggtccttcggccacagcttcgacgctcgttcacccttccttcagaccgcaccttcatacacgcataccttcgtctcaaagccgaagcctcctgtaacagtctatgttatactgaaaacatgttagttacgtttttgaggaccttcggaagaggaaggcccccaacagtagcccctcgcagtactaatttgtttctattttaacaaattcagactgcgacgtgaacgaaggcctttagccgaaggttcgaaaaaacaccttccctttgctagaatagcgaaagacactgacatatagggcccaccaagctgtggtgtgctgggcgtataaataaggaggcacattgatagcgtttgatgcgccatttcaactgcttgtgctattttttcgagcttggattttcttgctctgctagattttgattgatttgtgagcttcggcatttgcacaagttctgactaaatggctaaagagaagaaggttgttgaccctgcactagctgggttttacgaggctatggagaagacaaacacatagaagatcaccaatgaaatgctagctgggttgtctgaagattctggcgatagtgaaagttttgatttggaaagtggaaacgaagatgctagctaggttgtctgaagattctggcgatagtgaaagttttgatttggcggccgagtcataccatcttcagaaagtcgtccatcaagcaaagtcagatttatgctatgaaagggagatatttccgcgatatttcaattgtgagggctggaggagatagcaccgtccctgcgtccgaagtagacgaagttgttgtctatatgagattcatgaaggcagggcttcggtttcccttgagcagatttttagtagaggttctgaagactattgaaattttccttcattagattactcccgaagctatcatcacgatggagatttttatttgggccatgaggagcaagagactagagccgagcgcaaaatgtttctgcaacatgcacgagctatcctatgagacgaaagctactggcaaggagcattatcacaataattttggttgttacggcttcgtgccttgctctgatatgagctatccagttcagacttttcggaagaggtggccaggagcctggatgaaagaatggttttatgtaaagaacaacttgattgaaagagaagatataaaggggatcatccaacaccctatttgg

SEQ ID NO: 34661 - DNA, 2165 bp, Zea mays
  Clone ID: UC-ZMFLMO17343A03_FLI
ggaggacagcggcggcatcagccgtgcgagtgcgagtgcgacgacgacgatatcgaagacgtgctccgtcgtcacctcctagccaacaagaagtacctgctgattctcgttggcatatcctccaagaccatgctcaactgtgtcagggcaagcctaccggacgacaacaatggaagcagggtagtgctcgtattggacatcgagaacgaagaggtagcgtggcatgctaatgccatgaacaagacgacgggcatcagccacggattaatccaccacttgaaccgtctggaccaagacaagagtgtggagttgttctgtatgagggccttgaggacaaatctgtcagatgaaaccacagtgaacagcatgatgagcaagtacagggaagttgtgtacaatataacttccggctaccctctggctatagtggttttggccggactcctacggttcaaggagaagccagggcaatggaacgcggtgctgcagcagctcaggacgacgtcgtctggaccagcagcagcagatcaagaagcgcatcagcaagacgaccaaggcggccataccgaggagaagacgatgagcgcccctacaagtacaacacaagcagccaacaaccagctgtccacaagaacgtcgattgagagggtcttctgggcaagttttgaagaccttcccaacgccctcaagtcatgcttcctctacttggctgctttccccaagggcaccttcctgtctaccggcagtatagtgcggttgtggatggccgaggggttcattaggccacagaagggcaagaccatcgaggagctgggccacgactatttcaaggagctggccttgagatgcctcgttcaggtttcagggatgaacgaggttggcggcatcaccaatgtcattgttcacggaaggctccatgggttcctgcactcggaggctcgtgaggccggcttcatcgacgtccatgacatgaacgacgtctttgtcccaccatcggtgcgccgcctctctttcatgagcttccaagacggatataccacattcactaacaggttctgtaagttgcgctccttcatatgctgggccaatgagaaagattcagacaatagtattggcagcagaggccgcgtgaacaatgaggaggaacgatggcatgatctcaacttcctgcatggttcagatttgcttcgtgtactctacatatcaggactaaggatcaaggggttgccgaatgaaattggcaacaagatccacttgcggtacttacgtgtaaacaccgagcacctcaaggagctcccggccagcattgcgaggctgcccaacctgcagacactggatataagggacaccgaagtcgaggagatccacccgtccttctgggagataaagacgctgcggcatgtgattgccaagaagctcacgctcctgccatctatcaaggaagaaatgggcgagctgcaaacgctgcgtggtgtaaagcccagcgaagaagaatgggatcaagataactgcccactgctcaagatgtccaaactccggtcgctggagctgcacggactcattggcgccagacacggtgctgcgctgatcactgccctcgggcaaatgcatctccttggccacttgaagctcaaaggcgacaagatctcttgctgcgtcttcaccggagaacgccttcgatatcttcagactgtagagctggatggaactgtgcaatggccgcctgttgctgagtttaatgatcttcgcttcgtccgtccaaaccttgtccagctcagcctgacaaatacaaacgatgcgccggaagacatccaacaggaactgagaaatgcaggctttgtccgctcctaccagcagcttcgacctgtttatcggctttcatacagacaaggaggcgcgcttgcgacaaaaccggagcagcagggtgaagcagggtccaacaaaatggaacagcagcaccaaggcgaggaagctgaagagtgatatggtgtcctggtttctatatctctagttgaatgtttctgtttcatgagacaatctgtttgtattttgttgtgatgacttgcttgcttcggatatgtgtatgttttatgttatgttttgttgctgttgtaatcatgaactgttttgtaaaataaaataaagaatgcttttgcattcagacc

SEQ ID NO: 34662 - DNA, 910 bp, Zea mays
  Clone ID: UC-ZMFLMO17368G12_FLI
gttgagatcaagaggatcgagaacaacacgagccggcaggtcaccttctgcaagcgccgcaatgggctcctcaagaaggcgtacgagctctccgtcctctgcgacgctgaggtggccctcatcgtcttctctagccgtggtcgcctctacgagtatgccaacaacagtgtcaaggctactgttgagaggtacaagaaggcacacaccgttggctcttcctctgggcccccgctcctagagcacaatgcccagcaattctaccagcaagaatcagcaaaactgcgcaaccagatccagatgctgcaaaacactaacaggcacttggttggtgactccgtgggaaacctgtcactcaaggagctgaagcagctggagagccgccttgagaaaggcatctctaagatcagggccaggaagagtgagctgctggctgcggagatcagttacatggccaaaagggagactgagcttcagaatgaccacatgaccctcaggaccaagattgaggagggagagcaacagctgcagcaggtgaccgtggcacggtcagttgcagcagcagcagctgccaccaacttggagctgaacccattcttggagatggataccaaatgcttcttcactggcggccccttcgcgacgctggacatgaagtgctttctccccggcagcttgcagcagatgctggaggcacagcagcgccagatgctcgccaccgagctgaacctcggctaccaactggcgccgcctggttctgacgctgccaacaataaccctcatcatcagttctaaactggatgcatgtacgagaagcttttcaagcgaactgtgaacggtggaagctggctgttgcctctagatgttcttggcttccatgacctagcttattgcggtgtgtattgttgttgcc

SEQ ID NO: 34663 - DNA, 3068 bp, Zea mays
  Clone ID: UC-ZMFLMO17370F01_FLI
cctgctcccgcccctcaatcaatcacgacgccacagccgcacccccgcgaaccctagctcgcagtcgcaccgcgcgccggacgctgaccaggtgcctgctctatctcctgcggtggccgtcgcgctgccgccgccagacccgatccgtccgaccgtgccaagcgccccccctccggcgatcgatgcgaggcgccgcgggaggcggctcgggctcgggcaggctgtgaggagcctgtccgctcgctgcgtcgtgcgcctgccttccctctcacggtcggcctcgccgcgcgtttgctttcccgcccacgcagggatcttcgcgggcggggagttgaagcgcgagatttgcgcggctacgattctgcgttgccgagggagcaagggaaccaatggctgcagcggtggcgatgcgagggggaagcagcgacagcggaggatttgacaaggttcccgggatggactcggggaaatacgtgcgctacaccccggagcaagttgaggtgctcgagcggctctacatcgattgccccaagccaagctcctcacggcggcagcaactgctgcgcgagtgtcctatactctccaacattgagccgaagcagatcaaggtctggttccagaaccgaaggtgccgcgataagcagcggaaggagtcttcgcggcttcaggctgtcaacagaaagctgacggcaatgaacaagcttcttatggaagagaatgagcgtcttcagaagcaagtctctcagttggttcatgaaaatgcgcacatgcggcagcagctgcagaacacttcattggccaatgatacaagctgtgaatcaaatgtcactgcccctccaaacgctataagggatgcaagtaacccttctggactccttgcgattgcggaggagaccttcacagagttcctctcaaaggctactgggacagctattgattgggtccagatgcctgggatgaagcctggtccggattcggttggtattgtggccatttcacatggttgccgtggcgttgctgcccgcgcctgtggtttggtgaatctagaaccaacaaaagtcatagaaatcttgaaagatcgtccctcttggttccgtgattgtcgaagtctggaagtgtttacaatgtttccagctggaaatgggggaacaattgaacttatctacatgcagatgtacgccccaacaactttagttcctgcacgtgacttttggacgttgcgatacacgacaacaatggaagatggcagccttgtggtctgtgagagatccttgactggttctggaggcggtccaaatgcagcttctgcacagcaatttgttagggctgagatgcttccaagtgggtatttagtgcgcccatgcgaaggtggaggttcgattgtgcatatagtggaccatctagatcttgaggcatggagtgttcctgaagtgcttcgaccactatatgagtcttctagagtagttgctcagaaaatgactactgtggcactgcgccaccttagacaaattgctcaagaaacaagtggagaagtagtgtatgccttgggaaggcaacctgcagttctacggacctttagtcaaagactaagcagggggtttaatgatgccattagtggtttcaacgatgatggttggtctgtaatggggggagatggcattgaagacgttgttgttgcttgcaactcaaccaagaaaattaggaataatagcaatgctgggattacatttggagcgcctggaggcattatttgtgcgaaggcatccatgttactgcagagcgtcccaccggcagtactggtccgatttctgagggagcatagatctgaatgggccgattacaatattgatgtgtatttggcttcatcactgaagaccagtgcgtgctcacttcctgggttgcgacccatgagattttctggggggcagatgatcatgccacttgctcacacagtggagaacgaggagattcttgaagttgtccgccttgaaggacaacctcttactcatgatgaagcccttctttcaagggacatccaccttctccagctttgcactggaatagatgagaaatctgtgggttcctccttccagcttgtgtttgcaccaattgatgagcattttccggatgatgctccattgatttcctctggctttcgtgtcataccacttgatatgaaaacagatggtgtatcctctggtaggacgctagatttggcatctagtcttgatgtgggttctgctgcaccccaagcctcaggggatgcacctccagatgactgtaatttgagatctgtgctgacaatcgcctttcaattcccttatgagatgcaccttcaggacagtgttgctactatggcccgtcaatatgtgcgtagtgttgtttctgctgtgcaaagggtgtcgatggctatatctccctcccaatctggtctaaatgctgggcagaggatgctttccggcttccctgaagctgccacacttgctagatgggtttgccagagttatcactaccatctaggtgtggaattacttaaccaatcagatgaagctggtgaagcattgttgaaaatgctctggcatcatccagatgctattctgtgctgctcttttaaggagaaacctatgtttacgtttgcaaacaaggcagggctcgacatgttagaaacatctcttattgcgctgcaagacctgacgctagacaagatcttcgacgagtcaggaaggaaagcaatattctcagatatctcaaaactaatggaacagggctacgcgtacctgccgtcgggcgtgtgcatgtcaggaatgggtcggcatgtctcattcgaccaagctgtagcgtggaaggtgctcggcgaggacagcagcgtccactgcctggcgttctgcttcgtcaactggtccttcgtttgacacgccatcccatggcctgtgtgatgagcaggccaatttttttgtatggtgatcccaatatggggaaaccatcagctgtgacagaaggctttatgttgcatgcactagttgtacgtcttgaatcgagtgtatttatgaagaaattggatactgcgc

SEQ ID NO: 34664 - DNA, 891 bp, Zea mays
  Clone ID: UC-ZMFLMO17371D02_FLI
ccaaattccaccgccagactttgagcatatgaatgtcacggtgcacgctctaaataacaactacattgtatatgacccgataaaaacaaaatccttgcaaaaattgcagtggatgtaaacaataagcaaagaattgagaccgtgacatgtaaggatagcctagctacagaaggcagagaagtagaattacaattacaacggaggcttgtgcaggtgccccatcggccatcgctagcagcttcactgtctctcttcgtccaccaaaaaacaattggagatccataggcaaggcagcatcaaaacatgcccgtccaaaagcacgggcagtgtagcctcttctataagcagatgttttgtaccatcctttaaaagaaaaacttaaacattgcgtataactaatctgatctcgggcgactcgagttcttgtaagaattcttgtacaatgggaggagggaaccctttacccgcttccttctgcggccgaagcacctccagtaaagaacccccaatgatagcattatgacaattgggatggcccatctgtccagatcaagaatagggctgtacacgatcatctcccaggaagaaacaatgatgtgccaagctggattataatacagtgattccgctgaccagaacattctcgtgtacgtctctaggaagataaacatcacccaagcaacaatttcaagtaggaagaacttgatgacaaagcgcccgatcaccaccatgaccaaagagaaggtcaccaaccaattgaaaagcttgttattgtactccttgatgaaaagagcacgagacttggcaagcatctttgacattctacgttcgtagctttcttttgcaggtcccacgcagtcctttacgaaactctggttgcagtgagtaaag

SEQ ID NO: 34665 - DNA, 555 bp, Zea mays
  Clone ID: UC-ZMFLMO17374H12_FLI
gggggtcaatgcttactttagctgtgcaataattcctcaatattaaaccgagtttgatcaagtaccttgaagctacaagtagcagtgatttgacaggtttactactgcctgaaacatgattgcaagtgttcttagtatatagctcttctccatttcctctccaactgtcacatgtgctcatacgcttttgccttagtttattacatgtccagaacaccaacataaagaaaacctgccctcgattagcattattcagtagagagagttgtggagaaataaagttaatttgtttgttggcgcaactaattagaccacgttttcattaacaataatactaacatgtttttgttgtagggagggcacattgcggcggctacgagagaccgattttcctgtgtggtggtgacaacgacaccgtggagccaagtcaatgtcggcaagctgatttttcagattggaacctatggttctttttaaagatcgaatatgttctagcatctttaaaagatttgtcagaatgtaaacatttgttttgaggtcatttaagcctcaaac

SEQ ID NO: 34666 - DNA, 1251 bp, Zea mays
  Clone ID: UC-ZMFLMO17375G09_FLI
ctcgccccaagcattcctgctttcacccggccgccactcttccccagtccccgccactcaaggaaggcggaggattttatctagtcttgcagcgcggccgtctccgtcccgccttctgcgcctcctgtggcgtttggagcatcttccaattttaagctgacactacttgaacttaatgcggctctacgcacctgcgctctgtctgctgcgatcaagcacacatccccaccctaatcagttccgtgcaggattcacgcagagcatggcctcctggaagtgctcgcactcgccgtcaagcccgtaccttgcgaagtcgggtttagtcgattcttctcttaacaggaatgtaaagtcttctcagccacaaagtataaaatactttgtcagcttaatgggccagcagttccgttgcggattgtcaaccagggagggtagcctaagtgtaaagcttgacattccttcacacgaaaaatcaaggataggctggaactggaaaaacatgcatcaaaagataggaggtgtagctggtggactctgctttggtttctcggttactggagtagcaagtgccgaggttcctatcattagagtcaaagacaatgccgagacttcgtcatcatctaccagttcaactcatggaaaggaagtgtacacagattattctgtcacaggtattcctggagatggaaggtgtttattccgctccgtggtgcatggtgcatgcattagatcagggagaccaatacctaatgaagatcttcagagaaaactagctgatgaattgagagcaacggtcgcagatgaatttgtcaagaggcggaaagagaccgaatggttcgttgagggggattttgatacatatgtatcccatattagggagccacatgtgtggggaggcgagccagaattgttcatggcgtcccatgttcttcagatgccaataacggtttacatgcgcgacgaggatgctggcggtctgatagcaatcgcagagtatggccagcagtatggtaaagaagacccaatccaagtcctgtatcatggttttggccattacgacgctctacagatcccagcaaaggttggatcgaagaggaaactgtagacgctgcgcgccgcgagcttgaggtacgctccttgttccagtgtttatacaaccttgtcgaacactcatgctatatgcatgcgagtgtggaagaagacaagcttaacatgaaatggcgttagttcgcgccatgcataaatgttatt

SEQ ID NO: 34667 - DNA, 910 bp, Zea mays
  Clone ID: UC-ZMFLMO17376E11_FLI
ggacactcctccatctcgtgatattttctctcttccatatctccccggaagtcgctggacatctcctaaataatcctcagccgttacttctgctagtccgtgccatgcttatactggtgatcaagatgcctatgtctccaccaccgtcgctcagctgcttgcctctatgttggctggccggatctactgtccgacgcgccactgtttgcactgtgcttaaggtcctactcaccggtcttctcgtcgacagtgccagtcgtgtctcccgctacgccgacactttttctccatcgctcgactccgtgctcagcgctctcaccatcaccgcgcctctcctcgccggtgttcgccgggcatacgctcaacctcgccaccgtgggacttacctcgcctccaaaccgtgttcgacctccagccatgtcaccatcgtgcccttcatccgttcgaaggtgaggcctcctagcttcgatcttcagtgagtgcagcaacttttattggtggccaatgtcgttcagtggttgtgatctctagaggacgaaatggttgtgtatattctagatcgagtataattgttgttgtggacttcgtatttggagtcacgccggtgtattgcgtctctggtcggaacttggaagtcgactagcggcttgcaccatcggcacaatcctgtggctatacgtgtgaatcgcagcgctgtaactagttgaaaatgaaggaactagatcatatagaatagtggagtgcagaacgtcgctcgccgggatctctgtatattggccggatttgattcgtcaccattttggcgaacctccactcgacttcggtattatgtaagcttagattcactccctgtaaggtttggttcattttggggcatattcatttggtcatcaaatatccacttaattat

SEQ ID NO: 34668 - DNA, 894 bp, Zea mays
  Clone ID: UC-ZMFLMO17295D11_FLI
aagatgtggaaggagcggggaaacttaaatgttcatgtggagaaggtgcatgtgaaggggatcataacaatagcaatatgtttgttttggatgctgatgattctataagtaggagagttttttgcaaaaacaaactgagcagacaataccatagttttataagaaacctatggtttacaaaacgacgtcgtgatcgtgaaagctttaccaagaggaggaaggatggagaagatatggatagcttgagaaatggaaacatgctaccttctttcaatctacctcaatctggaagggttatgtatttctggcctgaagtcattaagaggagattatgtagatctgattattttacatatcataatcatcctcaaatccgtttagtgacagcagtactgattgcacttgctgttctctgcctgctggtatctcatgtgaaatgaccgaattccgtgaatctagttttggttcacgttgtgttatatattaccacagtccacgctgtactcatagtgatcacgcttgtgctgtgtcatggattctggaggaccatcattgtttcaaagcatttcaatgttgtgctccaatgtgccatgccctacagatggtagttctggttgcttgcttgtcagtggcatgatctgtcataaaaaatattattcactaatccctgtatttattcagcaccaacacatgatgtaaaagtttttgctcatgcatcatatataactcagaattggcaggtcaacgagagtggaatttctggggtgcggttacctagtgttaatatattgttatggaagtgaaggtcgaattgaatagaaatgatccattgtattgaacctatagtttgtaactgcccctacctgggatattgtatcgaatacggtttcctgc

SEQ ID NO: 34669 - DNA, 1818 bp, Zea mays
  Clone ID: UC-ZMFLMO17295E02_FLI
cacttcttctactcaggtgcttttgaatggctcgcctggtaatcatatttttcatcggagaggtcttcgccagggagatcctctttctcccatgttatttgtgatggttatggatgtgcttagcagcttgttccgggttgctgaaaatagaggcttgttgcagggccttgggggagctgatgttcgcagtcgagtctccatctatgcggatgatgtggtccttttcataaagccaattgaagcagatctgaattgtgctaagataatactaaactgttttggttcggcttctggtctggtaaccaatatgctcaagagcagtgctattccaattagatgtgatggtcagcaggtgcttgctggttgcagtgtgctgcattgcagtcccgctgcgtttccttgcaggtatctggggctgcccatttctgataaaaaattgaggaaatgtgaccttaagttatggattgagaagattgcagatcgactgcctaactggaaggctcggttgctcaacctggctgggcggactgcgttggtgaagtttgttctatcggccattccgacttatcttcttattgcaatcaatgtccctcggtgggttattaaatcaattgataaaattcggcgaggatttctttggagaggaagaaaggaggttaatggtggtagctgtcttgttccatgggaagttgtcacgaggcctctgaggcttggtgggcttgggatccctaaccttaagctcaaaagctgggcattgcaggcaaaatggttatggttggaaaagacggatcagagcagaccttggcgtgggttgtccctcccagtgcaacgtcaggttagacagttctttgatttgtcggtttttaccattttagggaatggggctactactctcttctggtcggatagatggattcatgagaatactatccaggacattgcccctgaggtggtgggtatggttggccgcaaggcgtattcttccagaacggtggcacaggctctggataattggcattgggtcagtgatattcgtggtgctctttccttgagtgggttgcagcaatatctgttgttatgggatactttgggggacgttaggctctctcatgatgctgacagacatgtttggatgcactcatcttctggtatgttctcctcaaagttttgctataaggcttttttcatgggttcaatttcgtttgagccatggaaacgtttgtggaaatcctgggctcccccaaaatgcaagttcttcctctggctggcgataaggaataagtgttggactgctgatagactaaggaggagagggctgcaacatccggctgtttgtgttctttgtgaccaagagcaggaaacagtgcaacatcttttgtgtacttgcagttttgccaggcaattttggcatgctattcttgttcccttgtgtcttggggatctcattcctgctgttgatgaaatctcatttgctgattggtggaggaaggcgcttaagaaggtgcccaaattcagaaagaaaggcttcaacagtctcattattttggggtcttggtgcatatggctgactagaaacaaagctgtttttgatggtgtaaacccttccatgtgttttgttaaaagcttatttctgaatgagttaagttgttgggagagggctggggctaagcagctagcaagttttggtcttcctgctattatgagtagggtctagagtgtggtcaagtgttctgtttgccctacgggcattgtactttggtcctcttggaccttttcctttcttaatataatgacgtgcagtcctcctgcgcgttcgag

SEQ ID NO: 34670 - DNA, 2615 bp, Zea mays
  Clone ID: UC-ZMFLMO17295E05_FLI
ctctctccccacaccatgtgtgtgcccagattcccctaaataggtgtctcgcctctggcatcagtcccctcttccccttccttctcctcggtccctatccgctgctgcgaacagcagaagctgcggcacggaggtgcgctcttcccggcggtggagttgcagctgcagggggaagaagcgagctagagctgcagggatgataagcgccaagtccaacgccgccgtgtacccgtgcccggagtatgcggaggtcgaccccaccggccggtacggacggttcagcgacgttcttggcaagggcgcgtccaagattgtgtacaaggcgttcgacgagtaccaggggatggaagtggcgtggaaccaggtgaagctgcacgacttcctgcagagccccgaggacctggagcggctctactgcgagatccacctcctcaagacgctcaagcaccgcaacatcatgaagttctacacctcctgggtcgacgtctcccgccgcaacatcaacttcatcactgagatgttcacctccggcaccctccgccagtacaggcagaaacaccggagggtgaacatgtgggcggtgaagcactggtgccggcaaatcctcagcggcctgctgtacctccacagccacaatccgcccatcatccaccgggacctcaagtgtgacaacatcttcgtgaacggcaaccagggcgaggtcaagattggcgacctcggcctcgccgccatcctccgcaagtcccacgctgtccactgcgtgggtacaccggagttcatggcaccggaggtgtatgaagaggagtacaacgagctggtggacatctactcgtttggaatgtgcgtgctcgagatggtcacctttgagtacccgtacagcgagtgtacgcacccggtccagatctacaagaaagtgatctctggtactaagccagaagctctgtacaaggtgaaagatccaatgctgaggcgctttgtcgagaagtgcctagtatcgtcatctcagagactgtcagcaagagaactgcttgaggatcccttcctacagggcgatgacgtggctgtttctttggatggtggagattatcatgtaccgaccaagtacgtacggcagccttcatatctagggcatacctatagcaatggctccatggtgagtaatggattctcagaaagcatggatgaggacgctctgagtgaagactgcgaggatgatgacatgaaaggccaagatggcattgacctgttcaacgagaatgaggatgaacctcttggcaatgtggacataacaatcaaagggagaaagagtgaggatggaggcatattcctcagattgcggatttctgataatgatggtatgcacaatttgtaacgcataaacatctgaagtttggtccatatatgaaaacttatttttgatatttttgcaagctaatttttcaaattgcaggacgggtacgcaacatctattttcctttcgacgttgaggctgataccgcactaagcgttgcaactgaaatgatagccgagctggatataactgaccatgaagttactcggattgctgacatgattgatggtgaggtcagtgcattggtaccagattggaggcctggtccgggcatagaggaagctcctgacacttcatactgccataactgtggatccaacgtctcatcgtgcggttcactttacgcctacatgtcatcaggccgtcgaggttgccaatgtgcagagctacatgggcggtttgaagagatcacgttccaagccgatggagagcagtgtgatttgcaggaatcggcaggcagctctgacgatggaggtggccaaacagagcattatgtcaaaagcaacgagtccactcatgtgaatggcctcgtacagatgggaagaagagatctttctaatcagctttgcttcagttcattccaagagcaatcatgttcatataaccgttacgagaatgacactaaccatcatgtgaatgggttcgacataaagcatgaggtaaagatcgccaagtacaaagcacggaaaatggcacagtttaagagggctatccatccatctcttgacttcgacaatgcatatggagtaaataggggtaagccttcactgaacaagctgcaatctttccatgttggaaagaaccacaatttccgtgtgccaacctgtgatcgaagcccgggtaaagtaagcacagactatcattctgacttgaacagccaagtattgcaaagtaggcaccccgatccgggagcccaaagggcccggcattgtgaggtcaatgcagctgggagcagcacggagtgtatgtttacagggaggcgctactacaccggagctcagctgccgccgaatctcccaagaacaaaatctgtacccctgaatgctgtcgacgcctgaaatgctttcttgccatgtaaatttttatagagtgtacatttgttttggttccttttgtatccattatgaaacatcgttgttgggcaggagagactggatgtggattctggctgagctgtttgtaaatttttaatcttgtgaatccagagaggttaggctgtacaagtgcaatctacatcatttgcctcacagggacaacctgtttt

SEQ ID NO: 34671 - DNA, 1386 bp, Zea mays
  Clone ID: UC-ZMFLMO17295G02_FLI
gttcctccccactcactcctgcgcttcctcgccgcgcggttccttctccctgatcctcctttggcttcgcggttcatggcgatgtggagggccgccgctaggcagctggtcgaccgggcgctcggctcaagggccgcgcacacgtctacaggcagcaaaaagatagtcggggtgttctacaaggccggggagtatgccgacaagaaccccaacttcgtcggctgcgtcgagggtgcactcggcatccgcggctggctcgagtcgcagggccatcaatacattgtcaccgatgacaaggaaggccccaactgtgaactggagaagcacattgaagacatgcatgtcctgattaccaccccattccacccagcttatgtcactgcagagaggataaagaaggcgaagaatcttgagcttcttctcacggcaggaatcggctccgatcatattgatcttccagcagctgctgctgcgggcttaactgtggctgaggtcactggaagcaacactgtctctgtggcagaagatgagctcttgcgcattctgattctgctcaggaacttcttgcctgggtaccaacaggtagttcaaggcgaatggaacgtagcaggcattgcccatagagcttatgatcttgaaggaaaaactgttgggactgttggggctggtcgtattggcaggctcttgcttcagcgtcttaagccctttaactgcaacctgctttaccatgacagacttcagattgacccagagcttgagaaagaaattggggccaaatttgaggaggacctggatgctatgcttccaaagtgtgatgtgattgtgatcaacacacctcttacggagaaaacaagaggcatgtttaacaaagagaggattgcaaagatgaagaaaggtgtaattgttgtgaataatgctcgaggagcaatcatggatgctcaagcagtcgcagatgcatgttctagcggtcacattgctggatacggtggtgatgtgtggttcccacagccagcaccaaaggatcacccctggcgctacatgccaaaccatgccatgacccctcacatctctgggactacaattgatgcgcagctgcggtatgcggatggtgtgagggacatgctgaataggtatttcaagggcgaggacttccccgtgcagaactacatcgtcaaggaaggccagcttgccagtcagtaccagtgaccgcgcgagatgttgctgtgccgtgtaggcttttctggtgagaagctgcgaggaagaaactcctgttgcgtacttgcgttactgtatgagtagctctgagaaacctgtcagcggccacctgtaataaaagaatgccttgctggtatctcaccgtggagatcaataagtctcttttttttc

SEQ ID NO: 34672 - DNA, 950 bp, Zea mays
  Clone ID: UC-ZMFLMO17295G05_FLI
gctcctcgtcgttctcccgtgtccgccgtgcactgtctgtctctggtggcggcgactgggcggcctccgccgctgccctacgccaggatcccaggctgcatcttccgtacgccaggaggagggcctcgccgcaggttgggtgggaggcggagatgagccgggggcggtcgccggagccgctggatttcttcatctggactgtgcaggatgtagggttatggttggaggaaataaatcttggaagctaccgccaggcttttgaagaaaatggtgtcaatggagagtatctagaaagcctgtcggtgttcaccactgagcagattcttcgctttataagacgatgccatatgaaatggggagattttatcaccctctgtaaagagttgagacgcatcaaagttgcctgcctgaaaggggagcaggaggtccgcaggccgtggtgggcgccgtcatgcctgtcggtcgtgttcacgcgggtggccaggcacaaccggcagtcccgggtcgtttccttgaagctggaagcttagcaagttagcaggctcgccctcagccagtggaactggcagagtcccgcgtcgtctccagatgctggaagcttagtagcaggctcgccgtcagccaccttgcagtagcaggctcgccgtcagccaccttgcctcgcgccttggcgcgctgccgccatccccgtcgttccagtgtcgtagggcacacgagctagggcgcctctctctgtgtaccatatagcaagcagcaatgggtctcagtgttcttgaaaggtgctctcgcgttacagtcgtcgtgtgttggcatgcgtgtgttttcgttgatttgtttattttcttcacgtatagctaggggttgtgggtttgagttcgagatggtaagatgttgtaatgtagacgatgaatatacgtatgctttgcgtgttgtgcagatggctgctgttt

SEQ ID NO: 34673 - DNA, 1564 bp, Zea mays
  Clone ID: UC-ZMFLMO17295G12_FLI
gacccctgtcgcactcgtgtgccggccggcgacggcgatgatggcgactggcccatcgctcgccggggtatactccgctagagccacccgcctcgtgcctctacgcgccggcgcacgggcgccctgcgccggtgccgccgcggccgagcctgcggccgagcacgtgcggaggctcgtggcggagttcgacccggcggtcccgctggactccgcggtcacgccgccgagcgggtggtacaccgacccggattttctccagctcgagatcgacagcgtcttcttccgcgggtggcaggctgtcgcaggcgtgctagtgatccattcccatcactggatgagtggatgggaccgagagagcgagagggtcgggtttttgcactcgagacttatgcttccatggctttcgtctttcgacacgatttaggtggcgctcggttcagacgttgttaagagaatggtcacatatggcaagtgaagaacccaaatgatttcttcacaggaaggctgggaaatgtggaatttgtcgtatgtcgggatgcaaatgggaaacttcatgctttccacaatgtgtgccgacatcatgcttcactccttgcatgtggaagtggtcataagacttgcttccagtgcccttaccatggatggacatatggattggatggcacccttctgaaggctacaagaatatcaggaattaaaaacttcaataagaatgattttggtctcataccaatcaaggtggctacttggggaccttttgtgttgatcagatttgatgatgagtccactggagataatgtttatgacacagttggaaatgaatggttgggtagtgcttcagatctgttgggtacaaatggcattgacacttcactgccgcatatttgcaggcgagaatatattatcaactgtaactggaaggtcttctgtgacaattacctagatggtggatatcatgttccatatgcacatggggctcttgcatcgggtctgcagcttcaatcctatgaaacacttacatatgaaagagttagtgttcaaagatgtgaaagtgcaccagcagaaccagatgacttcgatcgcttagggacaaaagctctctatgcctttgtttatccaaactttatgatcaacagatatggtccatggatggacactaatctagctgtcccattagattcaaccaaatgcaaggtggtatttgattattttcttgacaagtctctgctggatgaccagtgctttatcaagaaaagcctcgaagacagtgagcaagtacagatagaagacattgcactctgtgagggggttcagcgtggcctggaatcgccggcctacagtgttggaagatacgctccgtctgtggagatggccatgcaccacttccaccgcctcatacatgctaaccttagtgagtaattattctcatggacgcatcttgcaaagttgtacagaaccaaacgcttttttttttggcaggacactgcatgaacactgttctctattgcaatcttgtgaattcagccacatttcagttacacaaaaaacatgtttgctggttatg

SEQ ID NO: 34674 - DNA, 2322 bp, Zea mays
  Clone ID: UC-ZMFLMO17295H04_FLI
catttctattctcctccccagccgccaggaagcaccggcgcctggccaacgccgcgcctcccttttcccttctctgtcttctgttttcgttctgtcagccgcgcagaacttcagccgccagggaactctggttcctggccgaccgagcccttcaactgggctgtgcgccacagagcccgagctaaccttttgttgtctctctctcttttttttcgaaatctgttccgatttctgttcgtgatctgatcggttgtagtgatttctgccgagctcttagggataaaatccctttcattatttcactgtttttttaaaataacgaactcggttcatcagggcttctggaactcgattcgagttggggattctgtcctaactcctactccgagatcctctttctgtttggaactacaggagaaaacgacccccttcctccaatcgtatagagttcttgatatttttttataccaccgaacagatcgagcctcggatttgttaaacccgagctctattatttttctgcgaatgaaatttctgtacctttgactgacaaccagtacatggattatattgataatgctctgtacacataatctgtacgtgttttctgttttattgactgtttctgggttgtaaatttaaataaaattccgagctactgtgatctctttttgtccctgttgacatatgtaccgattagggttaggtcgtaaaccctaaccctaaacagtggtgagagctctctctggtttgaggccgagacacactgtgtcgcttaccgacccgagagcattgacactttctatctattctaatctactctgttctcgggtgataaacgaaaaaaaaagttcaatcatgttgatccgagacttttctgtgatctcataaaactgatgtggattaggagatctagggttcttaggacggctttgataccattgttagaatctatactgtctaggatcgattcctaagtccctataataccaatccgtaactgaaagtaaaaccttgatgacgtgtagatctgatctactgatctattgagaggaacggggaaacacacctttgttgttgttgctatcttcataccgtcgccctgtagagaagcaacagggcattgggatccaagccgctgtaggttgtcgcgtttccaaacactccgacgcctaggcgatgggggcctctgaggactagggttttagggcgaggtactagcgttagtctttcctgcgaccccttagtcctatatatagcgtcgtgtgtctgggggctccaaccgaggttagcgtgggccctcccaatcaagggcccatttaaagagatagatagttgggtttagcccaatccggtcacagttgaccagctgtagaggacacacccaacacttcctcctccagccttcggatgtgggcctcgagaactagctcgatctcgtctgcaagtgcaactcatctgcagtgctcctccctaatgcctacaggtgaggtgtggtacgaggggggcgttggaccctccctgcaacgccgtaggctacatcgaccgcagagtcctgggcatcaaccacatgtaccagaagccggcatggagaaggcacagggcctgcactgatgactccccacacgaggggcctttcagagaggatgccccagcgtggtgtgtcgcgccattcgagcctgaagggatactgagctcactgtctgctgtgctgagtacggtcgtcggtgttcactacgggcatgtgcttgtccacatgaagagccatacggacaggcttaggcagtgggttaccatgggcgtagctcttctcgttctcggaatcattctgcacttctcgcatgcgatcccgctcaacaagcagctctacacgttcagctacatctgcgtcactgccggcgccgctggggtcgtcttctcagcgctctacttcttggtcgacgtcgtgagcctgcgctacgccttcgcgccgctgcggtgggtcggcatgaacgcgatgctggtgtacgtgatggccgcggaaggcgtcttcgagggcttcctcaacgggtggtactacgagagcaccaacaacactctggtttactgggtgaggaagcacgtgttcgtcaaggtgtggcactccaccagggtgggcatcctcctctacgtcctcttcgcgcagatcctcttctgggcgctcgtctccggcgtcctccaccgcgctcgcctctactggaagctctagcgagcgaacggtggcatagcatgcttttgtcttttgaactgcacatgatacacacgacacctcaaactcgaaccccaagttagtttgaagaactc

SEQ ID NO: 34675 - DNA, 851 bp, Zea mays
  Clone ID: UC-ZMFLMO17297B03_FLI
aaacatacagctagatagcctctgcatgcctacgtacagcatggccaaggccgagctgctcctcgccctcgtggcttcgctcgtcgtgctgccattctcctccctcgccgtgtaccaggacttctgcatcgccgacctatccgccgccgccacgccgggcggctacccgtgcaagcccccgaaggacgtgaccgccgacgacttccactatggcggcctcgccacccccggcacggcgctgaaacccttcaagatctccctgggctcggccgtcgtcaccacgttccccggcctgaacgggctgggcatctctgccgcgcggatggtgatggtcccgggcggcgtcgcgccgctgcactcccacccgggaggcaccgagctcatcttcgtcatcgagggcagcgtcgtctgcggcttcatcagcgccacgctcaacagggtgtacaccaagacgctgtacgccggcgacctgatggtgctcccgcagggccagctccacttccagtacagccacggcaacaccacggcggtgacgctgtcctcgttcagcagcgacaaccccggcctgcagatcctcgacttcgcgctcttcgccaacgacctgcccacggaggtcgtgaacaaggtgaccaacctggacgaactgcagatcgtcaagctcaaggcgctgttcggagggaggggctagacgcatatgtactccgtatataggaacagtcaacggtgttgatcattgaattgtgtgtattattctatacttgtgatggatgtttgtcttgtcattctataaaataaattgtaacgcgcgcagcaggcgtgagagcgaatgtagctgccacatttgatgtact

SEQ ID NO: 34676 - DNA, 858 bp, Zea mays
  Clone ID: UC-ZMFLMO17297C04_FLI
gcaggatttccctcttccatatgccgatctcccggacacggtggcctcccgctgccggagcgccatcgccgccgcagcaagcggcgcagggtacggtttccgccgtggcgccgaagcgtcgacccgtcgtgggttcccgttctcggcccgcgaaggaggcggaggccacggctcgacttccgtctgcggactactactcagagctaaagaccctggagcatgtagagaaaaccaaaaaatatcagggtaagcttgcagcacagttgaaggccaaatatttttccaacaagacttttgaaaaaggatacgtgttcgaagaaattgttatagggtccaagaccatccggctaagcaggtggccgtttacaaggttgtttgcagatccagcaaaattttgccaagaaaagagctctactgtgaaggacatgtctccatctctgactggtgaagccatgtgaaatggttcagtaactcatttagctcatgaccacccgacggataagaactcagtagctcgtgtcactaacttctatctgttatccttcaaatcagtgactgtatgttttcactaggcccaagttaaccttgtacagttttgaaccaaaggtaggtttcgtttggtggacctgtttaattacaggtatactgagatccattgcctatatatatctatggaagtacactgacattgaaattattcctccacagggatgtttcagcttttcacctgatacatgggtgtcactcatatccatgaccttggcatagtttcctattccttttcttctgaaatgatgtaatttgtggggcgccagcaccttgtctcctaatattctgtttgcagtaccaacgtccttt

SEQ ID NO: 34677 - DNA, 811 bp, Zea mays
  Clone ID: UC-ZMFLMO17297C12_FLI
ccggaaccggcagccgagaaggccaagaggcccgccgaggcgccggccgctgatgccgagaagccacccgcacccaaggcacaggctgtgggttggccaccagtccggtcataccgcaggaacgtcatgaccgtccagtctgtgaagagcaagaaggaagaggagcctgagaagcagcagtccgctgccaacgccggcggcaacggctccgccttcgtgaaggtcagcatggacggcgcgccctacctgcgcaaggtggacctgaagatgtacaacagctacacggaactctccgttgctctgaagaagatgttcagcaccttcaccacatccgggaacaacatgaatgagggaaaactggttgatccggtcagcggtgctgatgtggtcactacttacgaagacaaggatggcgactggatgctcgttggcgacgtcccgtgggagatgtttgtcgagtcatgcaggcgtctgaggatcatgaagagttctgaagccataggtcttgcaccaagaacgaaggacaagtgcaagaacaggagctgaagaagatacagcgttaaagacgctgcccattgtgtcaaaagaatggtgcccttgcagtgtgctgcggttttttctagaaatataatgcgttttaattactagttggagggagacctgtcttgttcaatttgttcatggaccagaagcaataatctatctgtgtgtagctggattggtgttatgcgatgtcccctaccgtgtgtcccagaatctacttggtgattttatcccagtgttgttaatcaagcttgtgtgattgttaagt

SEQ ID NO: 34678 - DNA, 1714 bp, Zea mays
  Clone ID: UC-ZMFLMO17297D01_FLI
ccgctgcccccgattgagccgccgccgcctcagattcgccgtcgccacctcagattcgccgccgccgccgccgatttggacgctgtcgccggcgattcagcctccgccgccctggatttggcctccgccgctcccgattcggcgctgccaccctgaaacagcgccgcccctttcccttcccctatgccctatgccctcttgctgcttctcacctaggcgacggggacgccttggatccttcgggcgcctggacgcctaggcgacgcctttaaaacaagggtcttctctgtattaaatattttctgatgtacagtagctaccttgttaattcatgcctccagcatgattctccgttgtgctccatctgtttgttgcttgaccttgcgccttgttattctgccatttggttgaggatagattaatcctcaattgtctgacaattgttcacgtctaatttaggttttttcggcatttgggtttgttcacaagatagctacttttgagaaagcagctggtttccaggcacttatccagtatactgatgccccaactgctcttgaagctaaaaactcattggatggaagaagcatcccaaaatatttacttccagaacatatcggtgcctgccacatgcgcataaccttttctgcgcataaggatttgaatatcaaatttcagtcgcatcgcagcagggattacaccaatccttaccttcctgtgaaccaaacagcaattgaggggattgtgcagcccacggtgggccctgatgggaaggtaaaggagcctgagagcaatgtacttttagcatcaattgagaacatgcaatatgctgtgacagtggatgttctgcacactgtgttttctgcttttggagctgttcaaaaaattgcaatgtttgagaagaatggtggaatgcaggctctaatccaatatccagatataactaccgcagccgttgctaaacaagctttggagggacactgcatatatgatggtggttactgtaagcttcatctgtcatactctcgtcatactgatctcaatgtaaaggcacatgatgagagaagcagggactacactctttcagaccctaacgtgcagctgcaagctgctgcacaaacgccagttctaaggtctccgggagtggcatggcagaacactgcatcagtaccagctgctcctttttatgcaagcacagcgacttcaactcctattggagttggacaggtggctgcttggaatcctaacatgcaggcagggagttttgcatctgcatcgactgcataccccaaccaaccattaatggccaactccatgcctcactatcctgctattggatcgagttccggtgccccaccagtagcatttcaggcttcgcagcagatgacacagtatagcatgccccctggtgctccgccgcacgcaccaccagctggccaatcgatttactacccgaagtaagcggttttggttcaatattatcagagagcaatcaggcattgttacctgcgacaattgtggtccgcaaatgcaatcttgcgaattttgcaagtgcgctgtagcacttgtaacttgcgagcgcccttcgcaagaatgcatcagcgtctgctgtgtctgtaaaactgtcaaagatagtgtttacctattagcttgcatggtatattggtggtgagatatgttggagtagttttgatgcctcaagaatctcttacgc

SEQ ID NO: 34679 - DNA, 587 bp, Zea mays
  Clone ID: UC-ZMFLMO17297D08_FLI
agaagtctcgcgacccggcccccgcttcgccgtgatccggcgacccaacgagccgagccgagccgagcagagcagctcgtcgccgagcaccgaaatggggtcgttcaacggccacgtcctgccggggacgctgttcctggcggtgggcttgtggcgggtgtggtccagcgtcgcgcgcttcgccgccgacccgccggcgttccgcgtccgcacgtggaaccccctccccaagggcccccgcctgctggagctctacttggtggccggcggcgcgttcctggacatgtgcctggagctcggcggcggcatcctcgccggcggcgcccgggtcggcccggacagcctcatctacctcgagcacgccggcatgctgctcatgttcttcctcttcggcgcgctcgccctcctctcccagaagacaaggtctgtcgccacatttctccaccgtggatccgcgcactcttttctcgatggatcgatcgagttcccaaagttggtacagtttgtgtgaaattcgtgccaccgaactgaggcatgcatgatgtgctgtcaaaggtcacatttttgaatgcattgtcagttccagt

SEQ ID NO: 34680 - DNA, 2107 bp, Zea mays
  Clone ID: UC-ZMFLMO17297E04_FLI
ccttaaaccgtccgcacgccgtcttccccatctcgcgcagcgctactgccggctgtccggagtcccgaccaccgtcctcggctccccgccgtgaatccatcatcccgtaatggagacctgcccgtcggtgaagaacatcctcttgctggactcggagggaaagcgcgtcgccgtaaagtactacagcgatgactggcctactctatccgcgaagctggccttcgagaagtcggtatttaccaaaacccagaaagcgaatgctggaacggaaggtaatttacatatgctttttcttatgcggaagtagttgttttccatcgatgatgagccacggtgagcgttgctgtgctcgattgaggtagtccagagtagttgattagcattatcatctcataatgaactcacgtgtgtcagtgtgtgatgtattgttataatccgttctatatatgctaatgctgggcaagaatgcttctttacagggtagaaccacttctttgatattaaattacaccatttttgttttgattcttttgctgtgcgacatgttaatttattggtgcctatgccattttattcattgcttatttgacatggcttatatacaaatttacaaattttctactctactcccaccattccaaattgcaagatgttttagcttttctagacatcttttgctatgtacttagatatacactatatttaaatacatagtaaaagcaacgtagcaggaaaaaccaacaatttggaacggagggagtatatgtttttcatgtccagctgtttatcctctattaacctcagtcataacactgtttgtacgagctcccactcactccacaaatctgtaaatgagcctgggctagttttccttctgactgaccttgatttctccttaaacatgcagatgtgactgtttgcgtttttgttcttctcttcaagtatttcatatttttatttgtttctctttaacagttgagattgtaatgtttgacggtcaaattgtggtatacaagttcatccaagacctgcacttttttgttactggaggagaagaagagaacgagcttattttagcatcagttcttcagggattctctgatgctgtcgaacgacttctcaagttattttccctctattaaactttatcttttcaaccactgttttgttctgttacatgttgttgtgttaatgctgattgtatatgaatgtgtttccaatcttggtggttttagaaacatggttgacaaaaggacagcactcgagaatttggatatgatcctattgtgccttgatgaaattgttgatggagggtaaatccttatcttactatatacatgatattagggcttcttttcttgttccctttactgtgtacatttattattcttcctttgctctgaaataatctgactgtcatctgccgcatgtttgttttttttgaactgggggccatggcaatagagtaatatccgagcgtctattttgtaatggttttaatcactggattcaaaggtttagcaataggatctttctcaagcttagagatgaataacgtcacacattagtatgtaattatttgtggcattatacctaattttcttgaatgattacacaggattgtacttgaaacagaaggaagagagatagctgaaaaggtgtctggtcatggattggagggtgcttcatcagctgagcagactttagtcaacgccctaacgcaagcaagagagcatttggcgaagtctcttctcatgtgatgctatgctttatatattagggtgacgatggagtatctataactgtgtctggatgacacagttttttttggttagcagtggacccaaaaaaaatgtctgaaatctttgaatgtgtagaatggcatgttgtgtccaaaattttcatttgtaagccttcaaagttgtgtagcatgttttttcttctaattttgactggtttagttatcggtcgttttgtttaatctcttcctgttggaaacggtaaaatagcatgcttgatggcatgttgtaacttaacaaattagggctacactttgtttaagatggtaatatgtctccctgaaaccaaaacattattggaatctgcc

SEQ ID NO: 34681 - DNA, 834 bp, Zea mays
  Clone ID: UC-ZMFLMO17297E08_FLI
gtgcgctgcgtcgttccagatttggggaaggaatccggcaccgagattcgagtcgaaaagatccgcggtatcgctcgaccttcaaatacttcggcaacgtcgccggttcaggacatcatttgctagatggcgcgtaccaagcagaccgctcgcaagtccactggaggaaaggctcctaggaagcaactcgctacaaaggcagcccggaagtctgcacccacaactggaggagtgaagaagcctcaccgttaccgcccagggactgttgctcttcgtgagatccgcaagtaccagaagagcactgagttgctgattaggaagctgccgttccagaggcttgtcagggagattgctcaggatttcaagacggatctgcgcttccagagccatgccgtgcttgctttgcaggaggcagcagaggcctacctggttggtctcttcgaagataccaatctgtgcgcgatccatgccaagcgcgtgaccatcatgcccaaggacattcagctggcaagaaggatccgtggcgagagggcgtaagtctgtcgacgggcagaagaactctgcgctcgttttgtgtgttcgcctctctcaccctgtaagttttatgagaagatgatctagtaaactgtacttggcctgtttgactgtagccgcagtagcatatgcatgcgcatactgttggctgtttgtcgtgtctggagtcttttatccatccattctagtactacttaataatcgtgatatatcaccgggttgctaaacgtgtatccagacttaactgtgtgtttggctgtctgaacctcagaatcgttattgatgtcatcccattcgtcc

SEQ ID NO: 34682 - DNA, 831 bp, Zea mays
  Clone ID: UC-ZMFLMO17297E09_FLI
tgaaatcactggtgtcaatatccgctgatctgatgcatgacttcaagactggacatcttacattaacatcacctagatcaatgattattgctcaggctattggcactgccatgggctgtgtcattggaccgctgacatttttactgttctacaaggcttttgacattggaaaccctgatgggtactggaaggcaccatatgctctaatctaccgcaatatggcaattcttggtgtccagggcttctctgctctgcccctgcattgtttgcagttgtgctacggattctttggatttgcagtggcagccaatctgatgagggacctcttgccaccaaagtatggcaaatgggttccattaccaatggcaatgggggttcccttcctagttggtgcgagctttgccatcgacatgtgtgtggggagcttgatggtcttcatctggcacatcattgacagaagtaaagcatctttaatggtgccagcagttgcatctgggttgatatgtggcgatgggctttggatcttccctgaatccttgcttgccttggccaagatcagtccaccattgtgcatggcattcaggtcttcacactagagtaacaaacatgctcgacatctgagaacagttccatgtccaatcggagaagctgttggcatgccaagtttgtcattaattagctgggatatgatacatgcaggtaggtaaagatgcagtgcctatctggatgttacctacatataatgacgtaatgtggtacccctgtaaaatttatcatatgcaagatgatacatcacattagagcaatggtaagtttgagaatttcaccccc

SEQ ID NO: 34683 - DNA, 1486 bp, Zea mays
  Clone ID: UC-ZMFLMO17297F06_FLI
gtccctctctgcctcatcacctactccgcctgcgcctgcgagctgtgctgtgctgtgctgcgcaacggggagatccaatccacagaacaggatgcagtccaagcaccgggtcttcgcggaggacctgctcctggcggcggcagcggagggcgaggaccacttcgaccgggtgcccgactccctggtgctcctcatcttcaacaagctggccgacgcgcggtcgctgggccgctgctccgcggtgtcgcgccgcttcagcgcgctggtcccgctcgtggacgacgcctgcctgcgcatcgaccgcgtcatccccgccgacgccgccgacgcgggggcgccgcgcccgcgcgccgcgctctcgcacctcctcaagtccgtgctgctcgccgtgctcaagcccttcgcgcactgcgatgccaagtccgcgtcgccgcaaaagcacgcgcagcagcagcagcagcagcaccactcgcccgcccaggtgctcaggaacttcagcagcatccgcagcctccggatggagctcccggtctccgacgtgggcaccgacgacggcgtcgtgctcaggtggaaggccgtcttcggcagcacgctgcagagctgcgtcatcctcggcggcaccagggtggaccgcgcgggaccgccgcacgccccctcctccggctccgctccccccgcgggcgacgacgacggcggcagcatcccggagtccctgtacaccaacggcggcctcaagctgcgcgtcgtctggaccatcagctccctcatcgccgcggccaccaggcactacctcctccgcgagatcgtcaaggagcaccccaccctggagcgggtggcgctgacggacgccggcgggcagggcacgctcagcatggggcgcgaccagctcagggagttcagagacaggccgctcgccgccgcgcccgccgccgccgccaaccgcacgcaggtgcccgcctgcaacatgaagctgcgctacgcgccgctgctggagctctcggacggcaccaggatccacggcgccacgctcgtggtcatcaagcccgtcggcgacgccggcgggaaggacctcgacgagctcggcgccggcgccttcgacgggcccctgagggaggccgtggccgcgctcggcaagcgccgcgcatacctgctcgagatgaacggcttctagtctgcgcgcctctctgctccattgcaatgggcattgttaattggccaatgggcaacggcaactagctagctagattgctcctccgctcgcttcacctcagctgtcagtcagctcctgtcctgacgatatccttgtgaaaaaaaaacagtagtatagaatggagtgggcagcgccagccagccggccagcttcacagtgcattctgatgctatcatgaacggaaatgaagcagtcagtcacattttgaatcaactcttgtatgtaatggcatgagacgacgaaaccagagagttgcagcatggcaattcgaagtct

SEQ ID NO: 34684 - DNA, 912 bp, Zea mays
  Clone ID: UC-ZMFLMO17297F07_FLI
gccgagccccaaacccacgccgccgacgtacactcccaccccgacgccccccaagccgacgccacccacatacactcccgcccctacgccccacaaacccacaccaaaacccactcccactcctccgacgtacactccaagccctaagccaccggctaccaagcctcccacgcccaagccgaccccgccaacgtacaccccttcgccaaagcctccgacacccaagccgaccccgccgacgtacaccccttctcccaagcctccgacgcccaagccgaccccgccgacgtacactccaagccccaagcctcccacacacccgacgcccaagccgaccccaccgacgtacaccccttccccaaagcctccgacgcccaagccgaccccaccgacgtacaccccttccccaaagcctccgacacccaagccgaccccaccgacgtacactcccacaccgaagccgccggccaccaagccgcccacctacactccgacgccgccggtgtctcacacccccagcccgccgccaccatactactagaaagcgatgcctaccataccacactgctgtcagtctctggagcatttaggtggtctggatcaatggaagggttgtgtcctagccagccggcaaagatgagctgctgatggtaatgatgatgataagaggccactgctaccctactacgtaccctcctctttgtgtgctgccatccgtccccgttagacgatcgaggagagaataacgcagagctctctgctcccggcctgtcttctgccgtcccggccgtttaatttactagtgtgttcgtcctatatgtttagcagcagcaggtgtattgtgcgggtatgtaatggtattgcaactatattgggtgtaaaaccataataaatgtgggcaaatatgcaagg

SEQ ID NO: 34685 - DNA, 625 bp, Zea mays
  Clone ID: UC-ZMFLMO17297F11_FLI
acggggcactggaacaggtcgaggggtacagggatgaggtcttcgcgctgattcccagcctcaagtacctcgatggcgctgacgctgagggcaacgagcgtttggagacggatgacgacgacgacgaggaggaggacgacgaggagggagaagaagggccggagggagaggaggagggcgatgaggatgatggagaggaagaagatgatgaggacggtgaaggggacgacgaagaagaaggtgatgaggaggctgaggacgaagacggcgaagctgaggatgacgagcttgacgcagacgcagaagacaaggagaacatcgaaagcaaggcaggatcttccctgccaaataagaggaaaaggaataacgaggatgatgccaatggatacaagtaaaacggtgagggaaagtagtattttcctgaacttcggaaacgttcctgtgcactgattattatttgtatgcttttcgagtcttttttttcccgcacttgtaatagactagagcatagttttttttaggcggttccacttctgaagtatcgtttggattctggaagttgtctgactctgaaaccatgagtaggatgtgtccccagcacgtatatacgctttgtttggtgtgc

SEQ ID NO: 34686 - DNA, 1068 bp, Zea mays
  Clone ID: UC-ZMFLMO17297G02_FLI
gagggatcgtcatccgccccacccacaactgctccagatccaggcacggcacggcacggcagccgggccaacccaagcccgtcttctcttctctctcgtccgtcccgcactcgccgcgacgtgacaagacaacgcgacgcgcgcgcatacgtcgtccaaggcacgcaggggccagccaaccaatcgcgtccgtccgggtctggtggtggccggaatgggcctcctcgatcagctctgggacgagacggtggccggcccgcgaccggactccggcctcggcaagctccgcaagtactcctccttctccccctcctcctcctcgtcgtcgtccatcctggctcccgcgccggcgccggcgccggcggtgacgcgcagcatcaccatcgcccgcccgccgtcgctctccgtcgagtcctacagctcctcctccgtcccgtcctccccggccagcacgcccgactcgccgctcgccgcagctaccccgcccaaggcggacgtctggaggaggttccgccggaaaaccaaggtctccgacgggccggagccggccgtcgggcccaggagccccaccgtctacgactgggtggtgatcagctcgttggaccgctgagttagaacagatcaatcgccaataagcaacaaccgagctagcagagggcatgtttgcgttcttctgaatgttgtgcgcgtgtgtctgtggcagcataagtagagagtatgtcgatgatgatgacgacgacgacgatcagttcgcggcagggaggttagaagtggcctggcgccgatctccatcctagtttgggcgtttggcctatagccggcaggcgcgttctccagttgttggatcaggggaagaactcctgccgtgggaggctcctagggctgcctgcttcgttttctacgcaccctcctcccctctgtaattatcccaagcaccacctcgtactggtctggtagtagtagcagtgttttgtgtgtgtgtgtgtgtgtgatgctacgatgtagctgtgccttttcttctgctcgcctggaaaccttttgcgttccaaactgcagctgttgtgttcc

SEQ ID NO: 34687 - DNA, 815 bp, Zea mays
  Clone ID: UC-ZMFLMO17297G03_FLI
gcgtacgcgtgggttttgctcctccgccagcttcatggtggacgacatgcccatcagggacttccgcaacctggagagcaagggggtggcgttccccaagagccagccgatgcggctctactccagcctgtggaacgcggacgactgggcgacgcagggcgggcgcgtcaagacggactggtcccacgcccccttctccgcctcctaccgcgggttcaaggccgacgcttgcgtcgccgtcgcgggcggccggacccgctgcggcgccaccgtcggcaccgagggcaccggcgcccccgcctccgccgccggcgccggggactggtacaaccaggagctggacctcaccctgcagcagcggatgcgctgggtgcagcgcaagtacatgatctacaactactgcaccgaccccaagcgctaccagcagggcctccccgccgagtgctccatgcagtagcgcccggttattcctcgcccgtccaacaatggcgcgcgcgcgcgtgtgtgtgcatgtggtccgctctactgctaccgctacgacgatcggtgtcgatcaccggatcaaggcaagacgaaaggcatcgaaacatggtagataaataaaggacttgacgatttgtaacgcagtagctggtgcgtgcgtggtgtggtggtaagaaattcttctgctgcctgtgttcttgtagcctcctcgtcctcgcccaccctgttggtacgtgtacggtgtacgtagtctgccgccgcgcgctgttcgtgttcgtcgtgtctcgtgtctgtattatactcgtcctccccatcaaaaaaaaagttgttcc

SEQ ID NO: 34688 - DNA, 1421 bp, Zea mays
  Clone ID: UC-ZMFLMO17297G11_FLI
aggagctagcgttcaacgaagaggagaatgaccgcaacaagcagattcaagcatccattgctgaggcttttcggaaacaatcagaagttattgggcggaagtctactgccaaagctactgctgctgcatttgtaagaagatcacgccgtaacattcggcctaatgggcagaatacctatttccgtggccgaggaaaagccagttctgatgacgttgctctggcctgttctgaagatgaagaggatggaaacggtgaaagctgtagcaaagaggcctcatctgcggaggagagttccccagagaaaaagcagaaacgactgccaaaatggccaacaccgcgttcttcacctgcccgagcatgcaatgatgaggttgcttctgatgaaaaggatgatgtaggaatatccagggaaaatttcagcacatctcctctacgagcatggggaaagaatggcactcgcagtcagactcgccacagtagcttcagtggttcaaatggcaggatggtcaagggtgggcgcatgatcaagttggttgagtgcttgcgaaattctgacgacaatgaaggcgagcgtgatgtacatctttgtctgcttccacttgatggacaaacggcaccaaatctggagaagtcatatctgtgttgcggcccaactctgtccatcaaacaactttgtcagtttgtcgccagtcagacatctcacaaagatgaagaagttgagatgtatgcgctgaagccttcttgtagcaagcctgtcagcactaatacatgcggtcctgacaaagcaaggctcgcaggggaggaacgcctttcagacttgcgctcctcgttcacatttcctaatggggttctggtgagatcaaacacttagattatctgattagacccgttcacgtttattctaaatgttatactcttcatttcaggagctggtgtatgccataaaagtggctaactagatgctgagtgaaggcccattagttcaaatggaagtgttttttgtttatacatatcttcatcgtgatcccttgacgaaatgacaggtttgggctcttgaatacaacttggaaggaaaaaaaacgttgggggagactagttgttgtataattagcttgtgagatgtgagataaatgtgcgtacgttgtcaacgaatagtttcagaagagtcagattggcttccacagttcacctcgctgcaacccaaaatctggtctccactgccggcatttgggggaatttctcggttgggtgaaggctgagttatttcctcgagtggtcaagttgttttacttccacagttcaccagtttcagcttttgtaattcatcggttcatattcttcaggcggcagccagtccgtgctgcgaacgacttcccagatacatgtaacataaatcttataaaaaatatatatgtaacag

SEQ ID NO: 34689 - DNA, 1117 bp, Zea mays
  Clone ID: UC-ZMFLMO17297H09_FLI
cggcaggcggcggccctcgggcattgtcccagcgggagcaggacatccagatgatgctcgccgccgatgtccacctcggcaccaagaactgcgacttccaggtggagcgctacgtgtacaagcgccgcactgatggtatctacattattaaccttggaaagacctgggacaagcttcagttggccgccagggtcatcgttgccattgagaatccgcaggacattatcgtgcagtctgctaggccctatggccagagggctgtcctcaagtttgcgcagtacactggtgcccatgccattgctggcaggcacactcctggtacattcaccaaccagttgcaaacctccttcagtgagccacgccttcttatcctgactgacccgaggactgatcatcagcccattaaggagtctgcccttggaaacattcccaccatcgccttctgtgatactgattcccctatgcgctatgttgatatcggcattcccgccaataacaaggggaaacagagcattggttgtctgttctggctgctcgcccgaatggtcctccagatgcgcggtacaattcttccaggacacaagtgggacatcatggtagatcttttcttctacagagacccagaggaagcgaagcagctggaggaagaagaggctctggttgcacctgactatggcgcggttgcagaatacactgcaccaggcgctgacaactggggcggcgaatggggtgctggcgaagctgcagctccagctgctagcattccagctgctggcgcagactgggctgctgctccagctcctcctgctgacggtgtctgggacgcagctgtggctccacctccagcagcagcccccggatgggaacaaggcgcggcccccgttgcggcgtcgacccctacctgggagtaattaataaagagtaaatgagcatggtggatggtttatactagtcatcagcggagcttgttggtaggcacttgctggagtagttgcttcgaacttctttttttcgtgttagatgaggtaaaaaaacaattttgtgttattgactctgctgtgagcgagtgaaccttgcgcattttcgttatctcaaatggatagatctgttttacgct

SEQ ID NO: 34690 - DNA, 1265 bp, Zea mays
  Clone ID: UC-ZMFLMO17299B01_FLI
gtttggtttgtccgcgcaattttgggtgttggactggcctggtaaggactcaggagcatatgcaatcttctttgtctgaactagaaactttcacgcgccaacaaaacggaacgatttggtagtcctctcctcttcgttgaattcattcagagttagagaccataacagaaaacagggcgtcagttctgtgattctagttagctgctgtttaaaattagttggagatataggctattagctgtttttaggtagagacatctaatatctctagctaataggcttaactgcttgtttctttctcctcctgcgtttcccaattctaatattgtgcatccagctcatcaaagttgtgcacgctgtggtctgcgggagctttctccatttgcatccaaattaatgccttgatgttactaccttctacgtttacattacagtactttgggtgctgctgctttgacccatcctcggctttgtatcctcctcctgtcctccatatcgcttttgccgaaatgacgatgacggggctatgtgcatagaaaataaacatgttttaagatagaaaaaaaactatcgatacatagtcttaagggctagtttggtaacactatttttaaaataaaaaaaaaactaattttcctttagaaaatagaaattccttgaaaagataggatgccaaactagccctaaatattagattcctccactggcaacactggcattggcaggcagctatctatctatacatgatcttaaacattagaatatccaggacttggattataccttcattatacttattgctctacaagttcacgacgagtgattgatcataccttcattacactaaataaactctgttgtgccgtgcagtggaagaggcgctggagcacccgtacctggaacggctacacgacgtcgccgacgagcccatctgcacggacccgttctcgttcgacttcgagcagcaggctctgacggaagaccaaatgaagcagctgatattcaacgaggccatcgaactcaaccccaacttccgatactagctagctagctagttcggacacacatcttaattatacgtatgtatgattcctcgtacgtggtttgtaaatagaagatcgagccggccgccggtgttattagactgaacgttgcatttgtttgttcgttgacgttcgcgctcgcaggtttcaggctgtgtagtctgctgcaggtttcaggtgttcgtgtaatgagctgtaccaagaataaaatgctttggactc

SEQ ID NO: 34691 - DNA, 2737 bp, Zea mays
  Clone ID: UC-ZMFLMO17299C12_FLI
cttctggggagcaagaagccaagcccatgcagatagaaggtgaggccacatgtggtattctcgaatttgaagaagtggataaggatggtgaggatagtttgtgtaatgactgcatggttggtgttgtttcctctaatgaggaaacagagcttcctatgaaggaaagaacagatgaagctgtccccagtgttaatgttggcgagccagagcaagtaactgaggatacaagccaagatatcatgcagggtggattggccaggggagtttttataggcacaatttttgttaagccagtatcagatcctcatgttgaatcaagcctcgtacataaagtcaaggcagaagttcatttagttgatgaaatcacagcagcagatttgaaagctgaaaatatggtcgaagtgaaaagaacagatcgtgaagttgacgaaatagaggtaaaagcgccaggtactcacgaaattgggaattcttcagaagtagaaccgaaggaagagtttgagatggaggttgatgatgctgtttcattgcatgaagctgcagcttctgcatcagaaaatggttctgaagaaaaatctagcaacattgctgttgatcaagttgaacctgtcaacctgaatgtagatgaactcgcggtagatgatgatcaacccagttttaatccaggttatggatctgctaaatcttctgatgtggccgaaacaaaaaatgtggaagcacaagtgacagaacagaagggcaatgcacaccatgcttcaggtgagtggcatggagatcatacgcaagtcattggaccacagaggatctacataattaaagttccaaagtttgccggtgatgatctctgggataagatccaggctgcacaggctcacttagaccaactgacccaggaaagagacgcaattaaccgccgtaggcaaaaacaaaaggctatatgtgatgaatacagggagaagtttgaggcagcacgtcaagaagagcgggaagcaagggctgcccatggagataagaagaatgatttaaacagtgtgcgctcagtattagagaaattgcaccaagcaaattcagttgaagaacttgatgagcttattgcaaagaaagagaggattatgcaacatgagaccatttctttgaaagaagaaaagcttttaattaaagagattaatgaattaaaatcccaacggaagcagctgtccgccaccatgggctcaaaggctgaaatcaatgaggcatttgaccaaaaagatcacattcatgagcggcataaggtgttaaagaaggattctgatgttttattcagcaacctgaaagtcctagaggagaacacaagaaagattcaaaaatcttttgctgatgaaagaacagctctcagaaaattaacagaggaacaccgagcagctaatgaaatacgtcaaaaggcctacagcgattggactgagcttagatcagagcccagcaagaagaatgaatactttttcaagtacagggacgcccgaaatgcagcagaaactttcagagccaatggagatataaatggacttatatcacactgtaatagtcagattgagagagttatggaaatatggaacaaaaacgaggacttccgcaagcagtatgttgaatcgaacaaggttagcacactaaagagattagggacccatgacggacgaaaacttggccctggtgaggatcctccggtcattccaagccgaagaccaagcaacatttatccattgtctgcctcaagcccggaagtgatcaccttagcttcaacaccagcacctgtattggctgctgcagctgcagtcccttccaaagagaactcttttcctgctttggcagcccctcagaccagtaagcgcgccaaatcaaaagcatctggtagctctgcccagattaagaacaaatctgttatagtatcagaggaagaagatttggaacagactttaaaggagaaggctcatcaattggagttagctaggaaggcagaggagttagataggaaggcagaggagttggcgcggaaggaggaggaactaagaaaagagagggatgcagctgaaaaggagcggcttaggatggagcagaaggctaaggctaaggaggctgaggagaggaagaggcggaaagcagagaaggacaaggaaagagccgagttcaaagcacgcaaggaagctgaggagagagagaagaagaaagcaaagagagacaaaaagaaaggcgcagcaccagcagattcgagcgccattggtgacagccatgctgctgcttcggctacagcagatactgacagtaatgcatcagacaacccaagggaagctgacgtttctcaaccagcggtggctcccaggaggccggctagaccagcggcggcaatcaagcaactgaacaggttgcagcccatgccagcgcccctgcgtaacaggggcaggaggaaactgcggcagtacatcctgatcgcagcggcggtgctaacggtgctggcgctgttcgtggcaggcaactacattcccaggctgaggtcgcactcctaattttatcgttaggaaaggagtgccagttctgtcgcggtgaacctggtggtggttctacctagaggattcttcttttttcgactgttcgggttggtttgtatttagcttcccttattataggtttgtgataaaagttattaccggatggtggtgaaatattcgttagaacatgataataatgactatagattcttttttgt

SEQ ID NO: 34692 - DNA, 1984 bp, Zea mays
  Clone ID: UC-ZMFLMO17299H10_FLI
ctgcttgagccttgaggacagtaaatgattctgccatccggtaatggaagctgaattttgtttagggttaagatttgcatattggtatgttatacaatatattcagtgatcatttatggacacttgaaggaccaatgctgggtgctggagcagaaaattgatgctagcctcaccagtgtggaccctttcagccagctccatgcgatgcattgcagttttgggaagacaaactgggtaactaggagcccagcttaccagcagctcagacttccactgttgttaccatggaaatgcaagtcgtttggctttaggtttgtgcattggtttaaatgatctggtatgcaaactagagaatatggcagtggacatacctgctacattgtcctgtcaccagaatatgctgacatttttgagaagttagttcatgtcggtaacggtaaaattggttccttgttggaaatagcccagttctccaaaacatggttcccagaggctctatagctttgctccttgtccgtgttaacgagctttgctgtcttgggactagactttttcatgaaggtagttacagctagatgcatctgtgtcaggattatgatttgttcttgaattaccgagatccaggaataacctaatctcagtgcttctcttctgagatcatggtggagagacacactaaccgccacaggggctttggcttcgtgacatttgaagatcggagggcagttgacagcgctattaaagagatgcatggccaagaaatagatggccgtaccatctcagtgaacaaggctgagcctaagatgaatacagatgacacaaggtatgccggtggtggtggacgaggagagtatcgtggtggtagaggtgatggtccaccccctggcaattgctttgagtgtggtcgtcctggtcattgggtccgtgactgccctagtgctgctggcggtcgttctggcaggttcccatccaagttcagtggtggcagtggcgttggcaggggagaccgcttttctggttcagataggtttggtgatcgttacatggatgatcgttatgatggtggtcgctatgggtaccgtgatcaagctgatgcaagggacaggtatgctggtggccgagatcgctatgccaatgaccgttacccatctggtggcgatcactttggtggagacaggtatggaggtggtccggattgttatgtgccaagtggttatggtagggagcgagaaagaagctacgagagagatggagttcgtggtggtggtggcggcggcggcggctatgataggagtggcccaaggggtggtggtgggtatgacagggatggtccacgcggcggtggaggaagtgcacgctatgatggaggaaattacagggagaggcctgggccatatgatcgccctagcaggggaggacgttttgatgatcgctactgatgaactgcctgtagactcaagctccttgtcttggtagtttaatgtttgcagttttgcatggccgaatgcttaatgggctatggaagatgcttaatttatccctcttcggcactttaatgtctgctctttatttcaaccagtactggggcactggtttgccttgataagtttatccagctgacagtttttgcatgagatgagtcatgctctgggctattaccctgcctgttggatatttcagtagctgaggtttgcagtgatcgattgtcattgttgatctgaatatctggtatgcgtggactatgtttaaagtgattgcctgtcatcattggtctatatagttggtgagcatatatatgttcagtgtcggtgcttgtcattgttgttggtctggatatctaggcttgcaaggatatatttgcagggctgagttgcaagggcttaacagaacaatagccaaagtaccttatattttagtagctggagaccatgttaattatgctataattagctggagaccatgtaaatttagcttagtttttgtc

SEQ ID NO: 34693 - DNA, 678 bp, Zea mays
  Clone ID: UC-ZMFLMO17300A05_FLI
ttccgtgcactcccctggggctgtctcgtcgcgcgataaagactcgcgagccttatttctggttccagctgcagatcccaatgcaggagctgtagttccagcaaataagactaagaggtcaccagagcagggacaccgcagaatcaggcggccgttctctgttgctgaagtagaagcacttgtgctcgcagtcgaaaagcttggaaccggaaggtggcgagatgttaaacttcgcgcttttgacaatgcaaagcaccgtacctacgttgaccttaaggacaaatggaagacgctggtacacacagcgagcatctcgccgcagcagcggcgtggcgagccggtgcctcaggagctgctcgaccgggtcctggcggcccaggcctactggtcccagcagcaagccaagctccagccgaagacgccctcgctggctgaggctcgcttgctcacccaataattcgatgatcccggctgatggcctcctctgaggccgttgcagcctttgtataaagtcagtaagtcagtcagtcccttcacaggaggtttaatgaaaatataatattaggggaaaaaataatgcatatataaggtacaagaagcattgaccgatttgttgtaacatctactcaccaccggttattctttaagccaggattctctctccttgtgaatttaacc

SEQ ID NO: 34694 - DNA, 2091 bp, Zea mays
  Clone ID: UC-ZMFLMO17300A10_FLI
ctgaaagcaaatcagtaagggaggctgcaagcaggaagggctcaagcgataacttcctatactgtccagttgctactggtattcaagatgatgacatagtgcattttcagatgcattgggcaaagggtgagccagttgttgtttctgatgtccttcagttaacctctggtctgagttgggagccaatggtaatgtggcgggcattgcgggaaagatccaaaggcaaagcagaagatgagcaatttgctgtttgggcgatagactgccttgattggtgtgaggtggaaattaacatacataggttcttttcgggatatacaacaggcagaactcatgctaggactcactggcctcagatgcttaagctaaaagactggcctccttctagttcctttgacaagcgattgccgcggcatggtgccgaatttattagcgcattgccatttcgtgagtatactgatccacggtatggcccgctaaatcttgcagccaagcttcctgctggtgtcttgaagccagatcttggacccaaaagttacattgcttatgggttctacaaagaattgggcaggggcgattctgtgaccaagcttcactgtgacatgtctgatgcagtaaatatcttaacacacacagctgaagtcacttgtcagactgatattggcttaattgaaaaaatccaaaaagacatgagagagcaagatctgcaggaactatatgggggtctaaattcccactctgagctcaagttgtcaccagctccaactgaatgcagggatgaatctgttgatgaaggattgaagacctcatatagtagagaaggcaattgtgtaaatagagacaattataatggtttagacatcaatgcattaccacctgatgacgatggagatattgcaaaggataaagaatcatctcctggatcagagtggcaaagtgaactaggtcagagttcagatcacaacaatggggtcaacacaactgatgagatgtacaatggagctcattacatttcacacaatcaaaaaagcactggcaggaaagttggcattaaacctcaagaagagaaatctgaaaaggctgattgcagtggcacatgtgcttatctaaaaggaagttctgaagataatccggaaatgcctattgtggagagctcagaggagcagagcaccggtggtgctctatgggatatcttccgcagacaggattctgataaattgcaagattatcttaggaagcattgctctgaattccggcatatttactgcaatccagtcaaaaaggtatttcacccaattcatgatcagtccttttacttaactgaggagcataagagaaagctcaaggaagaatatggtattgaaccctggacgtttgaacagaagcttggtgaagctgttttcattcctgctggatgtcctcaccaagtgagaaatttgaagtcctgcatcaaagttgcgcttgattttgtttccccagaaaatgttggtgagtgtgttaagctgacggaggagtttagacgacttccatctttccacaaggctaaagaagacaaactagagatcaagaagatggctgttcatgccctgaacgaagctgtaaacttcctggatcctcgttcctcagaagagttgaaaattggggttggtgagaacatctgtgaggatgaatctgtagatgagaaggagctgccgcctagaagaggagttgaagtgtcaggcgttgatgagaagcctaaatagaaggcgagggaggcatcaagtccaaaagtgaagctgctgatgaggtcgcccattttaggttctcggaatcgtggttaattgatttgtcaaagcccctgttcatgtatggtgatcgctggctgacaccgatggatgaagagaagcaggacacgtgtgtgctgctgatatgtcgtgtcggcgagtgacatgaatatcatccctatccctatggtattattggtcttttatgtttatgtttgatcatttgtcttattcagttttttttacaaataataaaacaagaggttaaaagtaaatgacgtcatttatttaattttaagacggggcagatgcaaaactgaaggtagcc

SEQ ID NO: 34695 - DNA, 1400 bp, Zea mays
  Clone ID: UC-ZMFLMO17300B01_FLI
tctttctccgcctcgaaggatctagagccgcacgtgctcccaaccaagcgccgcccgcctcgtgccctcgtccttgcgcgcgggctgcagttgttcttcaagtgccgcctccgcttcggcgcggatcgcctcccgttatcccgttcatggccggccgcagcgataagaaaccggcgagttccgccccgccgcggaagggcggttaccctcacggatcggtctatggaagttcttcggaacctcgaaaacaggatgcctgtacattctctccttcggttagcagcaaagattcactgcataaggtggtcacgcttacaccagttcaaccacagaaacctgtagactccagaggcagtcactgtaatgcaggatctgattctggagaggccccgtttgatatatgcatgagtggtaacaaatgcgctgtaaagttaaaaccatccatattcgagaccaacagagaaagaaagcagcgagacagagaatgttccaaggatgtaggtccattgcagttgagacctgggatggttctgttgaaaagattcataaagcctaatgatcaggttaaaattgtcaaactttgttcgcaacttggtgttggtcctgggggattttatagacctggctaccgaaatggtgctttgctaaaactgtggatgatgtgcttagggaagaactgggatccagattcatcctcgtatggagatagacgtctgtttgatggtgctcaaccaccgaccataccagaagaatttcagaagttcgttcaagatggcatccaagcttcccatgaattcttgaaacaacaaaaaggagctaccaatgttgtgcaagaaatccctgcaatgtctccggatatctgcattgttaatttctacaatagtagtgggaggttgggtcttcatcaggacaaagatgaatcacagagcagccttgacaagggattgcctgtcgtttccttttcgataggcgagactgcagaattcatgtttggcgatgatagagacgaagagaagatttcaaaggttgatcttgaatccggcgacgtcctaatatttggtggcgagtcaaggcttatattccacggggttaacaacaccaaacctaaaacggcaccaaagtggcttacggacgagacaagtcttcgacctgggcgtctgaatctcacattcaggcagtactaggcaggtttcccccaccttgagcatttgcattggaacagcaaagaacttgctcatgatattctagtactaggcgcagttgggttagttaccagtagagatcacctgtcatttttcttatatatattccctcatggctactcacaaggagatctttctagtcactgaaaaccaccacttaatccattgctactcgtttaaatgtttgttttcatgatc

SEQ ID NO: 34696 - DNA, 3086 bp, Zea mays
  Clone ID: UC-ZMFLMO17300B10_FLI
tttacttgtgatgaacctgcatcaccagagttcattagcgctcaggccccagctacacctggtttaatggaagagacagttccttccagggtccatgaaagtcctgttctgagtccacagagaaaagcatcaccatcaactaatgatgaaactgcaaaggctgacactcctgctgcaccagcctcagattttctccattcggctacaggaaatgccagtgatgtggtgggtgctgagatgacagaacttggattggcgaaaccggtgcaagttgagtcttctgttgtgcaggactctgatgcatcggtgcaacagcacacaagtgagggtttaccatcccagggtcaagcttcacacttggaagctgctgctgataagttggtcggctctgatggtatagctgcatcggttgatgaaacggtaactgtcaatgcaaccattgaagatgtacctttggctgtaaatgattcagagccatgtgttgatggttctgctggaccatctgtggtgaacctggtacagatggatggcccattatttgatgcacaagtactaagtgcagattttcaacatgaagtccaagcaatgcaacaagtagtggcatctaacgatagactgaatgaactatcaacttcagaatttgccgagcctgagaaaatgctgacagctcctaatgctgaattcaatcatgcgattgacttggggcagataactgcggaaaaaggaacaattgaatctgatggaagtaacataataggcagccttacaagcagaaaaagacacctggaatatagcttaccagctttagagagtgagaccactaaaaagttgcctagccgaccacatgttaaaagaaccaatgattttgttcctcatgatgatgatatactggcatctattttagtcggtaggacccctgggttcacacttgattcaacaccactaccaccaagggaatcatctctgaaacgcccaaggttggggtcgaagatgggtacactcaagagaaaagtgcagatagatgatgccatggttctgcatgctgatactatacggcaacagttgatcaatactgaggatatacggcgcattcgtaaaaaggctccatgcactcgttccgaaatatggatgattgagaaaggttcactggaagatgatttattccacgagcccatcttttcctgcctatctgaggagctaaacaatttacacaatcggacatatgagactattgtacaccctgctgttcagagcatggaactacgtggtcaattagacatgcctgaaacaataccagaatatagaaatattgctgggtttggttctgctactattgatggcccacttcacataccagatgggattcaatcagatgccatgttgtcaggcgcaaatgttgcatatggcgctacagctgcttttggtttgcaaattcctcctgactaccaggttaaccgtgcatctaatgattttgttgtcggcactcagtttcaagaggtggctaaaccttttattggtaatgagcacgaagtggcacctcctgacagagagcatgctcaagtagatacattgtatagtgaccattttcaaggtgttccatctgatctgcagaggagtaatgatgcaaatgtttctagtcaagatgtggttctagataactctggccaagcttgtgctcatgcagtggacggtatgacaagggaatttaatcattttgctcatagagacgctaatctttttgggagtactgaggtccctgcttctgagattactggggtggaatataatcaagatgcctctggttttcctcgacaaacagaggatgacaacacggtggagtataatcaagatgcctctggttttcctcgacaaacagaggatgacaacacggttgagtataatcaagatgcctctggttttcctcgaccaacggagggtgaaaatgcggtggagtataatcaagatgcctctggttttcctcgaccaacagaggatgaaaacacggtggagtataatcaagatgtctctggttttcctcgaccaacagaggatgaaaatacggttgagtataatcaagatgcatctggttttcctcgaccaacagaggatgaaaacacggtggagtataatcaagatgcttctggttttcctcggccaacggaggatgaaaatgccgcgtctgctacaggagataattctggcttccaagaaaacaacacgggttctcatatggatctggatatgatgaatgactatgaagtgaaggaatgcaacgattttgggagtgcgattcatggcgttgatacagattttctgaactatggtgacgacgacaacgacgacgacttcgacgacgacttcgagccaaatcccagcgagttccagtctctcgacaacagcggctggtcttctcgcaccaggggtgtcgcgagatatctcaagactctgttcgacgaggactccggtctggggaggaagagcgtcgccatcgaccatctggtgcgcgggaagacgcggaaggaagcgtcgaggatgttcttcgagaccttggtgctgacgacgaaggactacatcagcgtggaccaaccgaaccccttcgacttcgtgagcgtgaagccaggcccgaagctgctcatgtcagaattctagatcaacaaagtcagcgtacccctggcgcgatacattccttgttaccattgtatccatcatcgcaccgaccagcaacaacaccgcagatattccccccaaccacagtaccacaccctccctcccttccaaatccatttttgtgtatgttgttgcagttcccctcccctcccctgtagcatgtgctgcgctgatctgttgttgttgccagggcgtctgtccgagtaggatggtggttgtgttgtaccgtcggctatccaacagtatatagtagtagtacgattttagcgacactcgtgaagcccgccgtgtaatgtgctagggttcgcgctcccctaagttactgtcgctttagactggctaaagcccgtaggaattgtatacgacaaggacagggacagcccgagatgatgaatgatgtattgatgtgcctgttgact

SEQ ID NO: 34697 - DNA, 2628 bp, Zea mays
  Clone ID: UC-ZMFLMO17300C05_FLI
attttttttccgtcctccgccactgatcaggaccaccaatgggccatgacacttggaaatcctatgcttgggccatgaccaccaatgggccttcgccgagcatcgagaagcctccgcgcccgccgcacgccggaggaaaggaagtcaccccatccccaaattcccaaagccaacaccgccgagaaggacagagactggaagcgcaagagcaggcgccgcgcgtgctggcgatggagagggacgtcgtgctctccgcacccgaggccgctgggtcctcgtcctcccccgcctcctcgtcgtactcctccttcgccgagaccagggtcatctgccgcgtgtgtcagaagcagttcgcgcagtacacttgcccccgctgtaacgcccggtactgctcgctctcgtgctacaaggcttgcagcaggtaggatatggtaatgtcgcacgggtgtcaacagtcttccctaacgacatcttggcaccccctggctctgataccacttgtcaggaaccacgccggagagacaaccttcagcaggttgccggcgaactcctacctcccagggtcatagtgttcaatgcactgaatccttcatgcgtgagaatgttatggacgagcttaagcagatgcaacctgaggatgaatcaaagaaaaagatgctagatatcctcaagcggctccacttggaagaagagatggcatcagatggtgaagatggtatgttctgcgtgctacatgttcctatgccattgatctatcttactttctttaataataacactagaggtgcacataatttcatttttttttatattgtgataactgctaatgaggacaaaactacagatacctccatgccagtggtggattcagacatgagacaagagaggagctaaatataattgaaccataaactaaaagctataatttatataataaagaataactatgtaaactaacattgttcaagcaacatgtaaaatatttttcagctgcgagagagggagaggctggctgtgtcgttgttaggtcgggtggggctgggccttcaaacctggaatttccctgggctgctgaggtgaaaattacagggggtattctcatttttcttgggctcaccccgggatgagcccccctaccgcttgggctctagggctgcccctgctccatgcgcagtatgctacacttacgattttactgtttggtacattaagttttcctgtttataggtagttatcgagttatggtggcttgtctgttatgaatgtatttcctttcggtattacggataaattatatgtcatcttgtagataattggttgtacatatttatatagtagactgagaaacggcaaacccagtgccggaggtctccacatgagtgggtccgggaagggataaactgtgacctggtgactttgtgcgacagctctcaccactgtaccaggcctgcccttcaatattgctttagtagactgctgaagattttatttttgacatgtacctttttgtcctgcagagtccatgttatcagaggagcttattcaaaaagttatgtctggggaagagataaagctggaagacctctctgattgtgaaatcaaacgattccgtcaagctctggcctcaggtgagctcagtaagatgattgaaccgtggacaccttggtggaaaaaaccctcagccagatctatttcccttggcctggatggaagtcagcttatcagacaagtaaacgcagaagacactgctgtaccatatccagatccaaatactgaccaagaggctagcatcaacgaaatccctgaagggccagaatctcctctcccgtcattgaaacagttaacaaggacagagccatctcctttgcttgctgtccacttggttgacattctgtacagttactgcttcacacttcggctctacaacggtgattggcactcagatcctttgggtgcttgcactgtcgccctgtcgatgtcgaaagtcatgggccaggatgctaaacctgagactgtacctgaagcactcgcagcctgcatcgaggagacatgctcaccagcttacaggcatactggtggtttcaggtttgctattggactcgtggacgatatcatcgccattctctccttgggacagaacgcacttatttgtgccttatgcgacttccatcgactcattgaagttggtaagagcatgctcaaggtggagaaagtgggcaagacggagagggcacagaactctccgaagcttcgtagtgcagctaggaagctattcttcatgacttgttgggtccatgagcagccagatgaggcgtggccatctttagctcacatcgtccaggtgcagaaagcatctatggaggagttggagaccgggaattggaaggcggatagaaagagcaaaccacaatccgcggttcttatcgaggagctgtaggcatatggatgtaccactggaaattggatcgcgaggctatgtacccttgtgtatcgctcaggatgaatccaacgagagaccgtccttgtaatgcagttagttgcttctgtgtacactttttttgaaaaaaattgtatttgtatacgagtttgaaatcctagttgaagcgatcctgctttactttgcttgtt

SEQ ID NO: 34698 - DNA, 220 bp, Zea mays
  Clone ID: UC-ZMFLMO17300C09_FLI
ctgtgctctccttggagatgcctctctacgctgccagcttacctgcaagcgagcagactagctgagcccaacagcaatgaagtgtgttgtttttctttctttcttttttttctccagctgtgtgttctggaactaaattaggctgtcgtggtttttacttgatagtgagtggtgttgcagaggtgctatcttgtaacggtaaagtcctaactcatctaac

SEQ ID NO: 34699 - DNA, 655 bp, Zea mays
  Clone ID: UC-ZMFLMO17300D05_FLI
ggcattttagatgcttatttacggccataaaagttttctggcatctcatatgtgactgagataagccattttagcttgggtgttggttgcctggaattaagtcactatctgttgatcctttcctttcagaaacatgtttggtttgtgtgttgtcatatttttgccacttcaccgcataagaaaaatgtcagatagtgagaagattgaagaaagacaagaacatctgcagtgttgccaattcaatcttgcgatgcaaaagtatgatgacttggggaatctacagcaatcttgtaatattgttttgaaaaccctatttattttcttgtaacatgtgcctcttgcttcctttctttgttattataatttttttcgcttttggtgcagtttggaagagttatgttttgtgtctgcatgacttgtcatcgcaacaattgactgcatgaaaacagtaatagcaagaaacaggacaaggacatcttcagtgtccccagtatcagggaagtaactgcatgatgactgtcttggggaatctctgattctaatatcagattcaacttattttcttgcaagttgtctcttctcttgtgatcatgtttggctttctgttcttttgaagcttggcttgtccagtgttagctatcatattccaaatatc

SEQ ID NO: 34700 - DNA, 1444 bp, Zea mays
  Clone ID: UC-ZMFLMO17300D10_FLI
gtcctcacctcacacactctcttcttctctccttcgttctccctcgcaaagtcagggtcactgaaaggagcggaagagcccaagtagttcttcgccaccggtaccgcatcgatcatcatggtgttctcctcgctcccgatcttcctagaccctcccaattggggccagatgcagatgcagatgcagccaccgctccagtgtctcctcggcagcggcggtggcagcgaccaccaccacctcatgcctcctccgtccggcctggcgccgctgccgggaggtcctgctgacacagcggcgagcgctccggcgggaggcgtctcgtccacctcggtctcggtgcaagccgcggcgggagcgggggcaggggcgcagcctcgcccggtggtgtcgatggcggagcgcgcccggctcgcgcgcgtgccgctgccggagcccggcacgctccgatgcccgcgctgtgactcgaccaacaccaagttctgctacttcaataactactcgctgtcgcagccgcgccacttctgcaaggcgtgccgccgctactggacccgtggcggcgcgctccgcaacgtgcccgtcggcggcgggtgcaggcgcaacaccaagcgctccagcaagaagtcgtcccgcggcggcggcgcgggcgccacggcggccacctcctcgtcctcgaccacctccacctccaccacggccaccaccaccaccaccacgagcgcggccatggcggcggccgaggccatcgccggcatgcaggcgcagctgccccacctcggcctcccgcccgcagcagccgccgcggcgcttgaggcctcgctggagggctaccaccactacctcccgctccagatgcagccgcagttcctgcagcaggctggcctgcacggctaccatttcgccgacgacggcaccggcgtcctcgcagctgacgggttcccgaggggcgtcgtcgcctcggggctgctcgcgcagctcgcggcggtgaagatggaggagcacggcagcaacggcggaggtgccatcgcggcgcatcatgagcagcagtcctactggcccggcagcaccggcggtggcggtgggtggccggtggagttcttgtcggggttcagctcatcctcgtcggggaatgtgttgtgagttgcatgtggccgcgaccaggtccacctgggcatgcatgatggggggcatgcatgcatggatgctgatgaagctgaactagctcaccatcctcaattagttctagggtttatgtggtgtttggaacttaattggcgtcgtcttcttcaattaggctggtgatgatcttgtgttggggtaaggtttttacatgtttttttttcttatgagttttaagctggttaatgtcgtgcagttggtagttttgcatgtagtgggaagtgcatgtgttgactcatggaggttatatgtgtcaggttacttaact

SEQ ID NO: 34701 - DNA, 2197 bp, Zea mays
  Clone ID: UC-ZMFLMO17300E12_FLI
caagatcaagccactgctggactacctgctggcgctcaggtaccagaacactaagctgctcatcagcgacaccctcctcgacacggtgggcaagcttcaggccgcgctgctcctcgcccaggccttcgtctccgagcagcacccggacacgccgttccagcagatggcgcacaggttccacgagtggggactggagaaaggatggggcgacaccgccggggcgtgcggccagacgctgggcttcctctccgagatgctccaggcgccggaccctgtcagcgtggacaggttcttcagcagggtgccgtcggtgttcgacgtcgtcatcttctccgtccatggctacttcgggcagcacaaggtcctggggatgcccgacaccggcggccaggtcgtgtacatcctggaccaagttagagcgcttgaggaggagcttcttcaaagaatcaaagggcagggcctcactttcaagcccaacatccttgtggtcacaaggctcataccagaagcaaagggcaccacctgcaacgtggagctggaacctattgacaagacaaggcactccagcatcctccgtgtgccattcaagacccaagatggccaggatctgccccactgggtctcccgcttcgacatctacccttacctagagagatacgcccaggattcttgtaccaagatccttcatatattggggcgcaaaccagacctggtcatcggcaattacactgatggcaatttagtagcttacctcgtgtcaaggaagctaggagttacccaggggacgattgcgcatgctctcgagaagacaaagtatgaggattccgatgtcaagtggagggaaatggaccacaggtatcatttctcatgccagtttactgctgatatgatcgcgatgaacaccagcgacttcatcatcgctagcacctaccaagaaatagcaggaagcaaagacaagcctggccagtatgagagccactatgcgttcacaatgccagggctctgccgcttcgctacaggcatcagcgtcttcgaccccaagttcaatatcgctgcgcctggcgcagatcaatctgtttatttccccttcacactaaagcacaagcgcctcatgggcttgcacccacagatcgaggagctagtctacggcaaagaggaaaatgatgagcacatagggtacttgcaagacaggagcaagccggtcatattttcaatggcaaggcttgacaaggtcaagaacatcactgggctggttgaatggtatggccagaacaagaggctcagggaccttgctaaccttgtagtcgtgggagggctcctggaccccaagcactccaaggacagggaggagattgaggagataaacgagatgcacagtttgatcaacaagtaccagctcaaggggcagatccgctggataaaagcccagacagaccgtgtgcgcaacggggaactttaccgttgcgtagcagataccaggggagcctttgttcagcctgcgctctatgaagcgttcggactaactgtcattgaggcaatgaactgtgggctgccaacctttgcaacaaatcagggaggccccgcagaaatcatcgtcaatgaggtctccggtttccatatcaatccacttgatggcaaagaggcaagcaacaagattgccaacttcttccagaaatgcaacgaagatccaatgtactggaacagaatgtccactgctggactgcaacgcatctacgaatgctacacctggcagatctatgcaaccaaagttctgaacatggggtccatgtatggcttctggaggactctggataaacaagagaagcaggacaaacagcattacctacacatgttctacaaccttcattataggaagctggcaaatacggtgccaaaagtgggcgaacagcctgagcaagctacggcagcggcattgcctgataggtcggcaacaaggccaaaagaaagagggacacagataaggattcaaagaactgtgagcaacttacttggaccagtgcttccagcctcccatctctcggatgctgcctgaagtgaggggctatcctgaccaaaaccagatgtgtgcccgagcgataatctgtttcctccttttttttcctcataactgtcattgactgcaaaagatgtaaatggaaaataagtaaataaatgtgttaaaaacagtaaataaaat

SEQ ID NO: 34702 - DNA, 1781 bp, Zea mays
  Clone ID: UC-ZMFLMO17300F05_FLI
ctatgttgcatggtgcagaatgtttgtctagtcgccatcttataaaacttgcattttagcttctacaagaccctcttgtcacctagaacgctagatgctcaccactttattcactccgctttgattctatggctaacatcttcatcaatatctacgcctctctgtatcattgattttaaacactgaaaagtattcattcttgggcactacttgacctaactagcatctccttcctcatgtgtagtagtgtcgaagtcacatcttatatatttagttttagttctattgagtctaagaggttgtttggcatcgctctagagcaaaactccgaaggggagctggccagagctagccaaacaatgtaactccaaacttgcaaacttcatagagttttgagagctacaatacaaacttttagagtacatcttttgctgctctaaaatccttaaaaaacaacctagatatggagtttgaaggtatttacccgccactaccactagttatgagaaagcaatctagactttggagcagaactgctccatccagagttttggagcagagatgctctagagtggagcggagtcatgccaaacaccccctaactctagggtcttttgctgcaactccaatttcctatttgctcttgcttactttcatcaactagcattacatgattacatcgtccgcaaaaagcatacaccaagagatatcctcttgtatgtcacttgtgacctcatccatcaccaaggcaaaaaggtaaggctcaatgatgacccttgatgtagtcctattctaatcggaaagtcattcatgtctacatgacttgtcccatcattgttgtacatgttcttaatgagtctaattcgtgagaactttatgtttgtccaaagtcgatcacataacattccttggtattttgtcataagctttctccaagttaatgaaaaccatgtgtagattctttttttggtccatgtaatgctccattacttgtcttattaagaaaatggcttacatggttgacctttcgtgcatgaaaccaatttggttcatagagatcctcattatttctctcagatggtactcgataactctctcccattgcttcatgtaatcttttaacatttgttaagtttgctcattgttatctaagaatctaggttccacatctgaattataataacttctgcagtcttagaattttattagttatatatggttatgaattcctataccggtgttcatagaatcatacttgaagtttaataacattgctctatgcaactttgcaggctgaagccccgcttacagttactggattgttgaattcgttgggtcttgagaagtatattgttctctttcaggctgaggaggtggatatggctgcattgaggcaaatgggggagagtgacctcaaagacatgggggtacctatgggcccgaggaagaagattctccttgcagttggccctcagtcgaaacaacggcaaatatgagcaacatggtgtgggacttacgagcatttgttggcaactgaaaatactggtgcaagaacgccagatagcagatattgtatatcaatccatattgtctgtctcaatccactcttttgttgctgatggcgttgtttcgtgccgtagttgacaccatgtaaagtctattcagccagctgttaatctaggttctatcattcagtctgcctgcccactgttattgtttcgaaacgggtggatacgtgtggtttactcgtgacgattagtttgaaatggatgctacgttcg

SEQ ID NO: 34703 - DNA, 1496 bp, Zea mays
  Clone ID: UC-ZMFLMO17300G05_FLI
tgaaaagctcaatcctctccgccctttccacactaaactcccagcagactcccccactccccatgtcttctggagtaagaagtggcggcggaggagatcaccatggcgtccaccaccagcatggccacggccacctcgccggagccgacgacggcgccgagtacgcgttctacagcaacgacatggagagcttcttcttcaatcagccggcgtcggcggacgtcaataatggaggcagcagaactggcgccgacgagctcaccatgccgccgtactccagcgtcacggactacctacaggggttcatggacatggacccctctgggctagctcggcacctcgacgcgccgtgcctgctggcggaggacgccccgctcaagcatgagctgtccgtcgatgtgagctacgacagccagggcaccagcggcgcgcccggagatggggcggcggcgatgcacacgccgaactcgtcggtgtctctctcgtcgagcgaccgggagggggagggccagcttcgtcggtgcaggaagggcaggccgaaggcggaggatgatgcggagggggatgagaaagatcaagaagacggggagaattccaccaaagcgaacagatccaagaagaaggccgagaagaggcagccccgcgttgccttcctcaccaagagcgaggtggatcaccttgaggacggctaccggtggcgcaagtacggccagaaggcggtcaagaacagtccttacccaaggagctactaccggtgcacggcgcccaagtgcggcgtgaagaagcgcgtggagcggtcgtaccaggacccgtcgacggtggtcaccacgtacgagggacagcacacgcaccacagccccgccagcttccgcgccggcggcgcgcacctcttcatgcccaacgcgcacgcgctgccgccgcagcacctgatgctgccgtccagcttccgcccggcggacctgatgggcatggtgcaccccgtcagcatgggcgcaaaccttagcatgttcctgccaactatgcctcctcatatgccatcgccggcgtctcgtgctcatcctcttcagcagcagcagcaccagttcactgactacgcgctcttgcaagaccttttcccttccacaatgcccaacaacccataactaactgctacacaattagctagcctagctagaatcgacatgagagatgctgtccaagtactctgcgccatatgtgatcacctgatggccttgcgctttgggcttggtctaatggggagggaactgcagttattattgattgattaatctgctagctttcatcttaaacattggtttacagttcttacccttccatttgtcaactctccgctgcgcggattgcatgggaggtactagagatggaaccgagtactttttatagctatcactataacggcaactaatttatgtacggcgcctctagacttcttgtacgtgtacatatcatgtgttcctcattgaatcatttgggag

SEQ ID NO: 34704 - DNA, 2600 bp, Zea mays
  Clone ID: UC-ZMFLMO17300H05_FLI
ggaagtctgctgatccagggtggaagtatggattttggccggatcttcaaaataaagataaggtggaatgcaccctatgtggtcaggttgttagtggagggataaagaggttaaatcaacatttggcaggggcatatggagatgcaaagttatgtcccaaggctagcagtggattaaggaagtagatgacaagttatttggaggcaaacaagagaaaaagaccaatgtttctagatgaagatgaagaagatgatgaagtggtggaggtggcagcagcagatggagcgaatgatacatctgctgtggagtctcaagcatccaaggtgcagcctagttctggtacagcagccaaaaaaagacaatcaaccttgcaatttaaggcaagtagtaaagcacagccaaagacagccaagtccatagttgagatgttgcggagaacaccagaggaggtggtggatgagagacttttaggctcttatcagcccacaatcttggctagtgcaaaaagtaaggaggacaaacactatgtggacatgcagtgggctttgttcttctatgagtgcggtgtacctttcaatgccgcagcagctaggcagtttcagattgcaattgaggccacaacacagtttggttcagggtatataagcctccaacaccttaccaactaggcgagccattgctacaagaggttgtgaagtcaacaaatacaatgagggaggaacatgagtgtgcatggaaacactatggttgcacactcatgtctgatggatggtctgataggaggggacgtcatcttattaacttcttagtgaacagcccagagggtacttactttttagagtttgttgatgcatcaagtgaagtacatgatgcatacatgcttgctgattttctagagaaaaaagttgatgagattgggagagacaaggttgtacaagttgttactgataatggtgccaattacaaagctgcaggcaagcttctaatggagaggattcctactttattttggagtccatgtgctgcacattgcttggacctaatgttggaagacataggaaacttgaaggaattcaagaaaccaattgcacgtgcaaggcgtgtgacaactttcatataccgacacgggagaattcttgctgccatgagagagaaaactagtggggctgatcttgtgaggcctgctgccactcgttttgctacttcctttctcacattgaagagcttgtacaagcacaaggatgctttgaaggctttatttgcaagcacagcttggactgataacagattgtcaaagactagtgctggattggatgtgtataacattgtcttctccacacagttttggaattcagtagaagattgccttagagcttcagggccactacttattgtacttagggtggtagatggagatgagaggccagctatgccagaggtccaagcattgatgaaatgtgcaagggaaaagatcaatcaaagctttgctgtccaaagcaagaagactttactcaagaaaatcataactataattgaacggcgttgggagaaacaaatggatcacccattgtatggggctgcaatgtatttgaactcaggaaagctgcatcatctcataagaaatgatgatgatgctactgttggttagctaagaggttgctttcttgatgtgcttgcaagaatggtagatgatgaggaaactagagacaagatcaattctcaagcaatggattacgagtttcttagaggagcagctttttcaaataagatggccaaagataacctacaaactatgaccccacttgagtggtagcgttcgtatggtggtcgtgctattgagttacagagatttcctagacgtttggtgagtctttgtgcatcttcatcgggttgtgaacgcaattggagtacctttgaatttatccatacaaagaaaagaaactgattgttgcataagaggttgaattctattgtcttcatttcctacaacagaaagatgaaagctaggttccaaaaactacgccagaagaaggggaaaaactttgatccattggttcatgaggacttcaactaggacaatgagtgggctgattctttgcatgtagtccctgaaggtgggcgtgggtgtgagtgtgaccttacatgggaccttgtggataatgccattggagcatcacaagcacttcgtggccgaaacttaccaagaagagcccataatgtgtattcaagaagaaattctgttgctgcacaaaatatgtcagaggctaaagaggaagatgaagaagatgttccacatgatgatgcagaaatcacagattgttaagatgaatctaatggtggcaatgatggtgaagaaggggagacacccaatatcccagaagagtttgatgatgatttttgagcgacgggagagtagctattgctagattgcattagcatatttgctgcattactaactgcagctagttactattaattatgccattacaaactatctatgtggctatttcagatttggtattgtgctgttttaaattttgtgacttgctattgttcctttagaaactactttgtggctatttcagatccactattgtgct

SEQ ID NO: 34705 - DNA, 583 bp, Zea mays
  Clone ID: UC-ZMFLMO17301A01_FLI
agtaagcaatatcgctacccaatcagatgggcaaactgaaaacagtatctcaaacccaccacaaatggtcatcgagaatatttctctaaaggatcagcttgtaaaagaacagagcagatctgaggggttgtcggcagagataatgaaactttcagctgagcttaggaaagcagtccatgcacagaataaccttgcacgcttatacagacctgtattaagagacattgagagcaatctgatgaaaatgaaacaagaaacttatgcgacgatccagtgatacatgttgacatgttgtgaaactcagtcctctggcatgggctccacgttaggccttgttcggttaatcccgttacccatggattgggtgggattggaaaaaattaagaaaaggtttgacttagttgggatttaaactcacccaatcccactcaatccatgtggattgggagctaaccgaacagacccttactgattttcgttgtggatgtatttatctcatgccatcttcaagatgctggtgcaaagcagttcttttcgtggccaccatttataagtagagttcagtcgagatcgttgtacttgt

SEQ ID NO: 34706 - DNA, 2330 bp, Zea mays
  Clone ID: UC-ZMFLMO17301A04_FLI
aaccatactctgctgtttataataccgattcttctgcagaagcatctagaagagaagcccttttagtaaaacatgtgaaagaaaagctgagggagcagggttttgtagaggagagcatcaggacagattcatacttgaatttgaggtatgagggaactgatacagccataatggttagacagccagagcaaggatctggaaatgactatgctgatgagtttgaaaaattatttcagcaagagtatggcttcaaattgctaaacaggaaaatactcatatgtgatgtgagagttcagggtgttggtactacaaacatcctgcagcctcgtgaactgacgcaaatatcaaccaaacctgtgcaagaaagttcatgccggatttatttttcaagtggatggcaagatactccgctgtacaagcttgagaatttgggttatggccatctattggagggtcctgcagttattatgaatgggaatagtactgtgatcatagaaaaagactgtaaagccataattacaaagtatggtaacataaaaatagatatcaatgcagctccaagcactgtatcgatatcagagaaagttgcagatgtggtccagctttctattttcaatcaccgattcatgggcattgctgaacagatgggtcggacacttcaaagaacttcaatttccactaacataaaggaaaggctagacttctcttgtgctctctttggtccagatggcggccttgttgcaaatgcacctcatgtccctgtgcatctaggagccatgtctagtactgtgtgttggcagcttaacttttggggtgagaacctcaatgagggtgatgttcttgtaacaaatcatccatgttctggggggagccatcttccagacataacagttgtcacaccagtttttgatcacggtaagcttgtcttttttgttgctagtcgaggccaccatgctgagattggtggcatcacgccaggaagcatgcctcctttctcaaagtgtatttgggaggaaggtgctgccatcagagcatttaaacttgtcgaaaggggtgttttccaagagaaaggaataatccagctgctgcagtcaccttgctctgatgaacttgctggctataagatcccaggaacacgtaggatccaagataatctttccgatctccgtgctcaggttgcggcaaaccagagaggtatagcacttatcaaagaactcataaatcagtacgggttgatcactgttcaatcatatatgaaccatgttcaaaagaatgctgaggtagctgtcagggagatgctcaaaacagttgcgtctagagttgcaaaggagaatggatcatgtgttgtcgaggatgaagattatatggatgacggctctgtcattcacttgaaactcacccttgatgctattaaaggtgaagctacaattgacttcgagggtaccagtcctgaggtctatggcaactggaatgctcctgaagcagtcacaacagctgctgtcatatactgcctacgctgcttggtggatgttgatataccactaaatcaaggctgcctagcgcctgtgaagatcctcattcctaagggctctttcctctcaccaagtgacaaggctgctgttgttggtggcaatgtgctgacgtctcagagagtgaccgatgttatcctaatggcgttccaagcctgtgcctgctctcagggctgcatgaacaatttgaccttcggggacgacaccttcggttactacgagaccatcggaggtggatgtggagctgggccgacatgggacggcactagcggtgttcagtgtcacatgacaaacacaaggatgactgaccctgagatctttgagcagcggtaccctgcccttctgcacacatttagcatcagggagaacagtggaggttctggtttacacagaggtggtgatggccttgtaagggagattgagttccggcggcctattgttgtgagcgttctatctgagagacgggtgcatgctcccaggggactcaaaggaggacgagatggagatcgtggtgcaaactatttagtcagagaagatggtagaaagatttaccttggaggaaagaacactgtaacggtcagtgctggtgatatccttcagattttcacgcccggtggcggtggctttggctgtccttgatggcacttcctgcagacgcggaccttcctccatttgtttcctacctttgtacaccagtagctctatttagatcgcgattaaaataaaacgtaataaaaccgccaacaactggagattccttatgctattgttgctccccgaggcattggatccgaatgcagc

SEQ ID NO: 34707 - DNA, 1991 bp, Zea mays
  Clone ID: UC-ZMFLMO17301A08_FLI
gtcttcctcttccccatcagccgccctaccgagtcttcgcacgcacgacgcttcgtcaggatcgattcgcgagacctctcctgtccggatcgaggttcatggtttacatatgcgcgtttgtttactgatgcataccacgaccacctgatccgtatgtcaggacagatctcctgctttaatcgagtccagttcatgtatgaactttcccttttcctggcacgttgctagatgtaaaagggtgttccgggatttaaaagaaccacccacgcatccatgtctgaccagcaaaggcactacggcagctacgagctcctcccggctcacccagatctgcggtgcctggtctgcacgcggccgttcactcttgacgccgaggtcaccgacagcttggaagctttagccatatgcagggagtgcaagacgacggtgcttagtgacagcaacagggacgacactccccgagccaaccgacagagaagatggcgaaggcggcaaagctccatcaggggggtctcggtgttctcgcagctgatcaacctagctagacaacagggtcatgaggcggacactgattctccgacggttccccgccgccacacatcctatagttctacgccgagccggtcccagagggggcacacttccgacgacgagagcgatggtctgagctacgccgattccgtgtttggtgagatcgagtcgaacatcagtttcggcgatgagggtggggaatctgacacttctcttgatcgccacaccatggttgggagggaaattggcatacagcttgacaatgagagctacatgaacacagatacagatattgatcctatgaatgctggagtataccagtgggactcagacgatcctgaagacgatgaagatgaggaatcagaggagtctggtttggatgaaggagatgacaccatgcaggagcgccggcagcagtggcatgatatcgccccgagtggattgaatgagcaggaatctgaaggtgctgcgtggacttggagaacagttggaagccaaggcataaacaggactgatctgagagtcgacatggaaggacgggaaatcaggagactttttattgggaaccccggagattatgttgatgcaagacagtttgaaatgcttctcgagcaattcgctgatgaggataacagttccagaagaggagctccacctgcagcggcatcttccatcgaaaatctttcgtctgtggtcatctccaaaggctatgagataaacggtggtgtaacctgtccagtctgcaaagatgacatgcctatcaccactgtagcaaaacagctaccatgcatgcatctctatcattcatcttgcatcttgccatggcttaattctaggaacacatgcccagtttgtcgttacgagcttcctacagatgactcggaatatgagaggtccaagcatgccgcggtcaatgaaggaggtatccatagggtggagcgtacccatccgcaggaagttgttgaagaaacttatgaacctgaggttgatggaggttccaatacaggcggtgatacaatgaatgagactaatacacatgaacagcatactgcacagcagtcaaatggagcacatgggcgtcatagatggctgtttattgcagcagctccagttgtaagtcttgtcagtttagctctagttttgtgcttcaccaatcctgctggcaatgttaggaggcaattgtgccgtaggtcccagactaccactacggcacgtgtagacacaagaagaagttggtggtctatgttctaagtaaccagtgtttacctgctgatgctaaatttctgtgtgatggcgtgtgcttgttgccacttgccagtgttgtgtcaattgtgtatgaaaaggttctagataaatttgaagtgcaaactgtgtgtgccaaccaaggtgttcttgtaaccaagttcagacagttcagcaaaacaaatactgatgattgctgctgttcattgatattttat

SEQ ID NO: 34708 - DNA, 700 bp, Zea mays
  Clone ID: UC-ZMFLMO17301B01_FLI
caccaccaccaccaccggacagggacacggacggcactagctcgaggagggtcggcaagccagagtcacagcagaaggtgaaagggagcggatatgggggcggatcgtttcctgagcgtggcggagggcggcctcggcggcgaggcgctctacttcgcggtcatcctgtggctgtccgtcatgtcgtggatcatcttcacctgggtcggcgacggcggggaggacgggaggcgggggaggaagcgccggggcagccgcggcagcccggtgttcgtcggcgcgtcggggatctgcgacggcaccgggcccgagtgcagcggcgggtacggcatctgcggcacctgcctcgactagcctgctctgctactagtaagtttgtgtgagcgtcaaaagcgcggccatgtttgtagctgtagcgtctacatgtcgtcgtcgtcgtcgtcgtcgtcgatgcgtggcctcgatggagaagctggcgttgctctggtgatatgatgagagcagagcagctcccctgtgtgaagacaataagagggaggagcctactcatcagcctacttccatcttgcttattaggctgctcaaactgagttgtcgttagctcttttttttatttctccttcctttaaagtttgatctcgatcctctgtaaatttaagctgcagaagaaccaaatacatgtctcgaacagtactatgtg

SEQ ID NO: 34709 - DNA, 1008 bp, Zea mays
  Clone ID: UC-ZMFLMO17301C12_FLI
cgcgaagttaagccaccatgtggacgagggctttagcgacggtgctgctgttcgtggcaggcgccgcgctgctcggcgtcggcggcgccagcgcgcagcagggcgtgtggagcatcatcactcgtcccatgttccagagcatgctgagccaccgcggcgacagcgggtgccagggcgccttctacacctacgacgcgttcatcgaggccgccagcaagttccccggcttcggcaccaccggcgacgagcagacgcgcaggcgggagctcgccgccttcttcggccagacgtcccacgaaaccaccggtggatgggcgactgctcctggtggaccgtttgcctggggatactgccgggtgaaggaacagaacccgacggacccaccctactatggacgaggacccatacagctaactcagtaagatgatcagcagcagcacagccactctgcatgcgctatgtataggagtatatgcttgttgatcatactgtcatcgcatcgcatcgcatgcagtgagtacaactacaggctcgccgggcaagcgctgaacctgaacctggtgggcaacccggacctggtggcgagcgaccccgtggtagccttcaagacggccatctggttctggatgacgccgcagtcgcccaagccgtcgtgccacgccgtgatgaccggcgcctggacgccgtccgccaccgaccgcgccgccgggaggctccccggatatggcctcacctcgaacatcatcaacggcgggctagagtgcggcaagggccagtccaccgacggcgccaaggaccgggtcggctactacaagaggtactgcgatatgctccgggtggggtacggggacaacgtgccctgcaaggaccagaagccttacggaggatgaggacgtggacaacaataattatatggttgctgcaagccttcacgtgtttttgttgcctctctaccaactaagaataaatcaagctagcagcaaacaggggcaacctgctaccttcggc

SEQ ID NO: 34710 - DNA, 1559 bp, Zea mays
  Clone ID: UC-ZMFLMO17301E10_FLI
ctttccttagccggtgtcgtgcgcatgtgagatctagggagaggaagaggaggaagggttgtggggaccgggggtgcgagatgacggattcacctgcaactacaagaaaagaaagagtgagagatttacagaaacctccagagccgcggaggaggaggaggagattaggaggatctctacggcgctgacggattagttaaggaacgaaagatcacatcgtgtccggtaaccagattcagatgtgggcaccatgcgtgggtgaagggccaggccgaggtgaaagagattcgacgattgagaatacatcaaagaataaaaatgtggaactcggattttcagatgaagagcgtgaccaagaacttcctgattttccatcatttattccattcttacctcctctgagtgcagctaacctaaaggtctactatgccacacgtttcaccatcatagttgggataatggtgttcggtggttttcttgcaccaatcttaaacttggtctaggggcacatcttatgaagactccatccgcagcgttcatctgtcgacgtagttgagaagtgcactcaggttatacatctagtaaagagcaagacatttgaaagcttatgggccagctgtgttactgttgatgcaagcgaaagttggctggtggagcctataaaaacagctctgaggtcactcaccgcactatccgagccaatatgatttcttcttcaatgctaatgaaagaacttatcgttgttgcacaagctagaaggagtccgtttgataatattcaacagaagaaattagcagcgcttggagccaatgcagcgcgaaggcctttcaaagattttctcagtacattgacaagaaccaaagaaagtatatcgcgcgcgacacgtcttgctatggaatgtgctaaatttggcattctggtgagtttcagggcgccatcttgtttgagccttgtgaacggatttggaaatctagggcccctcccaaatgtaattttttcatgtggttggtggcgcacaatcgctgttggacagcagatcgactggaaaaatgtggcctcccacacccagctcgataactctgtgactaggtggatgcaaatctccaacacctactcatcaagtgtgtctttgctaggtgatgtatgatgcctttggtgttaggctacatgtagggaagcaagcagaggtcttgaaccagattgtgtatgagcttccatcagaacatccactggctgaaacaagaccactgcgagagctgctagggcacacacctccacaggtatttgctggcggagtgcttggatttgcagtagccacatttacagcgatgatcgctgggcttggtagttgactccgcatttgaagaaatggtcaacattcacattgaagttctggaattcaaattggacacatgtttcctagccagcttatgatagataatacgttgtgtataggtgtgtttaatatgaaaattgttgtcaatttgttgaagagaaacttgtgtcattcttttgtagttaatcgacgagtgaactatatgctttattcgttcctgtcc

SEQ ID NO: 34711 - DNA, 521 bp, Zea mays
  Clone ID: UC-ZMFLMO17301F01_FLI
gtttttagagatgatgttatcttcttgatatacgtctaccagaggtggaaatatccggtcgacaagaagcgtgtcaacgagtttggcttcggaggcgaggaggaacccgcagcccaggagactttggaaggaagtgatccagcagctgcagcagcagcagccgagccaacggaggacaagaaaaccaagtgatctccaatcgttcgatcatccaaatgtagcacgccactcagcagcacctgccctcccacagcggttgtgaaatttttcgctgaactggatgctggactcttgcggtcttgccttactgagacactgacgataagataagttgtgtgtgtaacagcctaacaggggatacaatagtgctgcctagggcagcgggcgaacaggcacactatcgctattacgtttctagcagccattactaggcgatatgcttgtttatattgttttttttgtacaattttgtgcatcatttttcaaaatacataacggcgattcttagcttcctaaaaaag

SEQ ID NO: 34712 - DNA, 1454 bp, Zea mays
  Clone ID: UC-ZMFLMO17301G08_FLI
ggccgcttccctgccgctccggcctcctccgtcgggaccgccgacgacgcgccgcgcggaagcctgcgggtgagcgtccagatccacccgcccccttcggcattccccgccgctccagcctcctccgccgggaccgccgccgacgcgccacggggaaggcctgcggggatattgggtaagcagttgtgatcctgttctcttgctcggatgccgggttactatgacatcgatgacatcctcatggaggatgagcctatttcagttgttttccaagtaactgcaaatggtgttggcctgctagatcctggtgctgaaagtaactgtgtagagaagggcgccaaggtggacctcccattttggcttgcgcatgggctgctgtctctggaacaagctgtgtcaataaacccacctccatgcttcacacagaagtagtttttttcagtgtttgttattgcattacaccatacacagaaattcttggatcaacagcaaagcatgggagagcaaggagtattcttatttggaaaaacatatatggaattccctatcaacaacttaataaaaggatctgatctttttgacaccattgtggcctactgtagcttttcatagtaaatagtagcattttgcagatctttctcttataacttgatgatagaacttattaaagacatgaatctattcaaacggttctccagaatttgacttttgctgcatggcttgggttttggttctgactatgaactaaagcgtgaaatacagattctgcagtattattctcctaacaaatctgtattctgttatctccatatcatatatactgcagaacttggaaggagatccaagctgatgcggcctgtgtggatttgagggttcgttgcccgtacttttatgagctaggatgcaagattgttcctttggtgagtgacaagagcattggcctgttcttgcgatatgcattcaccagtaggtacaaagaggttctaagtaagtcccacagttcttccatgatgacagtgcccaagttcgttccacgccttacaaaagaagaaactcgggtgtttgaatctgccagagaatcgatgactggtttcaagaaatggcgagcaggtgggatgagactgcaaaaggcttccattcttggccggaagaggaagacaaagctgcctgaatgagttttaagcatcaaccaaaaccagtataaatgtggagaaacagaatgaagcaggcaggtagacaggcgatgagcgatcggggacgaaggcgcgaccacgacagccaagcccaagagccaaccccggccggccatcatctctgctttgtcgtcaggtgaccccatctgccgcaggcccacacgacacgatcaagatgtgtgggtgttgtgaacctgaaccagtccatgtccatccatcgtcatgatgatcgacgcgaactgcactatctgtttacaaaag

SEQ ID NO: 34713 - DNA, 1906 bp, Zea mays
  Clone ID: UC-ZMFLMO17301G10_FLI
ttctacttctacccatttgttccgtcgcttcaacggcacggaagagaatcgctacccagccaatcgaagtcttctcttgccctgctgtatctcatatcctgttgcgcgagattcttggcgattctgctactggtttttatttttattttgctagttcttgaaatttctttcacgagtgtcagtagccaactgctgataacaacatcctatcgttcctgtagcccctttccgtgaccttgccaaagaatttgctcttctctgtgcgtgtgcaatttcttccgctacagctcaaggatccgctactctgctgttttgggagattcgccatgggcggcggggccgttaacgaccacttcccgggggccagcgacccgctgctccccacgaagcgggatggggacggggacgaggacgacgcaggtgcctccgcgttccacgagttcgacggcgcctccttcgccggcgcggtgttcaacctctccaccaccatcgtcggcgcgggcatcatggcgctaccggccaccatgaaggtgctcggtctcgtccctgggctcgtcatgatagtgctcgccgcgctcctcaccgacgcctccatcgagctgctcgtgcggttcagccgggccgcgggcgcgcgctcctacagcgcggccatggccgacgccttcggatggtggggtaggaggctgctccaggtctgcgtcgtcatcaacaacgtcggcgtcatgattgtgtacatgatcattataggcgatgtgctttctggatccacttctggtggtgagcatcactatggtgtgttagaaggatggtttggaatacactggtggaatgggcgtttatttgttctccttgtcacaaccctttgtgtgttcactccactagcatgcttgaagcgtattgattcactaagctatacatccacaatatctgttgctttggcggttgtattcgttattattactgcaggaattgctgtcatcaagttgataggtggacaaattccaatgcccaagttgtttcccactgtttctgatttggcatctgtttgggaactttttacagcagtgccggttcttgtcactgcttacgtttgccattacaatgttcacccaattcataatgagctaaaggactctacccagattaagccaatagtacacacatcattgacactatgctcgaccatctacatcacaacaagtttctttggatatctcctctttggtgaatctacactctctgatgtgctctccaactttgattcaaatcttgggatcccatacagttcagtcctcaatgatgctgtcagagtgagctatgctgttcacctgatgcttgtgttccccatgatattccatgcattgaggcttaatttggatgggctcctcttcgcctctgcaaggcctctgtcttctgacaacagaagattcggcataattacagcatcgctcctcctagtgatttttgggtctgcaatcttcattcctagtatttgggatgcctttcagtttactggggcaactgctgctgtctgtatcgcctttattttcccagctgcgatcactttaagggattcacaaggtattgccaagaagtgggacaaaattctggcgatcttcatgattgttcttgctgttgtatcaaatgtagtagcggtctacagcgatgcctacaaaatattcaacaaggaaagtgctccttctaatgcctggatcggggagtcaactgaaaatagatcttcgtggtggcttgtacgttagttggccaataaaatattcatagttcatttaggctttgtttttggtgatttgttccacgggccatggtctgctcaaatctcattgagttttgtgtgtatatctacgataggtatgaaaatttgcacaaaccgaagtgctccggtacc

SEQ ID NO: 34714 - DNA, 1143 bp, Zea mays
  Clone ID: UC-ZMFLMO17302A10_FLI
gtgtgcgtgggcaccttctgctgcgccgctgacgggctccccccgcgcgagcacggcatggcgtgcctgggcaacgtcgagctcgacctgtcggcgatgccaacgctggagcaggcgcacgcggtgatccggcactacggccccacgctgttcttccaccccaaggaggtctacctgccgtcgtccgtctcttggttcttcaagaacggcgccgcgttgtacaggcgagggggagacaccgcgggcgaggagatcgacggcgaggggtccaacctccctggtggcggttgcaacgacggggagttctggatcgacgttcccagcggcgagcggggccgcgccgtgtgccgcggcagcatcgacagcgcggagctctacgcgcacgtgaagccggccatgggcggcacgtgcaccgacgtggccatgtgggtgttctgcccgttcaacggcccggcgaggctcaagctgggcccgatcagcctcccgctgggcaagaccgggcggcacgtcggggactgggagcacttcacgttccgcgtcagcaacctcaccggtgagctcatgggcgtgtactactcgcagcacagcggcgggcactgggtggacgcctccgcattggagtacatcgacggcaaccggcctgtggtgtactcgtccaggaacgggcacgcgagctacgcgtaccctggcgtgtacctgcagggctcggcggcgctcggggtcggcatccgcaacgacgccgctcggagcagcctattcgtggactccagcgccaggtaccgcatcgttgcggcggggtatctgggcgagggcgccgtcgtcgagccgcagtggctgcagttcatgcgggagtggggtccgacggtggtgtacaagtggaggaagcggatggagtgggtgatcggccgcctacctccctggctcaggtgcagagcggagagcatgctgaacaagatgcccaacgagctgtccagggaagaagggccgaccgggcccaaggagaagaacaactgggagggagacgagagatggtaagactggtacgtaggaacagtgctcaacgatgtgattttataacatgtgtggcttaaattaaggggcgtgctatatttaggtgtttgaaaaacagcttcttcgcggacc

SEQ ID NO: 34715 - DNA, 566 bp, Zea mays
  Clone ID: UC-ZMFLMO17303D03_FLI
gcccaacaccaggattatgatccatcagcctgtcggaggtgcaagcgggcaggcccctagatgtagaggtccaagcgaaggagatattgaccaacaagaggaatgtcattcggatcgtatcaggcttcacaggccgcactcctgagcaggtagagaaagacattgacagagatcgttacatgggccctctcgaggctgtcgattatggactcattgatggcgtgatcgatggagacagtattatcccacttgagcctgtcccggagagggtgaagcctaagtacaactacgaagagctgtacaaggatccacagaagtttcttacaccagatgtcccagatgatgagatatactagtcgaaaagttgtattttgtgcgaatgttaagtctgttcttcagcaagcagatgtttttcgtcgcttgtagctgtcaaaccaaccatagcactagtagcttattgatcttgtttactgactggatggtgattcgagcaggcaactagaacctgttggttgtgtttctggtgttacattgtggtgttagaatggtccggctgtttcgttttg

SEQ ID NO: 34716 - DNA, 1062 bp, Zea mays
  Clone ID: UC-ZMFLMO17303E12_FLI
cgacgacacaacacatcatgacaacatgtgaagttgggcatctgggcctgcagtcgtaccaggtggctatctggctctagaacaagcgagcgcggtgagatcgggcacgactacgccacacacgcgttctaggctaagtactacaagctgcacgcttgccaccctcgtcaagtcgcttaggtaggagaaggtcacgctcgccgtgcaggtctgcgtaatttgcagagcatcaatctctctttcacattggttactgacattggtttgaagaagatctctggcttgagttcactgaagtctcttaatcttgacaatcgccaaatcacagatactggtttagcgtctcttacaggtctcactggattgacacacctcgacctatttggagctcgcataactgattctggcatgagctgcttcagatttttcaagaatattcagtccctggaggtctgcggtgggttgattacggatgctggcgtgaagaacatcaaggacctgaaagctctgacgttgctcaacctatctcaaaacggcaagctcacggacaaaaccctggagctgatctccggcctgactgcgctggtgtcgttgaacgtgtccaactcccgggtctccaactcgggcctccaccacctgaaaccgctgcagaacctgcgctccctatccctggagtcctgcagggtgacggcaagcgagatggataagctccggctggtcgccctccccaaccttatcagtgtgcggccggagtgatacgaccgccagcgctcccacagcgacctgtaactgtggagcaagtggcgcctggctagagcaggccgccttgtacatacttttgcaaaaacgaggtgtctgtacatattgttcgtcgtgtcgtgtcgtgtcagtgtgcctgatggcaacgggctaatacgtccgtgccaacgtgtgcatggtatcccacggaccctgtggtagtaaggagcagttgtaaatatgccgtgcttcctctccatgtggggtgctgctgtataaatagattggtgcattgctaaatacctctgcttggtaacatcgtgg

SEQ ID NO: 34717 - DNA, 747 bp, Zea mays
  Clone ID: UC-ZMFLMO17303F06_FLI
gcgatgcgggggcggctgaggcggacgagatggtgatgtggccgccggccccgatcttggacctggcgcggctggccgtcgactccggaggcgatcccggtgccatccaccgcgcgctcgacccaacaatgctgccggtgccagatgttgagggttcccagaagaataaatgccatctcacaagaacaccgtatgggaggcgctttgccaatgaggagatcaattcatattttgcattcttgttcgaattgattgtggcacgggcaccttcggttggattaaatgtatcactgaatcgctatgatttgttccatgggcatcttttccttgcatcggagacaggacggcttggaattctctctcctgcgtattccagaaaaagatacaagactagctgagggcacgactactcctaagaaggagctcctgcagcaaaggaatgctctgagcaaagagaaatggcgatgatcagtctgaaggaatgctctgagcaaagggaagcttctgtgtgatgtcgctgctgcctggtgtcttgcctgtggccagggttctgttttgggtcagagtgctgctgcgtttcagtgcgcgtgttcaggaaggatcttggtgttaggcttttggtttcagctatgttgtcgtggtgttctcctcgctaaactgggctcatccgaagtgtgtgttgagtgtggtcagtctgtatctgaacctttatatgctttcttaaaagcagagtaataatctcgtttc

SEQ ID NO: 34718 - DNA, 2282 bp, Zea mays
  Clone ID: UC-ZMFLMO17303G09_FLI
ccacacgcaccgaccatcccctgccctcatcagcaatccccggcccgcagcgtacaaatacacgctccccgccgctccgacctcactttccccgcctccatcaccaattcacgatctcctttcccgcaccgcgccccggatcgccggctcgcaattccggagttaaattcccctccaccgcaaccgtcatgggcggctcccacagccgcgaggacgtcgatctcacctcctccgacgaagaggaggaattcgaggacgactatgacgcccgatcacccatcgcggaggccgcagcgagcgcggggcagcgcgacgacgacctcctccgcaccgccacaccttcctcgcttgaggccatcgacgccaagctcaggtcgctggatctcaagtaccagagacctaccgccgccaagctctacctccacgtcggcggggcctcgccttccgcgcgctgggtgcccgccgagcgccgcgcgacctacgcattcgtcgaccagtcgagcgacgacgcctcctcccccaggtggttcctagaggttgggccggggccgcgggtctccgcgcccgtggactcggcgctccagctgaagacgatccccgcgcagcgccgggcggacttcgccgcgagcgggtccgtatgggctctgcgactacccaccgacgccgaattgcgccggttcagggtggagtacgagcgctgtcttttcgagaacacgtacggagtggaggccacggacgaagggcggaaggaggtgttcggcgccgacttcgccgcgtgggcgcggcctgccgaggccgacgacactgtttgggccgacgcggaggaaagcctcacccctcccgccgcagcaccagggaaggacctgcttaaggagttcgaggaggaggccggcgacggcgacagcatccagagcctcgcgcttggggcgcttgacaacagcttcttagtcggcggcgccgggatacaggtggtcaagaacttccgccacggcttgcacgggaagggcgcgtcggtgaagatctcgggaggccgtggcggcagtgggagcgcttattcgacgccgaagaaggcactgctgatgcgcggcgagactaacatgctactgatgagcccaggagaggctctgcattccaatggtgttcaccatgttgacgttgagactgggaaggttgtcgcagaatggcggtttgagaaggatggagctgatatcacaatgcgagacattgccaatgacagcaagggagcgcagttggaaccctccgggtcgacattcttgggcctggatgacaacaggttgtgtagatgggatatgcgcgacgccagaggccgggtgcagacaatcggtagctcatcagactcaccagtgctgaactggtcacagggtcatcagttctcgcggggcaccaatttccagtgctttgcaagtactggggatggttcaatcgttgttggttctgtggatggcaagatcagactctattctaagagctcgatgcgtatggcgaagacagcattcccaggccttgggtccccgattacacatgtagatgttacttatgatgggaaatggattctgggaacaactgacacatacttgatcttgatatgcactatcttcaaggacaaagatgggaaagaaaagactgggtttagtggccgaatggggaataggattgctgcaccaaggcttctgaagctcactccacttgattcagttttagccgggaccgacaacaaattccacggcgggcaattctcatgggtaacggagaacggaaagcaggaaaagcaccttgtcgctacagtcggcaaattcagcgtcatttggaattttcagcaagtcaaggacagcaaccatgagtgctaccgtgatcagcagggcctcaagagctgctactgctacaaagttgtcctcaaggatgaatcaatcgtcgacagccgcttcatgcacgagaagtttgcgacgagtgactctcctgaagctccgctcgttgtcgctacgccaatgaaagtcagctccttcagtatagcaaatcgacgctgactccgaagctcttttccccagttgtgcagaaataatctgagaagttgcaggtttttgttcagtttgttcctttttcctcttttagacggtttggttagttctgttggtacagaactgatcgaggttcctcccgagaagaactggtttttgtgtcgtgtgcatgtctggtcatttgtagcgggctagcggctcggtaaaatggtgtgtatgtctgttggataaaatgtaccatgtgac

SEQ ID NO: 34719 - DNA, 1158 bp, Zea mays
  Clone ID: UC-ZMFLMO17303H02_FLI
tctctccctagctgagattgagcaatatctacaattatgggaggtaattgaatcttttcagcttcaaaattcaaatgatcagcatgtgtggatatttagcaacgatggtctgtacacctccaaatctgcctataaagctttattcattggagcagaatcctttgagccctggaaaagaatttggaagagctgggcagcgcctaagtgtaagacctttgtttggctggccataaataacaaatgttggacagcggacagacttaaaaaaaggggacttcagcatcctgaattttgtgttctatgtgaccaggaagacgaaactgtgcagcatattctatctaattgcgtcttcacaagacagttttggcataagattttaacccccattggtctctcttctgtgagtcctaagagaagagattcagtttttgctgaatggtggagaaaggcttcaaccaagattccaaagagcaaaaaaaaggggtttaatagtatgataatccttggggcttggagtatttggaagcagcgaaacaggtgtgtttttgaaggagctcgaccttgccttaataccttagaggatggatttaaagatgagatgagattgtgggtttctgctggagccaagaacttgcgctctctttttgaccctggatagagaaaggaaagccttatagcctactaaaagacgggagtgttggggtcgtttgtgtctgtgtggtgtgtgctttgtaagggtacgataattgatcacgtaatgtggaggacaaaggatggattaatctcaaggtgatgctgatgaataaacctgaagaatggatgatctgatgaagtactaggatgggagatgctcactaagtggccgtcatttaacaacactaacgtagtgttatcccaggttgtaattttgttctgttgtggatggtgctaagtgccggtgggctcggccttcttatataagtatatcccttctatagtttctttaatgaggattgtcacttaagctagcatatattttcaaatttacgaatactttataacatttcaaattgtaattcttttgaatcactttcttttgtaatcttttgtaatcactccgatgaggtataataatatcttgataaacttgtaatcattttgtaataaagaatttatttc

SEQ ID NO: 34720 - DNA, 753 bp, Zea mays
  Clone ID: UC-ZMFLMO17304G12_FLI
gtgagagcggttgttgtcgaatttgatcgctacttcaactactacaaagtttagtaagtctatagtgcctcgcattgttacagcctacatgttactgcgttatttgtcttcattcattcatgttcatagatatagagatctaacatcaatcgttgtacaaggcatgtaaactcgccgctaatgcatttttcaggtatgggacactatgcaacagtgagaaactagggtgccttttcatcacaacaaataggatgcgtcgtcactaatcttacatctcactacaagtttttagattattacatctcttcaccttggcaggtttggaatcacaacatcccagatatgcatgatgggggactggttggttatcgatatcctgtttggtcaaaatggaggttgcaagactctcctcgttctccagggttcttatcaattcctcaattctaactctgacaaaggcactactgatttaacatcagcataaggttctgatttaacattaggataagaattgagcttggctgtccatccacagtcgaggaggaagcggaagccatcgacgacgaataggtagcacatggggtcctccccgtacaccccactgagaggcgtcacctacactgacgtccccatctgatctggaaaatactgcaaacttctaacaatttgacttgtagtcttttatatcttgtagataaaccaatacacttttatatatttgttactgatgataacttagtatcataaggcagc

SEQ ID NO: 34721 - DNA, 2166 bp, Zea mays
  Clone ID: UC-ZMFLMO17305C04_FLI
cacggcgcggcgcctccgatttttttcacgggggagcgcccggggcgaggctataaaaaccgcgtctcctccacgccacctccgcaccgcagagagaggacagaggagcgatccatcatccccccccgagccgtgccaaccaagaaccatccacccaccaccaccaccccggccgcttccttgtccctgcccctccgttggtctcctttgcccatctcatcctctctctctctctccctctctctctctctggcggtcggcgtggctccgggggcgcgaagcgcgggctcggcggggcgactcgccggcggcgacctgcaggtttgggtatgagaggggtcacccacgcggcgcccaccacaagcgccccccgcccccgcggacgcctcatggacggcctcctcatcttcgtcttctacctctcgctgcccacccgtgccggccgcgaccactcgtcaatcgccgcctctaattgttagccgccgccggcacgccattgctcggcacgcctcccgagaagctcgatctgcggcctagccagccagcctcacgcgggatcaggatcgatggaccagccaccgaatggattcgccgccggaggttttttcacgcacattgatgggcaaaaccgttctcccccttctataattgtcattgggggagggatttcaggcatcgcagctgcacgtgctttgtcgactgcttcatttaatgtcacactcttggagtccagggaccgacttggtggccgtgtgcacactgactattctttcggttgcccaattgacatgggagcatcatggttgcatggtgtttgcaatgagaattctttggcgccactgattaggatgcttgggcttaggttatatcgcacaagcggtgataactctgttctgtatgaccatgatttggaaagttatgctctttttgataagcatggtcagcaagttccccaggagatagtaagcaaagttggagagacatttgagagaattcttaaggagactgtcatagtaagagatgagcatgcaaatgacatgcctctttttcaagccatagggatcgtgtttgacaggaatccgcatatgaagctgcagggcctggaatatgaagtactgcagtggtgcatatgtaggctggaggcatggttcgctactgacatggacaatatatctctgaaaacttgggatcaggaacatatgcttaccggtggacatggtcttatggtgaatggctacgaccctgtcatcagagctcccgctcaaggtctagatattcacctcaaccacagggtcacaaagatcatacaacgctataacaaggttattgtctgtgtggaagacggggcgagttttgtcgcagacgctgctatagtaaccgtccctctcggggtactcaaggcaaacatcatcaagtttgagcctgagctaccgaaagagaagctctcggcaatcgccgaccttggcgtcggtatcgagaacaagatagctctcaagttcgacactgtgttttggcccgacgttgaagtgataggtagggtggccccgacgtcaaacgcctgtggctactttctcaaccttaacaaagccacaggaaacccggttctggtgtgcatggtggccggaaggttcgcgtacgagatcgagaagctgtcggacgaagagtccgtgaacttcgtcatgtcccagctcaggaacatgctgccgcaggcaactgacccggttcagtatctggtctcgcgctggggtagtgaccccaactcacttggctcctactcgtgcgatctggtggggaaaccagctgacctgtatgaaaggttctgcgctccggtgggcagcctgttcttcgccggggaggctgcctgcattgaccactccgggtcggtgcacggagcttactcgtcaggcatcgccgccgcagaggactgccgaaggcgtctgtcggcgcagctaggcatctcggccggcctgttccaggtcgggaaggctgccatgagggaggagatgacggctgaagccatggtccccttccagatatccaggttgtaagagagaatctattcaacaccgtctttgtgtcaccggtttgttgcttgatgtaattgtaaaatggtgtaagaccttgtttgttggaatattcgatggtggatgctgtttttcgtcaggt

SEQ ID NO: 34722 - DNA, 765 bp, Zea mays
  Clone ID: UC-ZMFLMO17305D07_FLI
gtgacaggcaatgtggtaaaaaggtgacaaagtctgattcaggcaactggctatgtgacaagtgcaatcaagagtttccagagtgtgattacaggtatctcctacagttgaacattcaagaccacacgggaacaacttctgtgacagcatttcaagatcgtggacaggagatacttggttgctcagctcgagagctcaacatttttaaagagaacaaagatcctcgctacacagatgtcttgatcaattgcttgtatcagaactatctgttcaggctaaaagtgaaagaagaacaatacggcgatgtacgacaagtgaaaaacactgtggccaaggtggagagggtggatcctttggctgagagtaaatttctgcttgattccatttcaaggtttataccatgagagttttgttcttacatctatcagctgctggtaagtgtgttgcccgcttagaagtgataattaatatgtagctttccctactcacacgcccggaggtttctttctcggatagaattctatcattcagcagtaaagagttttctccacttttggtctgccagatacctgcagcttgaagctatgtgctctttcataattaactgaacgcttgtaagtgtgattatgagagttctgtttagctcagctactttgtggttactactattttggtttagtttggtatagtcggacattcctactgctccaacagtgggcatgaatcaaccattaatgcgatggagaaaccattgtcttttgtgcc

SEQ ID NO: 34723 - DNA, 1581 bp, Zea mays
  Clone ID: UC-ZMFLMO17305F01_FLI
cgacggcgggcggctcatcgccgtcaagcgcttctcgcgcctctcctggcctgacccgcagcagttcctcgcggaggcggcgggcgtcgggaaggtgcggcacaggcgcctcgtcaacctcattggctgctgcgcagagggtgacgagaggctgcttgtcgccgagtacatgcccaacgacaccctgtccaagcatctcttccactgggataagcagccgttaccatgggaaatgaggctgagggttgcatatttcattgcgcaagctctcgaccattgcaatgctgagaacaggaaaatctatcatgatttgaatgcttatagggtactttttgatgaggaaggtgatccccgcttgtcaagttttggattaatgaagaacagccgtgatgggaaaagttatagcactaacctggcttacactccaccagagtttctacgaactggcagagtaattccggagagtgtgatctatagctatggaactgtcctgttggatcttttgagcggaaaacacattcctcctagtcatgccctagatttaataaggggaaagaatatactgttgctgatggattcctccttagaagggcagtatgctaatgaagatgcttcgaaattggttgatcttgcatcaaagtgtctgcaatttgaatctagggatagaccgaacataaagtatcttctgtcttctgttggtcctcttcagaatcaaaaggaggttgcatcacatgtgttcatgggtattacaaaagccacatccgtactgccaaccatttgttctccactcagaaaggcctgcgctggtatggatctttcagcggtgcatgatattttgctcaaaacaggttataaagatgatgagggtgcagaaaacgagctatcctttcaagaatggacccagcaagtgcaagagatgctgaacacaaagaagtttggtgacattgcatttagagacaaggattttaagactgcaattgactactactccaagctagttgcgatgatgtcgacgccttcagctacagtttttgtcaggcgcagtttttcctacttgatgaatgggcaagcagagctcgctctacgggacgccatgcaagcccaggtctgcatgccagaatggcctacggccttctacctccaggccctggctctttcaaagctcggcatggaaaccgatgcccaggacatgctcaacgatggcgccacgtttgaggccaagaagcagaacggctggcgcagttaggagccgacgacgaacaaagtctctcttccaacgactccgtgccgttgccctttgagagaaaaaggtacaatggcgagtctcctccaaatcagttcactgggacacgcctgttgcactactagtagtgggattgaaacgcactgttttatcgtgcaatctcctctcgaatgtcggtaacgagtgatgatcatgatcaggggtggaaaaataggtcagggcctttgaacgcatactcttccgtgggttgcgctttgtgttgctggcgatggtggcaggatctgcctgattgttgcaactgcagttgtaattaaagggatgctttctaaaaaaaaccc

SEQ ID NO: 34724 - DNA, 1624 bp, Zea mays
  Clone ID: UC-ZMFLMO17305G04_FLI
atattgcattttatctgttttcagtgaattcttctgaaatgaggtcgatttctgatagaattgctgcaagtccgcttcgagtacctgcaagtccatctagattttcactgtcttcgccaccaagtagaaacgagcctttaaacatcagtcttgaacatgttgttaaactgacacataactttgcgccgaccttgatgattggcgaaggttactttggaaaggtctacagagcggcgctgttagatggacgtgttgtagctattaaaagggcaaagaaggaaaattttctctctttacgtgctgaattcagcaacgaagtcgcattactaaaaagtattgaacataaaaacttggtccagttgcttggttacattgacaaagccaatgaacggattctcataacagagtacatatcaaatggaactcttagggagcatttggatggtcaacatggcctagttttgggatttaatcagcggctcgaaattgctatagatgttgcccatggattgacttatctgcatctctatgcagagaagcccataatacacagggatgtgaagtcatcaaacattctactgacagaagctttcatggccaaagtggctgactttggatttgcaagaactggtcctactgagccagaccagtcacagattgagactgatgtgagaggaacagcaggctatttagatccagagtatatggggacaagccatcttacgatcaagagtgatgtgttctcttatggtattttgctcctagaaatcctttcgggacgtcgtcctgttgagagaacgaggggtccagcagaaaggattacagtgagatgggccttcaataagtaccgcagaggcaatgttaggggcatactggacccaatgttaactgaagcagtgaacgaggatatactgaacaaaatcttcgatgtggcgttccagtgtgtcgctcctacccgcgaagacagaccctccatgaaagaagttgtggagaggctgtggaagataagaagggatcatacaaaaatacagaggatagcagaattgactctctgaatccttaaggctctgttcgttttttacagattggaggcccgaaacggttcctgaccggattgtttctctaatttatataagttttgataagttggaatgaatcctggtccaatactagacaaacgaacgggccctaaaccatctggtcctggttgctgtttttgcttgggagaacatgggtcagttcctagtgaagaccaaagaccgccacataaaaataattcaaattttgtggttgtgaacaactgggattctttaagagatgtggggaacaatgccctgcgattgatggtttccctgtagccattactgttaatcagcataagctgttcagtcatcgtcctcgagaagtacagtgtagcttcggtgtacggcatccttgtactttggaaaacagttagatatgaaggaaacctctgactactaatttcttctggatataactagtgaaggaaactaaaaattattattcctcactcgtgtaatcttgcaaagactttttggtttatgaaatgtaaatgacaatggtaatgatttatgcttgagtaccaacgataataagtttgaat

SEQ ID NO: 34725 - DNA, 501 bp, Zea mays
  Clone ID: UC-ZMFLMO17305H05_FLI
catttcacaggattctaactcgtactacatcttaacaatgatctcccttgttggtattgtgtctttcgtcattaccttctcgtttggtatgggtgccattccatggctcatgatgtctgagatcctcccggttagcatcaagagccttggcggaagcatcgcaacactggccaactggctgacatccttcgccataacaatgacgacgaacttgatgctcacgtggagtgttggaggcacttttctctcgtacatggttgtgagcgccttcaccatcgtttttgttgtcctttgggtgccggagacgaaggggagaactctagaggagatacaattttcgtttcgctgagcattcagcgtcagctgcaatggtttgcccgagtgtttatcttaggggctgtttagatcccatgaactaaagcaaaaaggagctaaaatttagtcactttataaactaaagttccaatcaggaggagctaaaagtgaataaaatagcaaaag

SEQ ID NO: 34726 - DNA, 1139 bp, Zea mays
  Clone ID: UC-ZMFLMO17306A02_FLI
ttccagcgcaagggtgagacgtcaggaacgacggcgacacttgttgtggttgatgggttcacggtcactgtggcgtcggtgggagattctaggtgcattctggatacacagggaggcgaggtctcattgctgactgtggatcaccggctagaggagaatgcagaggagcgtgagcgcgtcacagcgagtggaggagaggtcagccggcttaatctctgtggtggacaggaggtgggtcctctccgatgctggccaggtggattgtgcctttcaaggtcaattggggatactgatgtcggcgagttcattgtaccgattccacatgtcaagcaagtgaagctcccaaatactggtggaagactaataattgcatcagatggaatatgggacgctctgtcctcagagagtgctgctcaggcgtgccggggattacgtgcagaactggctgcaaaacttgttgttaagcaagctctgaagacaagtgggctgaaagatgacaccacatgtgtggttgtcgacatcatcccatctgatcattgttcaacaccaccagcattgtctccaaagaaaaatcagaacaagttgaagcatcttatttttggtaaaaggtctcatagttctgttggaaagctcagcaaatctgcttcattgggttcagtggaagaaatattcgaggagggatctgcaatgttggaagaaaggttgggaagtaattttccaccaaaagcaaatctgcctccatttcgctgtgcaatctgccaagtggaccaagagccattcgaaggtttaatgacggacaatgtaggtggctgctgctcaaccccatcaacaccatggggtggtccttatctttgctcaggctgtaggaaaaagaaggacgcgatggaaggtaaacgatcgaatcgttcaacgacgtgcaggtgaaggttctgataggaatcactgggactgggtcctgtgatcctgtcatgcaagcttgcaaagtagtctccgatttcggttttctgctccttgtaaaaagagaagaataaaccgtctgtcgtttgattgaagtattgttcggtgaaaactaactgcactccagcctgatctgagaaaaaccggggtactaataacaagcctgatttctattgacatcc

SEQ ID NO: 34727 - DNA, 1813 bp, Zea mays
  Clone ID: UC-ZMFLMO17306A12_FLI
agagtgagcagcttcatggttctgcaagtgagcagcaagctagagagcaacttcatggttctgtaagtaaacagcaaactgaagttcttcgctccaatgtcagcagtggcgatgcctcaaaatgtcattttggccctatagttactcagaagctgaaggaacattttgaaaaagatccatatccttgccgtgcaacaaaagagggtctggcacaagagctaggactgacatttaatcagatcagtaagtggttctctgccacccatcattattcaagagatgctgttgccaagaaccaaaaatacccaggagaaaatactactgagaataatagtagcacaatctttgatggtatacaagtaatagaacccaattttggtttgatagataaaccagatgcagatacaaatgacatgatttctgaaaagttgatggtacaaattaatcttaacgaaggcattgaagaggatatcccaccgagccaatatactaccaggtgtgaagagaaattaactatgactcaagctgccatctcaagggaagctggacctccaggttatggtcctggagaaaactttcttcaggtcagttcaaggattactagctgtgagcagagtgtgataatggctcctagcgctatcgcaagaggagttggtccaccaggatatacgcctggagaacaccagggcaatggggctccatggaatacaagctatgagcgaagaccgtttacgagtcctgcgactagctcaagagaagtcggacctccaggatatgggcctgaagaaaaccaaggcagtggcatttcctgtaatacaagcagagagcaaatattgtttatgagccctacaaccatctcgagagaacttggtccaccaggatatttgcccagagaaaaccagcgcagtgacacttcatggaatacaagctgcgagtcgggactatttatgagtcctgcgaccacctcaatagaacatggtccaccaggatatgggcctggagaaaaccaggagaatgacagtacaagctgcgagttgagaatgtttacaagtcctacaatcgtctccagagaagttggcccaccaggataccagcagggagtgtttatgagtcctaaaaccatctcaagagaagtctgtcctccaggatttgggtctggagagaaccagggcaacgacactacatggtacaaacagagcgcgtttacaagtcctacaaccatctcgagagaagtcggtccgccagggtatggacaggaagatcagggcaatggtggttcttggaacacgagttgtgagcagggagtgtttacgagtcctactagaggcatctcaagagaagtcggtccgccaggatacgggcccggggaaagtcagggcaataccacttcgtggatttcgacctgccagcagagaatgcttgcaggaatccagagaactggtggctcaaggagtatggacttggaagcctttccaccgggatacggacctggtggtgcttcagggagtgtcataagcccccaagctcggtctgcagagaatgtagaattttcggacgaggctagaaaaaaggctatacagcgggagctgagacggcggcagaagttcaggtgaaggcaatatatccagtcttcaagacaagacaatatatccagtcttgatggctgaatgagtgggcgaccttagttgccatcaagcaaaacccttgttgtatcagctgcttatcttccttttacagacttgcttggtttgtcaaggatttcttatgtgaaccctcttgaacctgaagtattcaatgcgctgtgaatttgtgc

SEQ ID NO: 34728 - DNA, 2778 bp, Zea mays
  Clone ID: UC-ZMFLMO17306B11_FLI
gtacacgcaaccacttaatagggacgaaacgggcagagagagcggagggaggagctcaccgccaagccttcgacacgtccgccgccgccgcagtcgtcgttatcgttgtcccacctcgccggcgagccaccagcactgaccacgacggagcggctgcccgcgggccgcggcgggtcaatcgggcggtggagccgctcggttccggccatgggccactcggttgggtcgattcaccagcgatcaagcggagcaatctgggaatctagcttctgtttctggtaaaagatacacctttttctgttgccacgtattgtagtttgggacggagttgattggagttggaagggatggatccacggatgtggagagcgagacgacagacgacaattgttttgcgcactcacctgcccgggccttggcttggctctacacatggttccattgttcttattttctactctttctaatagttttaaacttatatttttttcattaagtgaatgcttatttcttttttacccacgttatacaggacaagtgtactggtaaaactgaatgatacgtttttttagttttgctaatgcaattgatcttacttctgccttgaaggaggtgaatggtatgaatgaatactcgcttctttgatatatcctttggctattagaggtactgcaacttacagaacaaagaatcatgcaggaaaatatgtaggaaaccggccaatcaaattacataagtgcacatggaagaatgagatagacttagaagctttggagaagggaaatgttagttttcaaggtcatatcatgtgttccttttatacatatgagtgatcagcttgctcaagtgcattttgctaattttctgcaaacccgaccacagaagaaaatgaaactgcagaaaaaagtgtcttcacaagtgaaaattaataattctgcttgttcatcgtctgtcagtaccacatttgctcgcctgtgccgatttaccctctctgatgacggcagaaagataaactcattttatcattcctttgtggaggtattatgcttaattgttagggtccgtgcatgcacgcagagcgaaacaaagtgcattttggctcctactctcctagccctcctaccactggcagcattgtataggcataaaaggcactgcgtaagagacctttcaagtttcatctatttttttagaatgttgttaaaaattttgggtgaaggggtccatcaggacacaactgcatggttggttaacactcaggatgcaattgtaggctcatgattgttggctccccgtatcgggcagttagacttcctcctgctttctctacgaagctagcgaggtgggcatgattgctgactccctgtatcaggcattttgacttcctcttgcgttctctgcgaagctagcgaggcgggcgacagcaggcacttctccggtgtaggcaagattgggttcaaaggtcattctccgacacgctcgactcgtggcagcgtcacacattggaccaggggcggtgctcgaggacgaaagcgctcaccatctacaactctacagggctgacagagtatgatccggatggggtggatgcgagggcgatcaaagagatcattgagggggttcatgtgatcaggcttggcaagtacagactcactacctggttatcgtgaaatttctcggatagcacaaagaagctacgtttgatggattagtgcttaatttccatggttattggttgattacacctctgaaaagcttgatttcaacaaatcatcgacttttaaggatctttcaaaatcagttggtgcgttggatgaaaaccgattctaagtttttattacggatctcacaactctagcatggaaatcattctccaatacttgcttaggctcgagccatctacatctctgcatctgagttttcaggttgtcactttgctcattatggaaatatttatcattgcttcctcaaaatccgagcacataactattattttcaaaacattattcataaatttgtcaatacataatttctattgtcgtatttcaccacagttcaaaataagggatctcatcatattatttacattgtgcagtgtggcaaatttgaccatacagatcgtttgttccaaagcattgagagcgcctacataaatagcttgttaaatacaagtgacaccaaagaacttattccaaaatccttttacatgcctgactgtcttgaaaattcaaatttatgtcatcttagtgtcaagcgggatggggaacctataggcgatgttgctctccctccatgggcaacgggtttgcctgaagaattcattcacatcaacagagaagcccttaaaagtgaatatgtgagctctaatctccataactggattgacatcatatttggttacaagcagcgttgatagccagttgttgaggtgcaactgtgttatttggatcatcattgaaacactgacagtagaacactacctaactcgcatatatttggataggcagcagacatattgtactacgtgatgaggagtctgctgcgttctttttacaggttatgggcctgcaattatgcccctttgtttatatcatcgcaggggcgatgtctcttaacttagatttccttttcgtattgaacgctgggaaacgcacccgatcatgccaagagtagcttgtctgcttccttccttctcgagcaatccgtatattttgccaacagattttgtaaactatattgatgtttgctgttttgtattcatgttttatactaattttt

SEQ ID NO: 34729 - DNA, 1399 bp, Zea mays
  Clone ID: UC-ZMFLMO17306C04_FLI
aaaagatatggaggccaagcacagggaagtagaggcccattagatggtagctgtgatgaacccatgcctctcccacatccaatggttggatttaacttgccagaccagtggtcaagacgagtggacagatcgttgcctgcacaagctattggtccaccgtacttctactacgagaacgttgctcttgctccaaaaggtgtctggactaccatatcaagattcttgtatgatattcaaccagagtttgtggactcaaagtacttctgtgctgctgccaggaaaaggggttacatacacaacctgccacttgagaacaggtcacctctcctccccatacccccaaagacgatatcggaagcatttcctcggaccaagaggtggtggccttcatgggacccaagacgacagttcaattgcctccagacttgcgtgtctagtgcaaaattgttagagaggattcgcgtagccctcacaaacagttcagacccacctcctccaagagttcagaagtatgtgttggaggagtgtaggaaatggaacctggcatgggttggcttaaacaaggttgctcctctagagcctgacgagatggagtttctactcggctttccgaaggatcacacgagaggtatcagcaggacagagaggtatcgatctctaggaaattcatttcaggtcgatactgttgcttaccatctctcagttctgaaggatctgttcccacaaggcatgaatgtgctgtctttattctctggtattggaggagcagaggtggctctccacaggcttggcatacggatgaacacggttatttcagtggagaagtccgaggtcaaccggacgattctgaagagttggtgggatcagacgcagacgggtactctgattgagatcactgatgtgcagacactgtcatctgagaggatcgaggcgtatattagaagaattgggggcttcgatcttgtgattggtggaagtccctgtaacaacctcactgggagcaaccgtcaccacagagatggtttggagggcgagcattctgcattgttccatcattattttaggatcttacacgccgtcaagtccatcatggagcgtttgtagttcttagaatatttactgttgttttggttctagtagaatactttgtgaccgaacttgtaaatggtttgcaggttgactggtttagttctcttgccactctaatttaggctagtttttttttattttatcttctttggtgattttggtgcagttctgtggcactgttgggtagtcaaatgcagattgatccgagaggctgccctgatgtttttcctttttaaaatttgaatttgtcaatgagagatcaggtatcctggttaccaaaaaattaaatggtttgcaggttgactggttt

SEQ ID NO: 34730 - DNA, 1368 bp, Zea mays
  Clone ID: UC-ZMFLMO17306E03_FLI
ctgctctctctcgcctctggttggcagagctctcttgaagcctcgagactcgtctcgccgctgctccctcagctctgccgctgcgtgcctccgttagctgttgcattgcagcgcagccccgcgagccttgagctgctagctcgcccttcaccacagtcctcagacatggagttcgaagaccgctgccacaaggtccaggagcccaagttcgactgcctgctcttcgacctcgacgacaccctgtatccgctgagcgccgggatcgcaggccatgtcaagaagaacattgaagattacatggttgagaagctgggtattgacgagaccaagatcgagaacctgggcaatctgctgtacaagaactacggcaccacgatggctggactcagggccatcggctacagcttcgattacgatgagtaccacgccttcgtccatggaaggctgccgtacgacaacatcaagcctgaccccattctcaagcacattctcaagaacctgcgcatccgcaaactcatattcaccaacggtgacatggtccacgccgtgagagccctcaagaggctgggcctggaggactgcttcgaggggatcatctgcttcgagaccctgaacccgccctgcccgccgcagggagaccaggagcccgagatcttcgacatcgccggccacttcgcccgctccggcaccgccgacgagctgcccaagacccccgtcctgtgcaagcctaacgtggacgccatggaggaggcgctcaggatcgccaacgtcaacccgcacaaggcgatcttcttcgacgacagcgtacgcaacatccaggccgggaagcagattggcctccacacggtgctggtgggcaaatcgcagcgggtgaaaggcgcggaccacgcgctggagagcatccacaacatcagggaagcgctgccggagctgtgggaggaggccgagaaggcggaggacgtgctctaccccgaacgcgttgcgatggagacctcggtcaccgcgtaaaacccctgaatgcctccggtgcaccgtcagccgaactttctcgacatctccaggaccgcatcaacgatcacatgtcactcgctccccgagccagggccggtgatgatctcgcgctggaactgaatccaccagcaatggccgggccgaggatcgatttccgacagcaggaagggtgcagcatgtaaagggggaacagatgagatcatgtttgtttgggttggtcccccgttgtatatgtagttatgtatcagccagtcctttgtttgtaaattaccagtatttagaagtaataagaaaatgggggtttacgtgtacgtttcctgtgctctgtcatctgaagcaataaaactggttagcaag

SEQ ID NO: 34731 - DNA, 1115 bp, Zea mays
  Clone ID: UC-ZMFLMO17306F09_FLI
ttttgttggttgtttaagttgtctgccttgtttctggtacacctaactattttctgccatcttaatatgttaatttgtcagaaagattggatcaggacatcagtgggattttggcaactacttgtgatcactctttccgttgctcatgtgtttcagtgtggaccaattcatcctgtccggtatgccagttttgtcagaagcagtctgaaaattctacatgttctgtttgccaaaccactggaaacctctggatatgtgtgatatgtggttttgttggatgcggacggtatcaagaaggacatgcgaaacagcactggaaagatactcagcattgctattcgctagatttggaaacacaacgtgtttgggactatgttggtgacagttttgtacatcggctgaatcaatccaagagtgacgcaaagcatgctaagttcaaatcaaaaagtaaatattctggggatgaatgtgtaaactgctcgtgcaatgatgactctgatatgggtggagctatgttcagcagcaaagctgaaacaattgtggacgagtacaatcgtctcctggcaagccaacttgaaactcagagagagtattatgagggcctgttgtctgaggctaaaagaaacaaggagcaccagatttctgaagctgctgataaagctgtaagtgataagcttgaagagatgcaacttaagctcgagaatcttattgtggagaaaaagaaagttgcagatatgaacgaaaaactcactaggagccaagacatgtggcgccagacactaagagatatagaggaaagggaaagagcacagttgaagtcgaaggatgaaatgattctcgatctggaagaacagataaaggatttcaaattttccatcaaactgcagaagtcaatagagaagaacgatggtgtcaagggtggtacgctggttccactccctacggtttcagattctggaggcaagggtaaaaggtcatcaagaacaagcaagaggaggaattagtatcctttgctgagtagcaattagtcttgactggaacagacgtatacgaaccttattggcatgtatttactagcctgttatgatgaactacagcgtgatgtttgatttgtc

SEQ ID NO: 34732 - DNA, 1590 bp, Zea mays
  Clone ID: UC-ZMFLMO17306G10_FLI
agctaagctgcctccgtccatcggcatggcgactaccactactaccatcctcctcctcctcctcgtcgcagccacagccgtctcggcggccgacctctccgtgtaccacaacgtgcacccgccgtccccgtccccgctcgagtccatcatcgcgctcgcccgcgccgacgacgcgcggctcctcttcctctcatccaaggcggcctcgtccggcggcgtcacctccgctcccgtcgcctccggccagactccgccctcgtacgtcgtccgcgcggggctcggcaccccggtccagcagctgctcctcgcgctcgacaccagcgccgacgccacctggtcgcactgcgcgccgtgcgacacgtgccccgccggcagccgcttcatcccggccagctcctcctcgtacgcctccctcccgtgcgcctccgactggtgcccgctcttcgagggccagccgtgcccggcgaaccaggacgcctcggcgccgctgccggcgtgcgccttctcaaagccgttcgcggacacctcgttccaggcgtcgctgggcagcgacacgctgcgcctgggcaaggacgccatcgccggctacgcgttcgggtgcgtgggcgcggtggccgggccgacgaccaacctgccgaagcaggggctcctcggcctcggccggggccccatgtctctgctgtcccagaccgggagcaggtacaacggcgtcttctcctactgcctgcccagctacaggtcctactacttctccggctccctccggctgggcgccgccgggcagcccaggaacgtccggtacacgccgctgctgaccaacccgcaccgcccgtcgctctactacgtgaacgtgacggggctcagcgtggggcggacctgggtgaaggtccccgcggggtcgttcgtgttcgacccggccaccggcgccggcacggtgatcgactcgggcactgtgatcacgcggtggacggcgcctgtgtacgcggcgctgcgcgaggagttccggcggcaggtggcggcgccgagcgggtacacgtcgctgggcgcgttcgacacgtgcttcaacacggacgaggtggcggcgggcggcgcgccgcccgtgacgctgcacatggacggcggcgtggacctgacgctgccgatggagaacacgctgatccacagcagcgccacgccgctggcgtgcctggccatggccgaggcgccgcagaacgtgaacgccgtcgtgaacgtggtggccaaccttcagcagcagaacgtgcgggtcgtcgtcgacgtcgccggctcgcgcgtcgggttcgcgagggagccctgcaactgagcccctgaatccgtccgtgccctatgcacgggaggaaggaggagacgcgctgcggctgccgcatcggtcggtgtgcagttagttgtcctgttagtctatgctacgttgtctgcactctgcaataacggacgtgacccggggaaaaaaactgtttcgtcacgggtagctagagaatcacgtaaggctcttgttttcgtttgtgtcctataatgtatggctattggcctgtttcgagaggttaaaatttggaggtgctgcatcaaattcgt

SEQ ID NO: 34733 - DNA, 1643 bp, Zea mays
  Clone ID: UC-ZMFLMO17306G12_FLI
tgaaagatgaatttcagaaagctagagactgggtggcagagtcgttagactttgacaaggattatgatgcgagtgtttttgaaacgaccataagggttgttggaggtttgcttagtgcatatgatctatctggtgataaagtatttcttgataaggctaaagatattacagatcgactattacctgcttgggatacaacatctggcatcccctataatagaataaacctagctcatggacgagcccataatcctggatggaccaacggcgatagtatccttgcagattctggtacggagcaacttgaattcatagctctgtcacagaggactggggatcccaaataccagcagaaggcagagaacgtcatcacacagcttcagaagatatatcccagtgatggtttgcttcctatttacataaatcctcattctgggacagcgtcatactccactatcacgtttggtgctatgggagatagcttctatgaatatttgctcaaggtctggatccaggggaataaaactgagcatgtaaaacactacagacaaatgtgggagacatcaacggaaggtctattaagtttaacaaagaaaactacaccatctaattactactacatttgtgaaaagaatggtggctcattgtctgacaagatggatgaacttgcttgctttgcccctggtatgctggcattaggagcctctggttatgggccagaaaaatcagagcaaattatgaatatggcaaaagagcttgctaggacctgctataatttctaccaaaccactcccacgaagttggctggcgaaaattattttttccacgctggacaggacatgagtgtgggcacatcgtggaacatcttgagaccggagactgttgaatcacttatgtacctatggcgcatgacggggaatacaacataccaagattgggggtgggacatattccaggcatttgagaagaagtcccgtgtagaatctggatatgtgggactgagagatgtgaacactggtgaaaaagataacatgatgcagagcttcttcctggcagagacgctcaagtacctctacctacttttctcccctccatcagtcatatcctttgacgagtgggttttcaatactgaagctcacccattgagaattgctccagtaaattataacaaaggcattggaacaccggtccgtccattcgggagaaaacagggaaagcctgagtaaccttggataaagagcagtggatttttttttgaatccgacgtctgattctggcctccctgatgaagatgtgttctgacacgagggaactttctgcctgaagcagcaagggttagaaatcacggcaatagattgtttagagagaaaaatcataggtagatcatgatgctatatgcggggcagtgacctccatggggtggtatggtcggagctcaagagcccccatagaagcttttatctttggacttgcttacgcaccctgatgtgcgttgttgatgtgtagcatacatctaactcactgttcatatgttgttgctttcctgggacctctgcggagctgtattgtcattatttggcccatagttattactttttttcagatatgatttatatatatataagttgtttatggctttcgtt

SEQ ID NO: 34734 - DNA, 2535 bp, Zea mays
  Clone ID: UC-ZMFLMO17307A04_FLI
tcctcttcgggcctcggccttctccccctctccacacggcgtcgccccctcccatttctccagcatcgacgatgaacggcggcggcgggcggcggcggtactcctcggagcagctcctcttcgacgttccctccaatgccggtgccggccggtgggcgcagcagtccggtggagtgcggcgcggggacggtgagatcttcgtgtcggtggagccagctacgccggcgcggctgcgcggaggggacgccgcggctggggactcgccgggacagaggcagcagctcagtcccgggttgctcgatctccatgctttcgacacggagctaatccccgattttcaagtaccagggatgtatgatggtgcccaaaagtttggctatggaggaggtctagatgaatctgatatgagattcacagcaaacaagctgatgagcaagtctgctgtttttcctgatggtaactacctgaaggccttcacagagaaagagaaggcagcacctgtcgcgaaaatcaaagtggtggtgcgcaaaagaccacttaacaagaaggaagtatcaaagaaggaagaagatatcatagacattgaacaaagatcaaactctttgactgtacatgagactaaacttaaggttgatcttactgaatatgtcgaaaagcatgagtttgtattcgatgccgtcttagatgaagatgtttcaaatgatgaggtttatcgtcaaacagtggagcctgtggttccttcaatttttaatcgaacaaaggcaacttgttttgcttatgggcaaactggcagtggaaagacatataccatgcgtccccttcctcttaaggcttcccaagatatcttgaggttaatgcaccatgcatatcgaaatcaaggatttcaattgcatgttagcttctttgagatatatggtggcaaattatttgaccttctcaatgataggagcaaactttgcatgagagaggatgcaaaacaaaaggtttgtattgttggtttgcaagagtatagagtgtccgatgtagagactatcaaggagttgattgaaaaaggcagtgctaccagaagtaccggcacaaccggtgcaaatgaagagtcctcaaggtctcatgccattcttcagcttgctattaaacgccgtgtggatggcaatgactccaaaccacccagacctgttggcaagctgtcatttattgaccttgctggcagcgagcgtggtgctgatacaactgacaatgataaacaaacaagaattgagggtgctgagatcaataaaagtttgcttgctttaaaggaatgcattagagcacttgataacgatcagactcacattcctttccgaggtagcaaattaactgaagtcctgcgtgactcattcattggagactcacgcactgtcatgatatcatgcatttctcctagttctggttcttgtgagcatactctgaacacattgagatatgctgacagagtgaagagtttgtcaaagggaagcaatgccaagaaagatgtgtctttggcagtgcctttaagagagtcgagcccttccccactgccttcagttgtaccctcattctctgcatctgaggtgatgaatgatatcaccgagagaaacaattttggttggcccaagcagcagtatgttaaagaacagcctgctccgacatttgttgaacgaatgcccaaggtgaaggatgccgtggagttcgcaacatcagacggtgcttatttgaagggacaaagaagccagggctgtatggcaccaaatatagctgaaataccggatacaatgtaccagcagagaaggcaaccagcaaggaaggctaaagataccgctttgcggaataatatgagaaattccgttgcttacccaactagaagtgttgagccagacgaagatgatcatctgaataatcttctccaggaagaggaatgcttggttagtgctcatagggagcaggttgaagcgactctggacatcctcaaagaggaaatgaacatattaggcgaagcggatcagcctggcttccaacttgacgactacaacatcacaagactaagcagtatactctcgcagaaggcggctgggattgtggacctacaggctcggttggagcagttccagaggcttttggatgagaacaatgtgctgctgtatgctcagagcccccggttgtagttccatctgttgccttcatggcaccgtaaaaggtgggcatcggtggcttctaccagcgcctcaggtggcatcatatgcggtatcggcgtgtcgctgtggccatgacccatggtgccggtgaaacgcaaactagacggctagttcacagcctgttgccatggttctttggcattgccggccccgcaacctgttttgtactagagttgctccattcttgtcttcccgcgctccatccataatccaatgtgtatatcttatatttgtccgtgtcacatgagtgctctgttatttgtagctcaacaaatacattgttttacctttctgatgtatgaagttttccagagtgtacggtatc

SEQ ID NO: 34735 - DNA, 1999 bp, Zea mays
  Clone ID: UC-ZMFLMO17307A09_FLI
atatttttaattctgacaatccagaggaggataaggtgaaacttggagaaccaggatggagggaaaggtactatgaagagaaatttggggcaagaacacccgagcagattgaagaaatacgcagagatgttgttctcaaatacacagaaggattgtgttgggtaatgcactactattatgaaggggtatgctcatggcaatggttctacccttatcattatgctccgtttgcttcggatctaagtggattgggccaacttaatattaaatttgaacttgggacaccattcaaaccttttgatcaacttatgggtgttttcccagctgcaagtgcccatgcgctaccgctacagtatcgacgattgatgaccgatccaaattcaccaataattgatttttatcctacagattttgaagtagatatgaatgggaagagatattcttggcaagggattgcaaaactaccgtttattgatgaagatcgtttgttggctgagataaaaaaagttgagcatactttgacgcctgaagaagcaaggagaaacagtatcatgtgtgatatgctttttgtgaatgggtcacatccactttcgccttatatctactctctcaacagcaaatttggacatctgcctgacaaaaggagaaatgaaattaaagaaaaacttgatccttctgctagtggaggaatgaatggatacataacactttgcagtggggatccatgccctcctatctttaggtctcctgtggacgggctggaggatattatggacaatcaagtgatatgttcaatctacaatcttccagaccatcataagcacatagcccagccgccagttggtgttatcatgcccaagaagattgttgaagccggtgatctgaaaccacctccagtgctgtggcatgaagatagtggcaggcggcctcatgataatagcaacaggcaaaacccatctggtgccatatcaggccgtcaacttggagaggcagctcaccgacttgtcataaacagcttaaatgctcagggtagggggcaacatagtggcacatcaatgccatatcgaactataatgaatggcttgcatcatctggatgtagcgtcccctgtcagcgatcaaggcatgcgtccacaagtggggcagtctgccggacctcctggttggtatgttcctaggggtagtgtatcaaatggtcaaccaccagcttatgcatcatcaggatcaggtcattatcagtatgaaagttcggggcattcacaatatgaacaaggtaaccatggaaggcaacaatctcacccatatgcaagagatggcttccatgatacacgaggaagggttccacctgcatatgggtaccagcagagcaacatgtatccatcgggtcctggattgtatgggcaacctccatcagcatatcctggggttcatggtggaggctaccaaccccctccatatggcggaggccagcagtggcagcaacaatcatatagttcgtatgccgtgcgaggcccctacggaggcaggccaccacccacaagggctgattcagggtcacagcaaccacagaaccgttatggtgctttagacagaagtaacaaccggaggccttcatctggatacagaagataatagtttgtgacccagtttatgttatagctcaaagtttgttatcagtagagcttcgagtaactcagctaaagcataggcggaatagtctgctaagtcttgtgaccttcaagcagttagggggtggcatcaaagatattgggaggcaaaatttgtatgctagtgcagactttcaggtactagcggttttgatcgccattgaagcagctaggtttgcggcatcagaggttttgcgaagcaagatttgtatactactgttatcaacgggccatcaggtactggtggctggtcgccattctttatctgtagttaccatttgtttagaagatgtcataaacggccctggggcttaaataggtcccattgagaat

SEQ ID NO: 34736 - DNA, 1304 bp, Zea mays
  Clone ID: UC-ZMFLMO17307C10_FLI
ctcgcccccatcatagccacgcccctcctctcccactcctcctcctcctctttcccttccatctagtagcatctaccgtcctcctcttctctccgtgtcagtctctgccttcgtcgtcgccgtttcagtcgtttcctaaaccttctttagcttgcatgcacttccctactgctgctagcaaagacctttattagtagtgtcaattaagttacgaaagaagaagaaagaaagaaaatttcgaggccgagaaaaaagacggctttgatctctctgctagtgtggtgtggtagtgtgtgcttctagtaagtaagcgagccagggatcaagaagcagagagctgctttgtctcttttgtctcttgcaagaatggcttcctccagcgggagcgggagctcgggctccctctcggcggcaacggcggccctggccgccgcggcgggcacggaggaggagctgcgcgcgctcatggagcagcgccgcgcgaagcggatgctgtccaaccgcgagtccgcgcggcggtcgcggatgcgcaagcagcgccacctcgacgagctgaccgcgcaggcggcgcacctgcgccgcgagaacgcgcacgtggccaccgcgctcggcctcaccgcgcagggcctcctcgccgtggacgccgagaacgccgtcctccgcacccaggccgccgagctcgccgcgcgcctcggctccctcaacgacatcctcgcctgcatgaacaccaacgccgtcggcgccgtcgccgtctccctcacagccgccgccgccgccgccgccgcttcctccgacccctgcctcgccttcgacggcgccaccgccctggacgacctcctcagatcctgccccgagaacatgttccagtaccagctctgctagctccagaccgcgcgaagtcaccatggcagcgcaaaacaccttcttttcttttcttttgtttttttttttttcttcttcttcttctggtgtttcaggtttagtaatctgctagtgagatggaagaactgaggtcagatcagacgtggtggtgactagccatgaaagtgaactttactgttaccgtactgtgcgatcaactggtgggggtaattagctagctagctagctgctggggttatggttaatgcatgaactgctattagttaccaggtgtaagtgtaactctcgagtcctgctcttgttactgtttgtgtactgactgtgtcactccactactatgtaagaatcagagcagtaagtttactagtgtctctgctgcgccaaacaaaggaagtgcaccatataatctacactttaattac

SEQ ID NO: 34737 - DNA, 1168 bp, Zea mays
  Clone ID: UC-ZMFLMO17307E10_FLI
aaaatcttgatttcatactatcgaatttggtactgctccgtacgagacttatgagagtgattcatgccccttccagagagtctgcatcatgttctgtttggtgcaggtggtttcctgacgattaccaagctctgggccaatgacaccttgaccctccatttccccattacccttagaactgaggcaattaaggatgaccggccggagtacgcgtccatccaagcggtgctgttcggaccgcacctcctcgccggcctgacacacggcaagctgccagtgacagacagcagccactccaacgacggcctgaccgcaggcatctgggaagtggacgccacaggcgccgcctccgtcgccggctgggtcaccccgctccactccgagacgctcaactcacagctcgtcaccctgaaacagagcattggcgggcgcaccctcgtcttgtcggtgtccatcgctgacgcgaagctggagatgcagcagcagcccgcccccgggaccgacgcgtgcgtgcacgccacgttccgcgcctacggccaggcgggcggcagcagccagctgctgcgagggcccaacgtgacgatcgagccgttcgacagaccgggcatggcggtcaccaacggcctcgccgtcggctgccgtggaggccgcgacacgctcttcaacgccgtgccggggctggacggcgcgccgggctccgtgtccctggagcttgccaccaggccggggtggttcgtggcgacggcccccacagcgatgcacgcgaacgccaccacgcaggtcgtctgccgagccaacaagggcggcgcggcgttccggcgagcggcgagcttcgcgcgcgcgccgccgctgaggcgttaccacccgctgagcttcgcggcgcgcgggacggcgcggaacttcctgctggagccgctgcggagcctgcaggatgagttctacaccgtctattttagcctcgtctccgacggcgagagctgattgatcggtgtgctcctgaacgaacgctccgctagtttcgctgtgcaatgagccattgacgctctgtatcccccatgaactatgtgcaatttggagtggagtaaaaatgtatggcgctagttccatgaatccatcaaaattcccttaccgttaatagcttaaattttggagtaattactctaatttt

SEQ ID NO: 34738 - DNA, 1953 bp, Zea mays
  Clone ID: UC-ZMFLMO17307E11_FLI
ataccttctgtttcctctcaccttccactcctggatctccagctccaggcaaggcccgaactggggaattccgatctcaagagcccccaccaagcgctcccgccgatcccaaggactcctgcctccgatgcggcaactcatcccatccggcttctaaagccgcggcccctgtggtcaattccggtggccggcggcatggattccggcgccaacagcatcggcgagtcggtgggcgagtcgccgtcgctggcgctggcgccggagccgcagacacggccggccgagccggtcaccaagggtcgcgggctccgccggtggcgccgtatcccgcgcgagcagcaccacgaggggtctccggtgagccccggggccgataccagcgttggagttagcgcgggtgaggacttggcggcgcagctccacaagcgtcgttacggtcctgccgccgatgagcccaagggaaagcaggacccggctgcagcagaggaggtcgagagctccgttgcgtccgtggagtccagcgtcgtgccgctggaggcgtccccaccgccggcgccgactaggttggacccgaatctaggccacctgattgccaccgctggtttctcggtgggcgccggcggcgccgattcggacaacagcgacgaccgcaccagcaagttgtccacggccgccagcgcgccgcgccacgacttctcgtccgtcggcttcggccgggagcgcgatagggcgcggtcccgcgcccccggcgctgctcacggcaagggcatccgtgctgcacgtgtgcgcggcgccactatgcgtgttgcctcttcccctgctgaagcggggaattctcgctccagcgtcgagtccaacctccggagctctaacgctgctcatgcgcggcgatctagtgctggcgtcacaagcaacggtgttcacaaggttctgttccctgatggtcatcaaagtgacgatgaacctccaagtggggacatgcggtatggtacaggacgtttctacaaggagaatgggagtatagaagggagattggggaactgtgactccgactccaaccatcataccttcgatgaagccagcgtgggcaagtttgagaatggagagactcattcaggtttggatctgtatggtgagtcgatggcgttgcttcagtcggcacaagaagcgcttgagaatgagatccaaaagtttgtggaaatcaggaaagaaactgacgaagattccacagctcaccaaagtgaaatcgaatggagcagctcacctgtagaagaactaaatgagaagataaagatgctcgaattgaaactggaagaggccaccatgctcatcaatgagcgggattcagaaatacttgaactagatgcgctcagccatgtacaaccacagaatacagtagcatgtaacaactatccgctgtccctacagtctgatgtagaccggctgttcctggagaagatggaagcagagattcagtgctttatccttacaagagcttctcaggactggaaactcctgacgatggatcaatttgctcttaacgaggcacagaaatcccttctgtcggatcacaaatccctagaaactaaactgaggcacgccgagaacagggcgatgatgctggaggagatggtggataaactagagtcgcaatgcaaggcgctgtctgagacttcagaagttctgaagctgcaggccggagctagcagggcctctttgttctgctcgatccagtttgtgctgctgtgcatagccattgggaccctcctcgttcgcttcctgtcctcttctccggagattgtacctacttgaggttagggaattatgccagtcagcctttgtgtagaagttgttgaacggttgtttactgtaacttattagggcatcaatcgccttacaaattttcgttttttgtaccatcaactcgattttgctagtaatttctttatgaat

SEQ ID NO: 34739 - DNA, 469 bp, Zea mays
  Clone ID: UC-ZMFLMO17307F09_FLI
ttggcacaggaagcaaagtatggttggtcaagtgtgaagaaacacaaggtattgatcagtattaccagttcatttgattcaagcttctgcacaaagtatattttctgaacatttttgttcaaataattcagttaggctatctccaacagatcctctatctcatctcctatttcaaactattttgcgtcccctattttacactacactggagacagtcttcagtgatgtaattcaaatctgaggagcatgacttgtttgggtttggacaccagggttggcgctaactcaaaaggtggtcaatttgtgagtaatgtactgttcttgacagtttctgacctcgatttgtctattgtaactgaataggctgaattgatgctgatagatacattttgcctgctacaacactgacattctgatttttaagttcctcgtttgagaaaataataatattgatgcaaattttggctct

SEQ ID NO: 34740 - DNA, 1850 bp, Zea mays
  Clone ID: UC-ZMFLMO17307H04_FLI
ctctccccgtcaactaaactctagccagtgagtggatgatgggtcggacgggtgacggccgccgccgcgacgtcgacggccggctggaggcgctgctctctggcgccggcggcgaggagccgtggctccggcgcgtggcgctcgcgacggctctggagctgcggctgctggcgcccctggccgcgccggccgtggtggtctacatgctcatcatcgtcatgtcgtcgaccacgcagatcgtgtgcggccagctcggcaacgtccagctcgccgccgcctccctcggcaacaacggcatccaggtcttcgcctacggcatcatgctggggatgggcagcgcggtggagacgctgtgcgggcaggcgtacggcgccgagaagtacgagatgctgggcgtgtacctgcagcgctcgacggtgctgctcacggccaccggggtgccgctcgccgccgtgtacgcgctgtcggagccgctgctgctgctgctggggcagtcgccggagatcgccggcgccgccgccgagttcgcctacggcctcgtcccgcagatcttcgcgtacgccgccaacttccccatccagaagttcctgcaggcgcagagcatcgtggcgcccagcgcttacatcctggcggccagcttcgcgctccacgtgccgctcagctggctcgccgtctacgggctgggcctcggcctgctcggggcctcgctcacgctcagcctcacgtggtgggtgctggtcctgggccagttcgcgtacatcgtgtggagcccgcgctgccgggccacatggaccgggttcacgtgggctgccttcgccgacctgcccgggttcgccggcctgtccgccgcgtcagctgtcatgctggcgctcgaggtctggtacttccaggtgctcatcctcctcgccggcatgctgccggacccgcagatcgccctggactcgctaacggtctgcacgtcgatccagtcatgggtgttcatgatctctgtgggcttcaatgcagctgccagcgtgagggttgggaatgagctgggcgccggcaaccccaggtccgccgcgttctctgcgtgggtggtcacggccctgtcggcgttcgtctcagggatagctggcctcgtcactttcctgctcagggacaagctcagctacatcttcaccggtggcgaggccgtctcgcgcgccgtcgccgacttgtgcccgctgctcgttgggaccattgtgctctgcgggatccagcccgtgctgtcaggtgtggccgttggctgcgggtggcaagccatggttgcctacatcaacgtcggatgctactacttcatcggcgtacccctcggcgtgctcctcggattcaagttcggtttcgggatcaagggactgtggggaggcatgattgggggtaccctcatccaaacacttgctttgatctggatcacgttaagaactgactggaacaaggaggtcgaggaagcgcggaaaagattggataagtgggatgacaaaaggcagcctcttctcgcaagcaaggagtgatggatgatggtacaggagtggatgaagaagattcagtaggcttctgctagctgatccagtctgaaatcatcttgtagtcgccaccgctaactgcaattcagggatgtactaatgcagagcttctgtggtctcggctctcaggaacataccataccataccacagtcagtttcggttgatggggccttgcgagccgggcgtccgtttcaatcggtatgcgtggacatggcagccgttggctttactcccgtagtacgagcgacagtgccattattttttgtttgctccggtagttttggtggctgccttgcctttttttttt

SEQ ID NO: 34741 - DNA, 1112 bp, Zea mays
  Clone ID: UC-ZMFLMO17307H07_FLI
catcaaaagaaggcagggaaagatctgatctggggggtgagagagcaggaggagaaagccaagccattgccctcccctcttgaaggcttggagcttggttctacatcctcttctcttcccctccgtctttctctctctctctctctatttggtttgcttgcttgcctctactagactctagtcgtcgggtccggccatggccaccatcctggagaacatccagaaggcgaggttcctgccgaccaggccgctcaaggacgagctgcccaccttccagggcggcggcggcggcaagggcaaggaggagagccacctcatgggcctgaggaagcggctgtccagcttctccggcaagatccagcccatctcctccgcgtcggccgccgagtgggcgttccgccgctccaagtcggcgccctccctcggcgccgccttcgccgcggggggcggctccctgaggcagtggtggcagtggggcgtcggctggctcctgtccaagaagcccgggttcgcgggcgacctcgagatgaacgaggaggaggtcgccgcgctgggccgccagagcaggggcacctgggcccacgtcctcttcaagatgcggtccggcgtccgccgcctcgtcgcgtccgcgcactcgctccccaccacgcacaagcagcagtccctgccgtcgtcgtcggcctcggcggcgcacagcgtccagtgcaagccggcggcgtcgttcgcctacgcgcagcggcagagcttccaccacaccggccacgccatggcgcactaggcagcgtctcgcggttgccggtgccgtctgcggccggtctcctccagatccagggatggagagcgctgagaggcgcgggaagaagaagattcaggttacaggtgcgtgagatcgacggtgaagatgtcgttgaattgatgatgaatgaaatggaatgtaggattaccgttctgtgatctgtgtagatctagtgcccctgtagaggtgaacaagtgttatactacatgctcgttctttctttatattattcttttgggttcgttcgttggacgatgtaaatgtaaaatgtttggttgatcttgtactgttaaataaaactgatgcaaattgtgcc

SEQ ID NO: 34742 - DNA, 925 bp, Zea mays
  Clone ID: UC-ZMFLMO17308A11_FLI
tcgagttcctgggcaacgtgtccggcgagccctacacgctgcacaccaacgtgttcacgcgggggcaggggcagcgggagcagcagttccgcctctggttcgaccccaccgccgacttccacacctactccatcctctggaaccccaagcacgtcatcttcatggtggacgacatgcccatcagggacttccgcaacctggagagcaagggggtggcgttccccaagagccagccgatgcggctctactccagcctgtggaacgcggacgactgggcgacgcagggcgggcgcgtcaagacggactggtcccacgcccccttctccgcctcctaccgcgggttcaaggccgacgcttgcgtcgccgtcgcgggcggccggacccgctgcggcgccaccgtcggcaccgagggcaccggcgcccccgcctccgccgccggcgccggggactggtacaaccaggagctggacctcaccctgcagcagcggatgcgctggatgcagcgcaagtacatgatctacaactactgcaccgaccccaagcgctaccagcagggcctccccgccgagtgctccatgcagtagcgcccggttattcctcgcccgtccaacaatggcgcgcgcgcgcgtgtgtgtgcatgtggtccgctctactgctaccgctacgacgatcggtgtcgatcaccggatcaaggcaagacgaaaggcatcgaaacatggtagataaataaaggacttgacgatttgtaacgcagtagctggtgcgtgcgtggtgtggtggtaagaaattcttctgctgcctgtgttcttgtagcctcctcgtcctcgcccaccctgttggtacgtgtacggtgtacgtagtctgccgccgcgcgctgttcgtgttcgtcgtgtctcgtgtctgtattatactcgtcctccccatc

SEQ ID NO: 34743 - DNA, 615 bp, Zea mays
  Clone ID: UC-ZMFLMO17308D02_FLI
caagcgctgctaatgctgcaaggggccttgattggtgcacagaatgttcgactttcatggggtagaagcctgtcgaacaagcaggctcagcctcagcaggaatccaatcaatggggtgcggctgctggtgctggtggctactatgggggctatggacaaggttatgaggcttatggcagtgggtatgcacaaccccaggatcctaacatgtatggttatggcgcttatggcggttatcccaattaccaacagcaaccagctgcacagcagcaacagcaacaacagtgatgcctgtttgctcgggtaggtcattgggttgtcgcgacggaattaattaaatattatttcaggacactctcatattgcattcttgtcaattgaggtggttttgaaaggctcctgattttgatggccccatggcacggtttcatctatttattagtatatgacatatatgcgctgtgaacaagtggcgctctactgtgattgctgtgttgagacatgctttcttagtttctttccatgtttctcggatctgttgtgttacctttattactgtgtatttgcatatctactgtgatgctatatatgcactgtgccgtttgtttcctattc

SEQ ID NO: 34744 - DNA, 1231 bp, Zea mays
  Clone ID: UC-ZMFLMO17308F08_FLI
ctgcccctcccatggcagctccccagctcgatttccctccctagccatggccgcgcccaaatcctctccctccctgttcggattccgccagacctgcgtagctccctggtgtgtcttcctccctgcgcgctcagccagcgtccctgcgcgctccgcggtgctcagctctccagctccggtgcccagctcgccagggccgcgtgtgctccagtgtcgcgctctgctcgcggagttccttcgcggcgttcatctccctgctcagctcgccgcgccgaactgtccagcacctctctgctcctttcgttcctagcgcgtcgagttgagcttgccgatgatgctttggctggtcagcctctgctctagctcgcagttgctgcgttgccgagtccctggccgccgtgccctgtgcgctgtcctccgctcgccgggctgtacgttgctaggatcggaagcaccgtccttcgtttggacagcaacggcgtgcacaaaagctttgttgctgctgttggaggcttctcgacgaaatatctaacaaagggttgaagctccagtgcatcgccgtcgtttcgctatgtccggcgtcgtgcttttttttttgccggtcattggtttcctattcaacacaacaccgtcgtccccgcgtcgcacccggaatttcgccgcgcgtcctgtttcctgctcgccagcgtgccctctcggctcgctcggctttaattcccaatcgcgtcgttgattccgccggttagcgtcgttcgacgtcgcgtcgcgggtgcagctctatatacgtcaccccctgtgtcgtcatcgttccacgcgtcagcaagaaattccaagagtcgggtgaagacgaagctaacaacacgatattccccaagcgctcgacaaaattgcctgaatcggaaaatcgctaccgatctcggagattcgtgttagctgtggaaacggtaagctgataaattattcaaaatagttcgatcgttgaataaattaatgtgctagtgcgaggctcattaaggtgctcaataaattgcgtaagtcacgaaactctcgtcgacttcgcagttcttgcgattattgagccaggttcagttataacgagttatttcactattccggtcaattagttgaattagtgtaccgagtagaatcttagtaggcatgtgtgttgatgaaatattttaatcacttataaagatgtagtacaatttataaaacgagagatgaatttagc

SEQ ID NO: 34745 - DNA, 1303 bp, Zea mays
  Clone ID: UC-ZMFLMO17308G12_FLI
gacaccttgcttcactgctcctctaattccagcgagaatggatcacgttcaaagccatgccctcctcgcccaggggaaaagggtgaaatgcatgtggtgcctgtaccattgcctttagtatctggtctaagcagtgttagaatcaacattcctcctgatctacgaccacctgaagcaagacagaatatactttctgcagtgcaagaactaggaaagcgctacccccaaggtcttccgaaactacatccaatcaatgacatgggtattcaagaacctgaactagttgacttggtacataaacttgaagaccttgagcagaaacaatgctctcaccgacttcataagtccggtcaaagtgaacaggaactatcatggtaccaaaaaaaagcagatctgaatactgaaattcagcaactcaagtcaaagatgcgggattcacagctacaaaaatttagagatgaacttaggagccggtcccgtgttctgaagatgctggggcatattgatgctgacggtgttctccagttgaaaggacgtgctgcctgtctaatagacacaggggatgaactgcttatcactgaacttatgttcaatggtacatttaatgatcttgaccatcatcaagttgcttcccttgctagctgctttgtaccttgtgataaatcaagtgagcagatacgcctaagaaatgaactttctaggccgatgatgcagcttcaggaggctgcaagaaaaatagctgaggtacaacgagaatgcaaactggaagtaaatgtggaggaatatgttgaatcaacctgcagaccctaccttatggatgtcatatactgttggtcaaggggagccacctttgcggaggtgatggaaatgaccgacatatttgaaggaagtgtcataagacttgctagaaggctggatgaatttctgaatcagttgagagctgctgctgaagccgtaggggaggttaaccttgagaagaagttcaaaaatgcaagtgagagtttgcgtcggggtatcatgttctccaactcactgtatctgtaattagcactttagcagcaatagtaccatatgttagccgacaaatgctagcggcgggttttgacctgaagcaaaatatgcgttgtctgtaggagagggcattgccagatagcctctgtaaccttgtactctagttcctagactaaattaatttgttatcatgtatacatcagggtaggcgtgatgctgtcttaagaaatccaagtgataccaatttaagggcctgttattgaatagtgaggggttctagctccttcaatcc

SEQ ID NO: 34746 - DNA, 1003 bp, Zea mays
  Clone ID: UC-ZMFLMO17308H11_FLI
gcaagggctgtcctactcctgcccttcttcccacggttcacggctgattgagtcggccactgcccacgccacccaaaaactcatggccagcgctgcctgcggcgtcaccgcgcgtgcccacctgccttccgccgtccctgcagccgcaagaaagctcttcttccgctgcagggccgcgtccaccatgaacgaggcatcggcgagctcgccggacgccgaggagaagaagacgacgactgtcttcgtggccggctcgacggggcgcaccggcaagctcgttgtggagaagctgctggccaagggattcggcgtcgtcgccggtacgacggacgtgagcagggcccgcggcagcctgccccaggaccccaaccttcagctcgtcagggctaacgttacggagggcgtcgacaagctggtggaggccgtgcgcggcgtcgacgctgtcgtctgcgcgacgggattccggcggtcctttgacccttttgctccgtggaaggtagacaactttggcacagtgaacctggttgaagcatgcagaaaggctggcgtagcaagattcgtactcgtcagctccattttagtaaatggggccgccatgggtcaacttctgaatccagcctacattgtgctcaatctacttggcttaacactggtcgcaaagctacaggcagagaatcacatcaggaaatcaggaatagattacactatcgtaaggcctggagggctgacagatcaacccccaacagggaatatagtcatggaacctgaggacactctttattcgggatccatatctcggagccaggttgctgaagtagcggttgaagcactggtgtgtccagagtcttcctacaaagttgttgagattatcgcccgtactgatgctccaaatcgcgctctgaaggatatgtacgcggcaattaagcaaaattgactgctatatttttttgacaggatggttagtttgttatacaaccacgaatcaatgaagaacacttatagc

SEQ ID NO: 34747 - DNA, 859 bp, Zea mays
  Clone ID: UC-ZMFLMO17309A04_FLI
ctaggttgagagcgaggaggttgcaaagggaagctgaaaaccctacatccattgtttcatctgcaccagatagtgggcagcctagaaacaatacacctgatctgccaaggcgctcttcaagcccatttccctcagaagggatggatttattgcgacagattgcctttgctggtcttgaagactcagagaggtttgcgactgctgtcagtgaacttaggcgaatcgctaggccaagccactacggggcatcaacttcatcaaacccaccaacaaatcctgagcctattgatggaactcatattgccatggcactggctgcagatcaagcttctaattcgagcaccatggctgtcattcaggaagacgcagcttttgctgaaagtgctggagaacctagtaatgccgggtcttcaagatccctgagaagaagaagaggaagtggtgccttaggttctttggatgtggatggtggggacctacatcagaataagagaaggcgtctgaactaagctgaagacagctaaaatcaagccagcaggttgcagcgatattctaatttgctcggtgtgctcttctcagctaagcaatgttctaatgaagctagtaggtaatatccactgtgtggtatgaagttgtttttctggtactagtttactaggcagctcctggttagttgccttaattccttccggcctgttcaatttatgcgatcactcaagacaatgtatactgcggagacctggtggttgtcatcagatgtattttccttgatagtaaattgtatgtgcagatctgtaattttcttcatagtaaattgtatgtgcaaatctgtgctcagtgaatttggtctctagctgag

SEQ ID NO: 34748 - DNA, 1591 bp, Zea mays
  Clone ID: UC-ZMFLMO17309A08_FLI
ccaaggcgctgccggccactggcctctcgcaaccggcgaccgcatctcgaagtagagggtgctggccgccgctctcggaagcgctctggaaggacacggccatggcgatgcgggccgctgcgcgtcaagccatactctctccaccgcttgggccccgcagtcctcgccccttcctctgtggttgttccttgtctatcgctcctcggttggagccgtgccgagcggcgagctccaccaccgcgccggccgccggaaagcatctccctccattgttcagcgtcgcgccgatgatggactggacggacaaccactatcggacgctcgcgcggcttatctcgcggcatgcctggctttatactgagatggtcgtcgccgagaccatcgtgcatcagaaggataacctggataggtttctagcatttccggaggaacaacatcctattgtgctgcagattggtggaagtaaccttgaaaatttagcaaaagcaacagaactggcaaatgattattcatatgatgagatcaacctaaactgtggctgtccaagcggcaaagttgctggtcatggttgctttggtgctcgcttaatgtttgatccagagtttgtaggagatgccatgtcaactatcgcagctaattgtgatgtcccagttagtgttaaatgcagaattggtgttgacgatcgtgattcttatgaagaactatgtgaatttgtagataaagttatctcaaaatctccaaccaggcatttcattattcatgctcggaaggcattgcttagtggtctcagtcccgcagagaatcggaagattcctccattgaaatatgagtactattttgctttgttgcgggacttcccagaaataaaatttactctaaatggtggcataaccaatgttagtcaagttagtgcatccatgagacaaggtgcacacggagttatggttggccgggctgcttataacaaatttgctggactttccagtccatggaacatgctaggacatgtggatggggaaatctatggcaagcaaacaagatacatttctcgtcgccagatacttgagaactaccaagcttatggtgattcaataattgaccagtatggccccagcaggccaaatgtgagacaacttgtcaagccactgttaaacttattccactcagaacctggcaacagcctatggaaacgcaaagctgactctgcattgcgtcattgcaagacagtgaaaactttcttggaggagactcttgacgcaatatcggacagcgttcttgacaagccagtaaacagggaaccatccagtgacgaagaatattttgctagtgtcgattctctgttgccaccaaaatacacgacaccgatgcatgaaagacttgtagccgcatccacttgaacagcgtgtcgggaagcggattgcctgcggtactgcagggtgtagttgggtcactgcgcgtgggccctgtcgcacggggcagtgcccacgcagggggggctgtgaaaatgatctatgtaattgttgtaacacatatacgtcgccacgtcggggtatatcaatagctgtagacataaccattttgactttgcggt

SEQ ID NO: 34749 - DNA, 1653 bp, Zea mays
  Clone ID: UC-ZMFLMO17309B04_FLI
cataattctaaaactttagccagtttacacctgttatttagtctactccttgaaaaaagtttttccctttgatctaaacatgaatgcttccttttactccaacatcacagcaaaaaaaaatcaaaagcattgcacttcttactactgatacccctatgtcactactaccatacaggttagtgcacgatccttacctttatgttctacatgtctttgggtttctctttttttcaagtgcgttctattattgtttatatgtccaccttcacactgattagctgttccttgttcctacacagttattatctgttatgtacatttttatacctttccaaattagcttattatctttaaaaaattgtattttcttggctactttacatttgaatgaccaatggcaacatcttcaaacaaacatagctaacttagaggaaagaaaacataatctttaaattgctcataagagagaatgtcatttttcagaaaaaaagaaaaacagtattgatgctttagaaaatcttaaactgatgcatgttaatattatcatatcaatgccaacaacatatgtttaagctggtttcatccttcctagcagctctacttgcttcatctcgctcttcactgctattttttaaattggaaggaaaataagagtacgatagaagaacttgaagcgcattcactggtctcttatttaaagtccataaagcaaagttccaaaaaaacaaaaagaaacattgagttgccttcacccggcttctcttgagaaaatacaaggtaaacatatttggcaattgtaatatatgttgttattttgctctttagttgcttcaaattgtttatgggtaccagtaggcaactcagaagagacaacaactgtactttctcaggcgttaagaaattctttagaaaggcatattattactacatatagagctaggagtagatcttcatccgaacccctccaacgacgactaggtcggcgttttctctccctgctgtttcaggtttgttacatttcaacctgtgggctttctttcagacaattgcatttcatctagcattcacatgggaagctctgaaatctgccagcttaaaaactagatgtaccaaacatgctatctgagcaccgcactgatacaacctttgatagtctgcgttttctctccctgctgtttcaggtttgttacatttcaacctgtggggtttctttcagacaattgcatttcatctagcattcacatgggaagctctcaaatctgccagcttaaaaactagatgtaccaaacatgctatctgagcaccgcactgatacaacctttgatcagtatttagtactacttgctcttccatattaatactactggtactactatttcattgcacgtttacatgacatggaacagagactgaatttagtcgagtgggttcacctgcagttccggtatgcaaactacacgaatgatgcctacaacaagagtgggaacgaatccttgtggctgcagctgataaaccagagagcatagacttaacctttgtgctcttctcgacaggcttctttgctgttagactttaaccaattcatctcatgtcccaagttcaattttatgtaatgaggattgcatggtattttttggcaatttatctttaatg

SEQ ID NO: 34750 - DNA, 1563 bp, Zea mays
  Clone ID: UC-ZMFLMO17309B10_FLI
tgcagatctttgtgaaaaccctgaccggcaagactatcaccctcgaggtggagtcctctgacaccattgacaacgtcaaggccaagatccaggacaaggagggcatccctccagaccagcagcggctcatctttgctgggaagcagcttgaggacgggcgcacgcttgccgactacaacatccagaaggagagcaccctccacttggtgctgcgcctcaggggaggcatgcagatcttcgtgaagaccctgaccggcaagactatcaccctcgaggtggagtcttcagacaccatcgacaacgtcaaggccaagatccaggacaaggagggcattcccccagaccagcagcggctcatctttgctggaaagcagcttgaggacgggcgcacgcttgccgactacaacatccagaaggagagcaccctccacttggtgctgcgcctcaggggaggcatgcagatcttcgtgaagaccctgaccggcaagactatcaccctcgaggtggagtcttcagacaccatcgacaatgtcaaggccaagatccaggacaaggagggcatcccaccggaccagcagcgtttgatcttcgctggcaagcagctggaggatggccgcacccttgcggattacaacatccagaaggagagcaccctccacctggtgctccgtctcaggggtggtatgcagatctttgtgaagacactcactggcaagacaatcacccttgaggtggagtcttcggataccattgacaatgtcaaggccaagatccaggacaaggagggcatcccacccgaccagcagcgcctcatcttcgccggcaagcagctggaggatggccgcaccctggcggattacaacatccagaaggagagcactctccacctggtgctccgcctcaggggtggcatgcagatttttgtgaagacattgactggcaagaccatcaccttggaggtggagagctctgacaccattgacaatgtgaaggccaagatccaggacaaggagggcattcccccagaccagcagcgtctgatctttgcgggcaagcagctggaggatggccgcactctcgcggactacaacatccagaaggagagcacccttcaccttgttctccgcctcagaggtggtatgcagatctttgtaaagaccctgactggaaaaaccataaccctggaggttgagagctcggacaccatcgacaatgtgaaggcgaagatccaggacaaggagggcatccccccggaccagcagcgtctgatcttcgccggcaaacagctggaggatggccgcaccctagcagactacaacatccaaaaggagagcaccctccaccttgtgctccgtctccgtggtggtcagtaagtcatgggtcgtttaagctgccgatgtgcctgcgtcgtctggtgccctctctccatatggaggttgtcaaagtatctgctgttcgtgtcatgagtcgtgtcagtgttggtttaataatggaccggttgtgttgtgtgtgcgtactacccagaactatgacaaatcatgaataagtttgatgtttgaaatt

SEQ ID NO: 34751 - DNA, 2935 bp, Zea mays
  Clone ID: UC-ZMFLMO17309C11_FLI
tgaatttctcactttgtttctgtctctgctcgagcaatcgttaagtcattccaaggttcctggagccagaacaatcgtgcaaaatctgttttgcggcagcgtatcacatgtaacaaggtgctcgtcatgtggaaaggaatctgcagcatcttcaaaaatggaggacttttatgagctggaattgaatatcaaaggtttaaataatttggaagaaagtctgaatgaatactttagcgaggaagcactggatggggagaatcaatacttttgtgagtcatgtcaaaaaagggtagatgccactcgttgtataaaacttcgatcacttcctccagttgtcaattttcaactgaagcgttatgtattcctcccgaagacaacaacaaagaaaaaaatttcttcaacattcagtttcccaggacaacttgatttgggaaaacgattatcagagccttcatctagttgcacttatgccttgtctgctattttaattcacaagggtactggtgctaacagtggacactatgtggcacatataaaagatgaaagcaatgggcaatggtgggagtttgatgatgagactgtatccaaacttggtttgcatccttttggtgaaaaaccaggaaaggcatcaaacaaagatgatcagaagtcccaaaatacctccacagaaggttctgtcacaaacaataataataatggccaccatgaggcagcgcctagttctaccatgggggagatgttttcatctaccgatgcttatatgctgatgtacaaatgtatcactaaggatgtcaatcccactgaaagcaataaaattgtggagataaataatgatttacttccacaccatcttctagatgaaattaatgaactaaatgcatcatatacaaaattgtgtgtggaataccaaagcaagaaggacagccatttggcatatataacagagaggcgtcaagaagtaaaatctgttctgacagaagcacctgcaggcccaggagatgattcatatttttggatctcaacagactggcttcgtcagtgggcagataatattactcccccctcttccatcgacaatggtgcaattcaatgtgaacatggaaaggttccagcatctaaagtcacatcaatgaagcggttatcatctgtagcttggcagaaattacattcgaaatatggagggggacctatattgaacagtgacgatttttgcatggagtgtcttaaagacggggcaaaaagtgcagtatctgctgatgtttaccgtgaacgaagagcatcattgaaaacactcgcagaagcagcacttgctggtaattgtccagatggtccttcttactttatctcaaagacatggttgactcattggctgcgtagaaaaaatgctgatatcccttctgatggggataacggaccaacaagtgctttaagatgttgccatggggattttctgccagaacatgctccaggggcaaaacgggtatctgtaccagagatcctctggctatttctctaccaaacagtccatgagaagaaggctgatgatacagtgacttttccatcagatagtcatccatgtgaaacctgcagccgagaattgtctgatgttgcttctgtggaggttaatcttagagcagtgaaattcaagcaacgacagaaccatgaaaagttgatatctgggaaaagctttgcgcttcatcctggtcaaaaatattatttggttccttcatcttggttgtcagaatggagagcttatattacagcaactgggaaaaacatttcttcattaccagaacctcaaactctggaagctgttgccaggtcacttatatgtgaaaagcattcaagattgctgcaaaggcctttggatcttgttttaaagcgtgggagcatcattcagaaagcatcaaatactgatgggttaaccataatcccagagtatgattggaaattattctctgaagagtggagtgctacacctggaaaaggtatatctgctgaaattgcttttagcaagagttctcaagacaaactgcatggatcatctgaagcagtgccgattacggatggaaatctaggccagtctcttgatgacacaaacgatgatttgggagccagagagccttatatcagaactgatcccgagaatgtattggcgaaagggagagctgtgcattggtggaaaaactcaactatcaaaatgaagatatccacgtttactttgtccatggaaaagaagcaccaaagtctattaaagaagcatctaaagctgttactgtaccagatcgtcggacatcgaagcgttcccggagaacaagctctggaaactcaatcagtttgaaagtctctggctctacatctgtctatcagttgaaactgatgatatgggaatctttagggattgttaaggagaaccaaatgcttcacaaaggctctgttgagattgaagatgattttgctactcttgctgataagagtatttttcctggggattttctctgggtcagagactctgaaatatatgagaaccgtgacattgcagatgagatttcagaacaaaaggatgatatgctacaggctgaggaaggctttcgaggaactctgttgacatcaactgtctcagctcagctttgtcaggatatagcttttagtgaatgagttcccacatcagatatgtagctgcatatctgctgacttaagctggtgaagcctgctgggaggtgatgctgactagcttattctttgtttttattgcatattgctgttttttctgaatggcgatcactacttctacatccttctccctctgactatcaaagtcccacttgtatatgcacctgcttccactgtcgatcatgcaaccgacagaacttcaaagttaactacggttttgaacccttattttcattatgtatatattattcatcttccgttc

SEQ ID NO: 34752 - DNA, 634 bp, Zea mays
  Clone ID: UC-ZMFLMO17309D04_FLI
catacttgaagaagcgagaattcgctgttgatccatccacagctcgtttccacctctcggaacctctccgccggcctgttctgacgtcagaaccatctatatcttcaagaattcttggttcgcaagaccgttttttgatctttgcatcggatggactatgggagcacctctcaaaccagcaagctgttgaaattgtccacaatagtccacgagaaggtgttgcaaggagattggtacaaacagctctaaaagaagctgcgaggaagagggaaatgaggtatggcgatattaagaagctcgaaaaaggagtccggcgctacttccacgacgacataacagttgtcgtcgtcttcatagaccatgaactgcgggcggagcattcttcctcgacctctgttcctgaactctcggtccgtgggttcgttgatgcgggggcacgctccagcttttcagggatgaacgacattacttgatacagtaaccttgtgttgcctaaatttctgtcattttgatgtaacattagatcaaactggccttctgtagttttcttattctattggtgttactagcgcgtagtacggcatctttgcttctattaacatctggccacattggaatcacaattcgttctggc

SEQ ID NO: 34753 - DNA, 1061 bp, Zea mays
  Clone ID: UC-ZMFLMO17309D06_FLI
tctgaagctcatccttgtcagtgaacccctgagggacaagctgagggtgagcctgagctgccggcttgtatgccaccccccaagccagcggcaccttgatgcctccaaagagaagagtgtgtctcatatatttgccagtaacttcaaatgctcgcctgtagttctccttttcgaaaaaaggaaggtacgatcatcaggttatctcgtgaacgattccctgaccgtggaatgcacggtcaccatgctacgcgacttggacgccacggataaggagcagcacctgccggtgctaccgccctcggacctgcaccagcacctcggcgagctcctgcagaccagcgatggagcggacgtcacgtttcgtgtctccggggagtccttcgccgcccacaagatcttcctcgccgcaaggtccccggtcttcaaggccgagttcttcggaggcatgcaggaaggaagctccgcttctgtggagatcagagacatggaggctgctgtgttcagggccatgcttcacttcatctataccgacatggccccagagctcgacggtgaccaggagcctgaggcggcggcggccatggctcagcacctactggtagccgctgacaggtatggtctaaacaggctaaagctgatgtgtgaatgcaagctctctggtggcatcgacattggcacagcggctgcgacgttggctttcgccgagaagcacgactgcccgctgctcaaagccaagtgtcttgagttcgtcactaagtcgcctgagactcttgatgctgtcctggcgactgacggctacgagcatctggtggcaagttgccccttggtgctggctgaactgctgagggctgcgcgtggaaggaagatctgagctcgcgatgatggtttacgttgacagtcctcatgtaacgagttgcttggcttctccacttgtgcttgtcatgtatgtgtgcacacacatgagacgggcagctagcattattttctgtggttagatctcgttcggttttgtgccagactctgcttcagttgcaggttgcagctagtgcaaaaagattcag

SEQ ID NO: 34754 - DNA, 1920 bp, Zea mays
  Clone ID: UC-ZMFLMO17309E07_FLI
atcaagtttgaaaatgaaaaccgtgacatcttgcttgaaattgcatccagctgatgtggataaagatgccccttttccttctaaatcaccacgaatcaatagggctgctccagttccctcgaagttaccttcggctgataaagctactccagttcttccaaaatcatctctgtcagtaaacaaagcagctctggtccgtcccaaatctccagcagttgacaaagcaactccagtttgtcctgaatctccagcagttgacaaagtaactccagtttgtcccagatctcaagcagttgacaaagcaactccagttcgttctcaatctccagcagttgacaaagctactcatgtttgccctcaatctccatcagttgacaaggcaactccatccattgacaaagcaactccagttcgcccaaaatctccagccatagataaagtaactccaattcctcccaaatctccaccagttgacaaagcctctccagctccaccaaaatcactatcaggtgctaaagatgtgcctgttccttcaaggtcgctgcaaattgataggttcattccagcccccccaagattatcgcaagttgataaagctgctctgccttcttcagaacagccacatatatctccagctactaattctgaagcccaaggggcaactacttctaggaaggtcacagccagctcagttttggaggttgctgcagcatcgaggccttcaagtgctcctgtgttacccacaccaagatcaactgcaccagttgcttcacatattcaaacttccacgttgctttcccgctcgatgagtgaggcagctgggagaaggtcagtaaatgatccttccttttctgccccatcttatactccccagacctaccgaaatgcaataattggtaagactggtctggctactacctctgcaaaccttgcatatcagtcctattctctgggtcaagatactgctccttcacagcctctatcagcatatgcatcaagcacagcagtcatgatgcctcctgctggaagatctgatcaatcatcagctaggcatggattcaagtctgggtctggtaagctagaagcacatgacagctggcagcagtggaaaggtgataataatgttgatatgcatctctggagggatcacactacctatcaacaaatgaccaggggtcaagcgtatgaccaatctcggagggacgatacttatcagcaaacatgcagcagaggaacagaaaagttcagcaggcacgcaggactgcaagctaggcagttccaaaccgagacacccgccagccatgtctggcaccaacaacaggggcaagtggcagaagagtttccacaccttgacatcataaacgatttgcttgaggaggaccagatcaacggcagtataccagagtcatttcatcaagattacaatgtgtttggcctgccattttcaccaagaggaaacgtgtcagatatgggaatggcttctgttagaagtcctgctcggttcaattcaaccaagtatgagtatgacggtggattctcgggggcttatgacataaatgcggtcaatgggttgagggaacggcagtttccctcgttggatagttactctaatggcctgtctgacgtgagtgcatcaaagccttggctgaatggctctcccagtccatcggtgatgagccttggggttaacacaaatggataccacccccaggttgcggactaccccagtctgggaaatggggtgaacggagtctccttgtggcgccgccatgctaacgggcgctggtaatgcgaggtgcctgtatacaatcatacagatggaataatgtttgttgtaacaaatggtttcgggcctgagctgatgtgccatgtaattaaaagttttaagttttaaaagggaaagaaagcgatacatgctgc

SEQ ID NO: 34755 - DNA, 871 bp, Zea mays
  Clone ID: UC-ZMFLMO17309H08_FLI
tgctacctcgcgcacgcacgtgtggttcctgacttgatggctgatgtgctcactcgttcgcgtgatgcagcggtgttccagtcgttgatgtacgaggcggccgggcggacgatcaaccctgtgagcggcgccgtggggctgctgggcgcgggcagctggcagctgtgccagtcggcggtggagacggtgcttcgtggcggcgccatcgggccgctgcccgagttcgacgggggccgcgacaacacgtttgctctggcggcgacggcgaggcgggccgtggggtgctcgacgttctccacggcgaagcgtggggcgccgacgaggacgaacctgggggcggcgcctcccgtcccgccggagccgtcgtgcgacctcgggctatggctcagccccgggtcgtgcccggcgccgggggagcggcggcggcggcggcccggcacgccgtccatgacctccgaggagtccgtgacgacgacgagcggcggcggcggcggtggagggagggagcccgagctgctgaacctttttgtctgagactttagctacaccgacggcctggctaaaaggccagcggccgatcatgtttcatgtggcgcccctcggcgcgcggtgtgctgtatgcttgatctgatcccggcgaaaacgtctgtctagctagcggcgtctcgccggcgaggtacctgtagtcttcttcttccttttttgggcgcgtagaaaccatgggccaccaccgcccaccggtgccggcacctgcctgcctgactccgtccgtcaactgtttattttgtttcttcccaactttgttggcaagcacaaagcagcgttaccgctccgtcgctgaataatacaattgtaaaccaagggtaaagcg

SEQ ID NO: 34756 - DNA, 2800 bp, Zea mays
  Clone ID: UC-ZMFLMO17309H11_FLI
cttcgcctcgcggtcgcccagtcgcagcagcaacaccgcccccggcctcgctttgcagccccctccctccaccgcctcctccacgccctagcgctccggcccccgccccgagctcgtcgtggccggctgcgctgcggtgcccgcacctgtgggggcgtgcgggccggtggtgaaacgacccgcgacctcggtgcctctcgacgtctgcccgcttcctcgccggcgccattttgttcgtctaaatcccctgtgataagcaccactgctcgtgatgcattcttcggaaaataaactgggttggaatgagacctctatggggttggttcctgtaccaaaaagaccagctagacctgatgcttcccaccaatgcaaatctgattcctttatgaagcgatcaccaaggaaagttagaaatgctactctggcaaaaagcataaagagcaaataccactatagtcccctcaaacagcggaagggttcagattctgttcctgggaaaatcgtaacaggactaaccgcaaggaaaaagaagaaaaggaaaatccaaattacagacgaggcaactcgtttggaacgaagagcgagatattttctaatcaagataaaactggagcagaatttgctagatgcttactctggagatggatggaatgggcaaagccgagagaaaataaagccagagaaggaactgcaacgtgccaggaaacaaatcataaaatgcaaaattgctatacgtgatatcatccgccaacttgatttgtatacttctactgggagtgttgatgacccactaatgcctacagatcagtccaccaatcccgaacataccatgtgctcaacatgcaagtctcatgaatcatttcccagcaataaaattatcttctgcaaagggccctgcaaaagggcatgtcatgagaaatgtttggaacctcccttaaacaaaagcgtacttccaacaagtagccatgggtggctttgcaaattctgtttgtgcaaggtgaggattttagaaactattaatgcacatctagggacgagttttacagtgaagtgccactttgaagatatattcaaggaaactactgaactaatagactctgaggatgcactagatgaagattggctttctgagtattcaggtgatgaggactatgatcctgatgaaaatgaggccagtggcgactgtatggacagcggggagaagattatgtctgatgattccaatggttcaggaagccccctttattctccaaatgacgatattcctgacttcatatcagcagacttaaatgttgtggaagggttttgtcataccaatttagatttaggcattgatgccgttgaagatgattttgcacagatcctcacctaccaaaggccaagaagagatgttgattatagaaggcttaacgaggaaatgtttgggaaaataaccgggaatgaagaacagagcgaggacgaagattggggccatgaaaggagaaagaaaaggacgcattcaggtgttgctggggataattctgttggtttcttgaacgttatatctgatgaaaagagccagaagaaggggagaaaacttttcaggattcctcctgcagctgttgaggtacttcgcagagcttttgctgaaaatgagcttccaccccgggatgttaaagaaaatctctcaagagaattgggaatttcttttgaaaagattgataaatggttcaaaaatacacggtgtgctgctctcagagatcggaaggctgaaggaaacagtcataatacagctcccagcaaaagctcaaaaaataaaggaaaagctggaatctcaggcaagactggaaggaatggtcatgttactggtccctgcaataatttgagaacaaatgaagaaaaaacaggtatatcggggaagtttgattcaggagacaactcttgtttggttcccttctctgaagtcatcaatgtgcctacgcgattgccacacaactttgagatgaggaagatggaatcaactagaagtcctgcgaggctacacaataaaggagggttcctgtctgcaacagtccaaattaaggagagtacgttgttacccacaggcaagccttgttggcagtcagaaatgagccatccaacaactaatgaagtgagcacttcagcgcaagctactacttggatcgacgcgggggcgtgtgccgaggagcaagaacctactccttgggtggacatcggggtctcagactaccagcctttcctggatgtgatcgacgacatgtgcggacttgagtggaggctgcagagactgaaggagaacatgctctcatctagcatagacggccaaaccgccgccagtgagagtgacaaaagaaaccagaccgtggtgctagtgccaaccgccgagctcaaggaaaagctgccgcatgacggtttattcgggcattattgcccataggtcttatatacatagcggataaactgtacagagaaccaagaagaagaagaaaacaaaagggaaacagcaaacagacaggtgcccgcttacataccggtccatactgtcaggcactactctcctttcttgggcctcgacacgactaatactgtgctagtccagaacagatgagccatagccattacctgtgtgcctcccaggttcagttcatatgttgtatgtattaatgtatatcagaagagtcgtgcttagtagtagcaagaacctagtcctgatccagaccgtgaatctggatcatcttgtcctgtggttgtaccgtgcagaacagacagatgtcggctagtcgtttggttctgaagtaag

SEQ ID NO: 34757 - DNA, 769 bp, Zea mays
  Clone ID: UC-ZMFLMO17309H12_FLI
tgaagacgatggtgccggcggtggtggcgtcgctggtgggcggcgtggagcggctgctggacgagggcgcccgccacgtcgtggtgccgggcaacctccccgccggatgcatccccatcacgctcaccatgtacccgtccgaggaccgctccgagtacgacccgcgcaccggctgcctcaagaagtacaacagcgtcgcgctctaccacaacgccatgctccgcgtcgcgctcgaccgcctgcagcgccgccgcccggagtcccgcgtcgtctacgccgactactacacgccctacatacagttcgcgcgcacaccgcacctctacggctacaagcgcggcgctctgcgggcttgctgcggcggcggcgggccgtacaactacaacgtgagcgcgtcgtgcgggctccccggcgccaccacctgcgaggaccccgacgcgcacgtcagctgggacggcatccacctcaccgaggcgccctaccgcttcatcgccaacacctgggtcaagggcccctacgcgcacccgccgctcgccaccgtcgtgctcgaggacatggtcgactgatcctcttgtggtttggcacaagggaagagctgatatgtaacgtgaattccattcgttcatgtccatgtatattgggtactaccggagcggagtaacaaaaaaaaatatatatgttagtcttttctgttttttttttcgtcgtgcacctgtgtgccgtgcagtcgcatagatcaatgaagaaaccactccagctgtttttgatg

SEQ ID NO: 34758 - DNA, 328 bp, Zea mays
  Clone ID: UC-ZMFLMO17310A12_FLI
ggccagaagatgaaaaaagtcatcacaaagaggtttcgtttaaagcgttaattatctgatcaataactacacgaactagacagttttatgtcctttcataggattgatcgtctccaaggtcaaggcatatagtactggtgtttgtttagacagccgatgtcttattttacttgccaagcttggtggttgccttgtaaattgagcattttatttggaggttgtaaactgtttaatacatctatgtgtctatgatcaaagcataagtgtgtacgtcattggtgtctttataccatacatgtgaagtaaaaatatcattgcagttacaggc

SEQ ID NO: 34759 - DNA, 774 bp, Zea mays
  Clone ID: UC-ZMFLMO17310C01_FLI
ggcaaagatcatgtcgttctcgcagcacgggacacgcgcggtctgcatcctttcagcaaacggcgccatatcaaatgtgacgcttcggcaatctgctacttcgggtggaacggtgacatacgagggtcgtttcgagatactgtctctgtccgggtcgtttcttctgtcagagaacggtggccagcgcagtcgaactggtgggctcagcgtttcgctagcaggccccgacggccgtgtcctgggtggctgtgttgccggactcctgacggctgcttcaccggtacagatcgtagtggggagcttcgacgccggtggaaagaagcagccgaagcagcagcagcagcagcttgctccgtcaccggcgccactaaatctcgcgccgacgggcgtggcggcagggccgagcagcccgccgtccagaggcacattgagcctaagcgagtcgtccagtggcgccccgccgagcccgccgcacgcaggagccagcggcggcggtggcggccatgggcagcagcagcagccaggtggcttctccggtctgttctggaaatgacgagacccctggacaccgtctgaccgtggtagaactggcactcggtgagaactgagaagcagcggtagcttgtaggtggtgtcaagactgtgtagctcttgctgttgctgtaggtgtcaatcgtgcgttgtgattgtgaggtggttgcttattgtcgtctggaatggatgccgtgtactgaacctgtgcccccaatgcagcatgtcggaagttcttggttt

SEQ ID NO: 34760 - DNA, 1468 bp, Zea mays
  Clone ID: UC-ZMFLMO17310C06_FLI
acttggcagactagaagaatatcaatcaatattgtcctagtcccattctcctacccttacccttgtggtgtggttgccggctatcagcgatgtcatgctgctgaggttcagggccatctagaccagagtttatcacaacgatatagttcgctactgtgacacagtttgttttgtagtgtatcgaatcctcctgcaagacccttctcatgtttatccttactgcaggaggcttctggatacttcttctgcctagaggaccgtgcactactttgtagagactgtgatgttgctatacacacagtgaattcctttgtttcagtacatcagagattcctgctaactggagttcaggtgggtcttgatcctgctgatccagttccacctattgctgaaaagcacgttaatgctgctggtggatcagtaaatcaaccagtgagacatcagccaaagagaagcccgacagttcaattttcagttgaagggagtgcttctgttcctactaaaaatgtaacaaatggagattgttcaaggcagaattttgtcccaacagccaggggagaagtggttgattggactatgaataatagtacaattcggtcagtagaatctccgcctaagtacatttcagaggaaagcccgacacttctgcaatctagccagaccacaacagtcttctccaaccaaattaatggcaacagtgatggggcctaccacttgtcattctcaggtggtaatgtgacagacagcctaccagattggcccgtggatgagttcttcagtaactcagaatatggtccaaactttggcttctccgagaatggttcttctaagggtgataacgctaagctggggggcgctggtggatctccacagtgccgtttggctgaaggctcagttgctgaggaactattagggcaggtgcctggattgatcaccgatgaatatatgagccgagtacctgagaattcatggacagtgcctgaggttccctctccaccaacagcctcggggctcaactggcacgggaatttgtgtttccctgcgtatgacagcaccatgttgttcctgaaattacctcccttcagaactccgaaagtcacttcaccgtaccttccagtttcaagcgccggagaagagagtactgagaggcgacaagaagatcactagacaccactgtccggtctaggctatcttgagaaaggcttcttggtgggctaaatgacgaaagaaaatatccaggactgggtggtcattcaaacatcaactgagctatccagtagccaggttttaagtgtgttgtaatgcttcaatgtgtttcattttccaaagacctgagcttcgcttgtgatttgttccgagctgtacggtgtcgattttgtgtatataatataatataacgaaataaagggtacccagtatttcgttatattatattatatacacaaaataaagggtacccagtatgagt

SEQ ID NO: 34761 - DNA, 1656 bp, Zea mays
  Clone ID: UC-ZMFLMO17310C08_FLI
atgatacagtccgtccagaccccacccgccgccgcccacctccgcgctgctgcgcccgccagcacgccaccgctcctcgcgcgcaggctggccggttctcctccagcttccgcctccgccggaacaatcagatgcaggcatgcagcagatgctagcgctacagtccgtccagcccccacccgccgctgcccacctccgcgccgctgcgtccgccaagacgccaccgctcctcccgcgcagagcggccggtcctcctccagcttccgcctccgcctccgcctcggctgagttcccaggatccgttccagacagcgctcagatggcgccccgacggcggcggcgccggagcgtggccggcatcgaccaggacgaactcctcgatcccgaggccctcgcggaccccgacagcggcttctacgagatcaacggcgtgaggctgcaccacaaggtctgcagccacgaggatgaggactcgtccagcgaccagtccaccggtagtaccattgcctcagactcagacgttgtcctgaaaagccagattggcctgcccatactgctgctgcacggcttcggcgcgtcagtcttctcctggagccgtgtgatgcggcctctcgcccgcattgtccgtgccaaggttcttgcgttcgaccggccggcgtttgggctgacatcccgggccagtcggtctgccgatgacgccaagcctctcaatccttactccatggcgttctcggtcttggccacgttggcgttcatcgactaccttggcgctgagaaggccatacttgttgggcactcagctggttgccttgtagcagtggatgcatactttgaggcaccggaacgggtggctgctcttgtgctagttgcgccggctatatttgcaccaaggaaggcggtgaaagagggccagtcaggggaagaagaagaaggagggcagcaaacacagagcattcccaatgatgaaaattcgcctccaaatttgttcgctaggatttcgggaggatttcttgagctatggaagcacattgcagggcttgttctcaagatgatcacagcaatacgagacgtggttcggtctttgtgtcttaaagctgtcgttgcttttcttcggtcatcgttgggtgtggtgctggtaagatgggtgatggataaatttggtatactgggtgtccggaatgcatggtatgacccgagcaaagtaactgatcatgtcatacaaggctacacaaagcctctaaaatccaagggttgggagacagctctgctggaacacaccgtatccatgatcatagattctgtgtctgcatcaagagtaccagtttcaaagaggctctctgagatctcatgcccagtgctgctggtgaccggcgacaccgaccgcatcgttcctgcctggaatgccgagcgtgtggcacgcgctatacctggagcaacttttgaggcgatcaagagttgcggtcacttgccccacgaggaaaggcctgaggaattcctgtccgtcgttgaaatttttctacggacagcgtttgcaaatccaaatgaacaagtatttcaagcagctgtatcatgaattatgttttgagtacgatctatttgctttataataaatcttaaatacccactcgtgtacaatgagagtggaatttggagttt

SEQ ID NO: 34762 - DNA, 626 bp, Zea mays
  Clone ID: UC-ZMFLMO17310C10_FLI
gactcccgcgccaaggccgaccagttgggcgagtccatcctattctggttctgccacactaagggtccatattattttgaagacttggtcgatatgatgtatgacaaaatttctgaatcttttaatgcctactttgaagataatagtattgaggaggttgctgaacagtttttgatcatacatgaagaatgcctgcaaaacaactattcgtctgtagagaagctaaggaattctcatgttccggggaatgctgtttctcaaagtagacagatagtgggcgatgacgacgatgacagtgatagctcagatgacggtgatgacacatcgatggctgatgaagaggctgggccagaagagatggcagtggacaggccaaggccccccaagcctactccagacgccgatgggtggactgttgtgcctcctaggcgtggtggtcgcagcaagaaatagctacctgccggcattctcgcggaatggtttcatattcacttgtatcgctcgatatttgacccgacatggatatgttgagtgtgtagtatgatgcttggtttgccaccgcccaccaatttggtgtaaacaaggtaattattatatatgcatcctttgatcaggttttgagtgtt

SEQ ID NO: 34763 - DNA, 179 bp, Zea mays
  Clone ID: UC-ZMFLMO17310C12_FLI
tcttgttctgctggtgtctccgccgtttaatttgacctatgttatggagtgagtgatatatgtgccgtcactcctagtatatagtagtgagtgactagttggtatgtgtagtactgtactatcttttctccatatgcatgttttgccagcgcgtaatgaatgtaatgtcagtactgctc

SEQ ID NO: 34764 - DNA, 1630 bp, Zea mays
  Clone ID: UC-ZMFLMO17310E08_FLI
agacaggtttacgcgctgacaagctgcccttccgcgaactacacgttcgacgaaatgccgccgcgagagtcgagacctcttcatcgtcaactgagattcgcctagcatcttctcggattccttccccaactttcgtccccatcagcggacctactcgagatcgacgagactcgtcggagcccggttcctaggcgtcccagcgcccgactggatctcctggctcgggccgccttgatggtccctggggtcggtccggggtggagttcgaggcgatgagcaggcttgcgtcggggctccagcgcttgcggaggtcgtcgtcgcagtgggaggtgctgtggtcggcgctcgcgtcatgcggcctagtgcttttctcgcagctcgccgtggcgatggttccccgtctcttccctttcctctccctcctcgcgatgctccccatcgcggggttggtgttcatcgcggctatcgtgctcggccgcctgtggaggaggttcatcggggtggcggcgtcggccccgctcttcgtgctcttcaacatcctcctattgtggggcgtttacgtattcgtaatccggagagaaacttcttctctgctggacatgctaataaatgcagagtgtgcacttcttctgtggggattctacaggattttatctggtgatcctggtattgttgcttgtgattcttcatatttggaagaagctggctgcaaggattttgtggaagctatatactcgagtgagaaactcccaatgctctcaagggtcaggcagtgtacctggtgcaaagcaaacattaggggctatgaccatcattgtcctgcatttggtacttgcataggacagaaaaatcatcgtctatttatggcccttttgacaggatttgttgttgctgaatcaacatatacgatgtgctcaacaaaatatattaccagatgcatcagttcagggactataagatcggagaatcctgtatctttaaacatagtaatcagtacaacgctcttctctatcctccaggtcctctggcagatcctccgtgctgttaccagattgtattcttgatgtggcacatatattgcatctgcttcaacatcaagacagatgagtgggtaatttcaaatttcccatgctttggagtcttcgttcatcaattgcaggtcgtcttctcgttagctgtttcttgtagctaaaaggtgagattttccagattaactggaagaaatatcctgaattccagatgaaggaacaacctcgatcagattctgaagtcaaatttgtgaacccatatgacaagggcatgctgtgtaacataagagaatttctaaagccggaatgatagatagccaattttgagtacgaagacctggaactagaaagatgggaagtctgaagtgcgttataactggatggaagcttgtttccttgttggctatagattttcaggaatctattctgatgttgtagccgtttagttgagattccagatttatgacagcgaatctggttcagtaaactgaaccaaacacactctgaggatcattgaactccctgtagtttaatgtgcaagtaacattcttttgtaaggttactttcacttatggaattcatatcgtggtcctgcatttttc

SEQ ID NO: 34765 - DNA, 1373 bp, Zea mays
  Clone ID: UC-ZMFLMO17310F03_FLI
cggctgcgctgctgacgcagacgcgggcggaggaggaggcgctgcgccgccgcgccgccgcgttgcagggggagctgcggcggctacgcgaggccgccgcggcgcacgcggacagcgacaaggttgaggaggacttggatcgagcagcgtgcctcatcgctgaaggtgacgttgcgtcgctgctcccgagcaagacgcaaggcgcttttctgaaaatgttcttgggaccagtaaatttgcgtgcaacaaggaaggaggtgcagctcaaggtgaaggaggagtacaatagctacagggacagaactgccttgctgtttctttgttttccggtgattttattgtttcttcgacaatggttatggaatggatgttttccagtattgccagttcagctataccaggcttggttgttattcctgtataccagtttagctttgcgtgagaacatactgcgagttaatggaagtgatattcgtccttggtggatacttcatcactactgtgccatgctgatgtctcttgtaagtctcacatgggagataaaggggcaacctaattgtgcacgcaagcagagaggcgtggaacttttcctttgctgggccataatgcaaggatttgtcatgatgttgcagaatagatatcagcgtcaaagattatatactaggattgctttggggaaggctaaaagaatggatgttgtatggggagagactgctggtgttgaaggtcaattgttgctgttgtgccctctccttttcctcctgcagggattcgagggttatgttgggtttttacttctgcgcacagctcatactggcgtcgtccctgagtggcaggttgtggtatgcgggatcctgctgatcgcgatggcaatcggtaactttgcaaacacagtggacaccctggtgaccaagtcccggttcaaggcgaagatgaagaaatccaagggcagacgggacctcgacacatgcccctcgccaacaggttcatcatcgccgatagattcagcgaccaccaaagcatgaacaaggccaagaggaaaaggtgcccgtgtttaacccgggtgtgttaccactgtaaagcgttttagtgttttttttcttggccgtcagctcgtaatcctggccgtcgtctgtgtcgaagctcatactcgtgtaatcaatcatcaggcaagtaggctgctgatggttctaggctggaggtgaccgagaataaacttgtggtgtttgtttatatacctgtaccctgaatgaacatcgagtgggctagggtggtgggcttaggactatgtaaggcttagcaaaattttccaagtatagttgtgagacaggcaggcatttgtcacaatgaatgaaacatgcgaagttgtatac

SEQ ID NO: 34766 - DNA, 835 bp, Zea mays
  Clone ID: UC-ZMFLMO17310F05_FLI
ccatcatggccctcgcctcccgcgccgccgcagccgccgtggcgtgcgtcctcctggcgctcgccgcctccgccgcgggggcgggctccaactcccctgcaccggcgccgtcggtggactgtatctcccaggccgccagcctgatcgactgcatcgactacgtccagaaggggagcagcgcgcgccgtccgtccgctgcctgctgcggcgaggtcaagaccgcagtggccagccccgtcatcgtgggctgcctctgctccctcgccggctccaactccagtaacctgggctttcccatcgacatgaagcgcgtgctggcgctccccggcgcgtgcggcgcgtccaacgccgccttcagcaagtgcaacatttccgcgctttccccaaccgaagcacctgcaccgtccgccgccggggggtcatcgagcggtggcgcggcggcatcttcaccgcgcgccgcggcggcgagctctcctccgatgacggcgaccgccctgttggctgccgtggcggctcccctgctcgcctactactgctgctacctcttctgagggtttccttctgctgctgctgccgtttaggctgagtgacctatttctatgtatgtgacgattcaagttaacttgtggagcgcggctgcgcgtgcgtttgtgcttgtgcagtcgccactgttgctgtgttcttgcgatactcttgtcacttgagaggtggtgttgtatggactggtttagctggctcccccgtgcttccatcgacccgcttcgcgcttcatgtttactacttgcgatactgttgttacttgtgattgatgatgataaaagccacggcctgtgtt

SEQ ID NO: 34767 - DNA, 948 bp, Zea mays
  Clone ID: UC-ZMFLMO17310F09_FLI
tgatgccccgcgaccgcgacgagccagccgccgtgcgcgtctacaccgtctgcgacgagtccaggtacctgatcgtgcgcaacgtgccgtcactcggatgcggtgacgacctcgccagtctcttcgggacgtacggccccgtggaggagtgcacgcccatggatgcagaggactctgagccctacactgacgtcttcttcgtcaagttctcacaggtcaacaacgccaggtttgcaaagaggaagcttgacgagtctgtgtttcttggcaaccgcctgcaggtgacctatgcccctcaatttgagagccctcaagataccaaggagaaactggaagttaggagaaaagaagtccttggccgaataaaatcatctgctggcagacctgaagggtcatctccagctcagggatcatctagtgggaatcaccaccaaatgaactctaataagagggaatatatgaagacaattcatgcttctcctattgaagatcctcgtttcagtcatgtgccctcagacaaggattattttccatccgagtcgatgaatgctactgtaaagctagtcagagggaagcttgataagatacaatctggtggtgataattccagtacctcagcagcatccaggaaaccaggggtcgataagcgcaggcgaatttgattgcagataatgccgagcacgcgctcaatgttttggtgtaatgttgatattagcataacataccaggattttaatggacttttttctatcaattttctcactcacattctaggccattaagttgtttatgtttcagggtggcggtgctgtactatatggttagctagaattgccggaatatcgataaccgagttaagttaaaaatgcctcgcgtttagttatgtttcagggtggcggtgctgtaatgttatgttactcttgcaatcaattgtatcggaattctcat

SEQ ID NO: 34768 - DNA, 993 bp, Zea mays
  Clone ID: UC-ZMFLMO17310G09_FLI
cacggcagccgggccaacccaagcccgtcttctcttctctctcgtccgtcccgcactcgccgcgacgtgacaagacaacgcgacgcgcgcgcatacgtcgtccaaggcacgcaggggccagccaaccaatcgcgtccgtccgggtctggtggtggccggaatgggcctcctcgatcagctctgggacgagacggtggccggcccgcgaccggactccggcctcggcaagctccgcaagtactcctccttctccccctcctcctcctcgtcgtcgtccatcctggctcccgcgccggcgccggcgccggcggtgacgcgcagcatcaccatcgcccgcccgccgtcgctctccgtcgagtcctacagctcctcctccgtcccgtcctccccggccagcacgcccgactcgccgctcgccgcagctaccccgcccaaggcggacgtctggaggaggttccgccggaaaaccaaggtctccgacgggccggagccggccgtcgggcccaggagccccaccgtctacgactgggtggtgatcagctcgttggaccgctgagttagaacagatcaatcgccaataagcaacaaccgagctagcagagggcatgtttgcgttcttctgaatgttgtgcgcgtgtgtctgtggcagcataagtagagagtatgtcgatgatgatgacgacgacgacgatcagttcgcggcagggaggttagaagtggcctggcgccgatctccatcctagtttgggcgtttggcctatagccggcaggcgcgttctccagttgttggatcaggggaagaactcctgccgtgggaggctcctagggctgcctgcttcgttttctacgcaccctcctcccctctgtaattatcccaagcaccacctcgtactggtctggtagtagtagcagtgttttgtgtgtgtgtgtgtgtgtgatgctacgatgtagctgtgccttttcttctgctcgcctggaaaccttttgcgttcc

SEQ ID NO: 34769 - DNA, 1432 bp, Zea mays
  Clone ID: UC-ZMFLMO17310H06_FLI
gccatgtactaacaattttaacgaagctacttttggtaaactcaagttaccagaaaatttcaacagtggaaacattgatagcaataatgtcctgctaacaaaccaacatagccactattctcatggtttatggagcttgctgcacatagctcatagattgagtggatcgttggcatcatatcacccaagagcacttatccagtatctttattcaggtgaatggaaacgtgcggatgctgctctgcaccatcttgttcgatccatgaaagtgagtgaaacttcaaagggcatgtcaaattacagtacatgccatagtattccagaacttcctttgtctgaatactttgcggcaacagtgtccaacaacatttctaccaaggggtttatgtggggtgagaatagaagtaacacaacttttaatttgttgtcaccttcaacttcatttctttacgaggatggcaatttaggtattaatactacaactagtgcatctgaaaaaccagacattgttgagctccttgacaagagtttcagcaaatatggtataagtgactcagagaaaaatcagatacttgcaatttctgatcttatggctggaatcactgatcagagccattcctctccctacaaaaatcttgacgaagcaggaagaaggttctgggttgctgtgcagttcgaacaattccatgctcttagaagatctgcagattcatccagtaatgaagggtgccgtgttgattctgcttccatagcctgggccttccaatctgattgtcaggatgatctacttaattctgtgcttcctgcagagccaacctggccagagatgcgaaagcttggtataggattatggtatacaaatgtgtcccaactaaggacaaggatggagaagttggcaaggttgcaatatcttaaaagcaaggatcccaaggattgtgctttgctctacatagcattgaacagaataaaagtgttggttggtcttttcaagattagtagagatgaaaaggataaacgtctatatgagtttctgtccagaaacttccaggaagaaaggcacaaggctgctgctctaaaaaatgcttatgtactaatgggaaggcaccaatgggagcttgctatagcttttttcctccttggtgatgatacttcatcagcagtgaatgtttgtgcaaagaaccttcaagatgaacagcttgccattgtaatttgtcggcttattgaaggatctggagggcctctggagcgtaatctcatttctaatgtgctacttccagatgcagttgagagaggagataactggctgtcaagcctgcttgaggtgtgtcatatacgtggcttttgtctaattgcctttctatttttttatgttgagaatcaatataaattatcgtgtttccagagttacaatccttcaacttaactttatctc

SEQ ID NO: 34770 - DNA, 1642 bp, Zea mays
  Clone ID: UC-ZMFLMO17311C08_FLI
cttgaggttaaaccatgggtgaagacaagccttgcccctggatcaggagttgtcacaaagtacttgcttcagagtggtcttcaagaatacctcaaccagcaaggattccatatcgttggctatggctgtaccacttgcattggaaactctggtgatctcgatgaatccgtatcaactgccattacagaaaatgatgttgttgctgctgctgttttgtcgggtaaccgtaacttcgagggtcgtgtgcaccctttaactcgggctaactatcttgcttcaccacctcttgttgttgcttatgcacttgccggaactgttgatattgattttgagaaagagcccattggatttggaaaggatggcaaggaagtctacttcagggatatatggccctcaacagaagaaattgcgcaggttgtccaatccagtgtgctgcctgacatgttcaagggcacctatgaggctatcacaaaaggcaacccaatgtggaaccagctaactgtcccagaagcgtcactctactcatgggattccaaatccacttacattcatgagcccccttactttaaggacatgaccatgtccccacctggcccctctacagtgaaagatgcctactgcttgctgaacttcggggacagcatcactacagatcacatttcacctgcaggaagcatacacaaagacagtcctgctgctaagtatttgatggagcgtggtgtggaccggaaggacttcaactcatatggtagccgtcgtggtaatgatgaagtaatggcaaggggaacgtttgcaaacattaggatcgtgaacaagtttttgaacggagaagttggacccaagaccattcatgttcctactggggagaagctttctgtttttgatgcggccatgagatacaaatctgagggccatgctactataatcctcgctggtgctgagtatggaagcggcagttctcgtgattgggctgctaagggtccgatgctcctgggagttaaagctgtaattgccaagagctttgagcgtatccacagaagcaacttggtggggatgggaatcattcctctgtgcttcaaagctggtgaggatgctgattcgcttggcctcactggacatgagcggtacagcatcgatctccctaccaacctcagtgagatccgtcccggccaggatgtgactgttactaccgacaatgggaaatctttcacttgcatcgttcgctttgacactgaggtggagctggcgtacttcaaccatggaggcatcctcccttatgtcatccgcaacttggcagctgcgcataactgaggcaagatcacacaccgtttgacccacaatggcagtggcaggctccatgttcccagggctagcgacctggttctcaatgtagtgacatttgtgatggatctaggggtctctttgtcgattcagcccataaataaagtgtgaaataaaagccgcaggtggaggcaggaacctgctgattgagggaacagttttgcctgtgtttggttacatgaattatctgtttcacagatgtgtagagcatggtgtaaatgcttcatgtgctgttcgtttcgacaaattgattatgctgtagcccttcaggtttcatcttgacatttcggtgtcttggagc

SEQ ID NO: 34771 - DNA, 827 bp, Zea mays
  Clone ID: UC-ZMFLMO17311H06_FLI
caaagaggcttcaacatctggacaaaatccagatgatgttgcagacaactccagaacaatatgcgagaaccagaagtgggtctggtccgaaggacatttcctcagcgtcggtgcagctgtcatttcatgtcgtaacgaaagagcccctgatggcctggtagctgacgcacacctttcggatggttttcttcatctcttgctcataagagactgccctcttcccctttacttgtggcatctaacacaatttaccaagaagggttcagatcccctgtccttcaagttcgttgagcatcacaagacacaagcgtttacctttatctcatcacatgacgaaagtgtttggaacttggatggagagatgtttcaggcatgtgaggtatctgtccaagcgtgccgggggcttgtcaacttctttgcttcggggccagagctgtagtaatgatactcgggaaccaggcattaccttcaattctgttgcaagtctggaaggccaaatatggcggcacatttaggtagtcagcattgtcgaggaaccctactaatgtctaatacttcctctgttttttatttgtcatgttttagtaaaaaataaactagcgggcgataaatattcgagaacggaggtagtattttttatgtacaggttcggctgcagtttcttgtatcacttttgctgtgttgtgttggacatacggtgttttgcttccaatgaattaggaaaggtgttagaggcttagagccaccgtgttactgattagcgttatgggctgtgtcaggtgcattatgcaagtgttgtttagacctaggtctaattacctcttatt

SEQ ID NO: 34772 - DNA, 231 bp, Zea mays
  Clone ID: UC-ZMFLMO17312B01_FLI
actctgaagaggtaccccaaggattcagctttctggttcaagcatatgctgtccaagaaaaggagctagagaattgcagacaagaggaccactggcttcacgtgaaagttcactctgcaaatcctcttagtatgtcagatttagcttaaggaaccgtgcagacaattgagtctcaaggctcgacatctctagcttcgttaattgttgcaaggcaataaattggtatcttcg

SEQ ID NO: 34773 - DNA, 1093 bp, Zea mays
  Clone ID: UC-ZMFLMO17312B04_FLI
gtccaaaaggcttccaccacccaccagaccgacgaccactctcacaagcggcagtgcagtgcacccaaataaatcagctgggaggaggagcaccagcaccccaagagcagagctgagcagagcagcgtgcgtccaggatgtacccgtaccgcatgagcaacgtggcgatcggctacctgaacctggcgacgctgctggcctcgatcccggtcatcggcgcgggcctctggctggccaagggctcggcaacgcccacgtgctcctccatccttcaagcaccgctcctcgccgtcggcttcgccgtgctgctcgtgtccctcgcgggcttcgtcggcgcctgcttccacgtggcctgggcgctgtggctgtatctcgccgccgtgatgctcctcatcgccttcctcctcggcctcaccgtgttcgggttcgccgtcaccgcaggcggcggcggcgagcaggtgtacggtcggccgtaccgggagtaccgcgtcgccgactactccccgtggctgcagaggcacgtgcgggacgccaggtactggcgccccgcactcgcctgcgtcgtcgggtccagggcgtgccccaagatccacaactggactcccatggactacctccagcacgacctcacgccgatacagtccggctgctgcaagccgccgacggcgtgccagtacagcgggggcgtggccgtcggggcgcaggacgaggactgctaccgctggaacaacgccccgggcgtcctctgctaccagtgcgactcgtgcaaggccggcgtcatggagcaggtgcgccaggactggcacaagatcgccgtgctcaacgtcgtcgtgctcgtcgccctcgtctgcatctgctcctgcggctgctgcgccttcaggaacgcccgccgctccctctccgagtacccgtacggggtaaaccaaatgtccaagattgacccgcgctgggactactactggtggcgatggtggcgtggtagaagagaacagctctactaggctagctctagcttctcaatgcttgtatgatatcttagctcctgtcttccatcggaaagatgaaataatacttgagagctgtgttagccccc

SEQ ID NO: 34774 - DNA, 889 bp, Zea mays
  Clone ID: UC-ZMFLMO17312C04_FLI
cagctggcctatagaacgacaagaagggataactggatcgatgtcgaggtgaaggtggacaacgtaaggtgtgatgtggactctttggtctccgagacccttatggcggagcgtggatatggctccgaagagaagcacttcccatctcgtgtgatgctgcaaatcacacctacgcaacaatctgatgtgctctctgtttctgtcggcaagtccaacgacaaccccacacacgaattcggcatcgagaagggctttgagggttcatttgaacccccaaacgcatttggcctgaaggcgtcagtaactgaaagccttacactagccatgaagccctggaaattcgagcagtctgtgcatgggaacactgcaaccttgaactggtttcttcatgacggcgtcaacgggagggaggtttattcctcaaaaccttcaaagatttctctgctccaaccgaaggcctggttccgtgacaggtactcaaatgcgtaccgccccttcacaaagcagggcggtgtcattttcgcacgtgacgagtacggagacagtgtctggtggaaggtatgtggtgcagcgttaggacagactatgaactggcaaatccgaggctggatttggctaacctactggcctaacaaacaacggaccttccacaacgaaacgagatggcttgaatttagagagtgcctgcagctcccccttaccaagtttccataaaccacttgtactctgaaatgaatgggttgtatagcagtgtagaaccatagacattgaaaaatccatgcatatttggggggcacaaaaaagagtatgatactctattgtaactgaatgtactgttacatcgaaatgacctcctcatacgcctgccttgcaattttaatgcaatcct

SEQ ID NO: 34775 - DNA, 964 bp, Zea mays
  Clone ID: UC-ZMFLMO17312D02_FLI
ctgtttcggatcatactgatggtacaaaattttgtaaaggctcaaaagaggttgagcaaccgagcccagtgtccatccttgagcctccaattaatgaagatatttgttttccacgatgtttcaactatgacttgcaagggatggctaacaaacagagaggttgccatcaatatcacaatgaatctgaagttaacatgtcaagtgatgatgaagaccattctttttaccaatctttggaagcatttcaggtcgaggaaaactgggacttctcatatcttctcgacatacttatatgctctggtatcatagttgttgactggcagctcatctgcaagtcatggtacttgcctggttaccctgttggccctcatgtctttgataggcttgaaaggaaatacaataaaatcgcaacatgggcaaagcctgagaggaggcttctttttgacctcgtgaattcaattctttccgaggtccttgcaccatgtgttgatgtgcacccatgggtgcagcctagtagacactgtgtggcattttggggccctgaagggcctgttgagaaggtttggcagacaattgttaggctgcaggaagactgtgtcacaaggcatcctgatgagatggttcttgatacaaattggctggaagtaggcaccgacatcaatatggtggggaagcagatagctaggatgttacatggcgacctcttggaagaagtcatagtggacttccttggttgagttggtagtttcatgtggacataactagtaactaacaacttcggcaacatggggttcgctcaaacttcaagcagattatgctgaatatgtaacggcttttcaagtgcacacatgctgcatttttcttctggttataataggagctatgtattatgtaattacattggagagcaaaatatacaggccaaaaaaacactactgcaggtatttttcgattctgtactgct

SEQ ID NO: 34776 - DNA, 252 bp, Zea mays
  Clone ID: UC-ZMFLMO17312D12_FLI
aacacgcgcgttatcggcaccttggaaggacggttccttccttccctgcgcctaaatcgctgccctttgttttcgctgtatcagatgctgctatgctatgctaggctctagtctggcccagggaactgtggcaataatctgtggctttcaggctggtgttagaactcttgtactgcttgtaggcttaggtgggttttatcgtgcaagtagttggtttgatgtttttgtgtggtataaaagcgatttcaagct

SEQ ID NO: 34777 - DNA, 1611 bp, Zea mays
  Clone ID: UC-ZMFLMO17312E04_FLI
gagacacaaactttatctttttttacataatagtgcatataacaactaacacaattgcacaaaaatttcataacaactgagtaccactccacataacagatgcacatgacagaagttcattattcttgatagtgacacactgaacaagcaactgacactagttcaagtatgtagatcttgacactagttcatgtctgtagaccgtgacaaactgaacacacaaaactaatagattttcttatcctggcaccacctctttaaccaagctagcatttgtgcactttcttctatggtgagagaaacctctcaatgttcagtcttaacaaatagtttactagcattgaagtgctctgcacttcctgtaggtgcaccacattctttaaccaaagacatgcattgtttgatggattcttttatgtactcttcctgcatcgccttctaggctacaccattggtttcatgcatagactcccacattctttcattgttctgactatagggctccttgttcttttctttgtactgcgaacacttgtagtgcatagaccccttttcatgctgccaacactaacgggactgtcttctattgcagcttctactccttcaacatcaggtccttctatatcaatattttgtcctggtgtgcaggaagttgatccattcatagctatatgctcaaacattatctcaagcttatcaaggttttctggtggtccatattttaacttcctccattcagcatgccccaaagcatcttggtcattgaattcatcaccctcagtgtcgtcgtccacagactagacagcagcaccacgatctccaattgtgcgaggtgcacgatatggcattgttgaaggggggctggatgatgaccacgtgcacgtcgaccaccatgaccaccacggctactataggcacctcccaagactgtatcagaaactctcatagatgcatcctccaagccatgcacatcgtcataagtacgaccacgaccaccaccactgatgttgcaatgttgagcaacatggctaacaaaatgagcaacaccatggccaccaccttggatgttgagctcgtgaacaccacggctaccaccatggctgacaatgaaggagacgttggtgttgaggtccaacacttgggagttgaggtcgaggtcgtcaattcgatccgagacacgacaacgtccaccagtaaattggttgaaggatgagggtgtactatgtgcaccaaagagattgcgagctgtatttgtcaaacctgagaaattccaagggaaactggtgtcttcatcctcaaaacgtggatccatgtcttcagcgtgctggcggcaaaacaacttcagatccttggcatggcacagacctaggaaaccaccaacgaataggggctgctttgcggatgttgcagggcgacgacgaccttgggggcggtgacaaccttggggcggcgatgatggcgtacaccttgattgcgcacaactaagcttggggatgactacgcacctgggtcagctagctaagcttggggacggcggcgcacctaggctggtcgatggggtagctcagggtttggggcggcgacgcgacatgttgaggcgacgacgcggca

SEQ ID NO: 34778 - DNA, 1332 bp, Zea mays
  Clone ID: UC-ZMFLMO17312E09_FLI
cttttgccgcttcctttcaaaaaaaaaaatgtcagacaggcgtgggcgtggtattgatgtagcaaggtcattcgctggcctttctcagtcgggccttgggtcccaagaatcaagggttgtcgacctacgaaaaggagtacatggctatcctcttggcggtgactcaatggtgatcctatcttcagctagttgaattcattatttacacggaccatcacagtttgactcagttgaatgagcaacgactgaatacggtgtggcaacagaaggtgtatacaaagctagcaggattgcagtacaaggtgatttacaagaagggaacagaaaacggtggtggtgacgctttatctcgacaatgctctgatgagttacagtgctgtgctgtttaacattgcacaccagaatggctgcaagagttggttgtcagttatgatcaggattctgacactaaggagttgctgaccaaattgagtttgcactcgaggcagctggatcggttttcactccagcaaggtgtcattcgtcataagggacgtatatggctggcaagcagtccagctatgcaactcaaggtgatacgagccatgcatgatactgccattgggggacattccggagtaccagcaacatatagcaaactgaagtcattgttctattggcccggtatgaaggctgttgtccgtgagtatgtacagtcttgtgctatttgtcaacaggccattcaggcttggcacaccatctctttggacttcattgagggcttgcccagatctttgcagtccaattgtattctcattgtggtcgacaagttttccaaatatggccatttcatacctcttcttcatccttttactgcgagcaaagttgccaaagtttttctggacaatgtctacaaactccatggactccctgttaacattgtgtccgatagagactgtatctttactagcagcttctggcaacacttgttccagctcactgacactaagctgtgcatgtcatcggtgtatcatccacaatctgatggccagacagagcgcttgaatcaatgtttggaaacatttcttcgctgtttcgtgcacacctatccaactcgttggtcgcagtggttatcggtggcggaatactgttataatacgtcttttcattcagcattgggacagactccttttgaggtgctatacggctatgccccacgacactttggcatttcatcggaggtggtggttccagtaccagagttagctgattggttacaggaacgtgagctgatgagtcgcatcattcagcttcatttgtccagagctcagcagaggatgatatactccactt

SEQ ID NO: 34779 - DNA, 2242 bp, Zea mays
  Clone ID: UC-ZMFLMO17312F10_FLI
gctcctcccgtcgagcacttggcactgccaatggcggctcccgcccacaccccttcgatgcgcgcaagccaccttctttccccgtgagatcgacgcacctccccctctcgtgcttcattcccgctcgtcgttcgtttcttcgcccccgagccgtcgcgcggtcgcctccgcatctcgtcgtgctttaaggtctttggcctccgccgttcttggacaggggcgcaccaccgtccaccgttgcccactacgcgaaatacgagtccctcgttcggctccgtagggtggaagagatccatcaggcggtgagtgggaggggcggcgtccacacaaccggaggggaggggggcaatggcggccgtggcaggcccactctgcacgtggctcgtcgccgcgtgcttatctgcggcatgcgacgctgaagagcacaagcagaagcatttctgcccaggcggaagccgcgctgggggcggcgtcatggtcggccagcgccgccgcctcggcgcgcggcgtcgcggcttggcgcgctctggaatgactatggctgttgccttacaagctgaaagaagtgtcattgaaaagaagaaacccgatatcaaacaaaggagggtggttgtcactggcatgggtgtagtgacaccattgggccatgatcctgacgtgttttacaacaatcttcttgatggtgttagcggaataagtgagattgagaggtttgactgttccaacttccccacgagaattgcaggagagataaaatccttctctactgatggttgggttgcacctaaacttgcaaagcggatggacaagtttatgctatatctgataactgctggaaagaaggcattagaaaatggtggactcaccgaagaactaaggaatgagttggacaaaaccaggtgtggggttcttattggttctgcaatgggtggcatgaaggtttttaatgatgcaattgaagcactgagggtctcttacaagaaaatgaacccattttgtgttccttttgcaactacgaatatgggctctgcgatccttgcaatggatctgggatggatgggaccaaactattctatttccacagcttgtgctaccagtaacttctgtatccttaatgcagcaaaccacatcagaagaggcgaagctgacgttatgctctgcggtggttctgatgcacctcttatcccaatcggattgggaggttttgtggcctgcagagcactttcacagaggaacagtgacccaacaaaagcttctcggccttgggacatgggacgtgatggttttgttatgggggaaggggctggtgtcctcgtattggaagaacttgagcatgccaaggaaagaggtgcaacaatatatgctgaatttcttggtggaagcttcacatgtgatgcttaccacatgactgagccacatcctgaaggaagagggattactctctgcatcgaaaaggcactagctgatgcaggggtagcaagggaagaaatcaactacgtgaatgcccatgcaacatctacacaagcaggtgacttgaaggagtatgaggctatcgtgcgctgttttcgccagaaccctcaactgagggtgaactcgaccaaatcaatgactgggcatcttataggagcagctggtggaatagaagcagttgcttctatacaagctataagaactggttgggtccatccaaatttgaatttagaaaatccagaggacaccgtggacgtgggcgtcttggtagggtcacagaaggagagatgtgaagtgaaggtggcgttgtccaactcattcggattcggtgggcacaactcatcgattctctttgccccctttaagtgaacatgacagaggcgaagaaccgacatcttcctcatcgcccaaatggcttcatatatctggaactccacatagaaatctggtggattctgcaacttcctccgtgccacacatactgcatatggaggtccaaagtgagggtacaatactatgccacacacatttgagcgaacaaaacatcagccccctacatgtttcatctactatcacaaagttgcaaaatatatatggtaactatcaaagaacttaccgtacctgggccagtgttttcgccttcaccatacctgcccattgtcagtactatttcctacatttggtgtagtcccgtagcttaatcctcttccctgcggaggtgatgggatctaatgttgtattgatgttgccaacagtatcgttattagccatg

SEQ ID NO: 34780 - DNA, 1319 bp, Zea mays
  Clone ID: UC-ZMFLMO17312G01_FLI
cagtgcagtgcaggcaggcaggccgagagaagagccggctccggttaatggcgttgggaagaccacaggtatggagtacccagagcgccctggacagccactctgtgagtactatgcaaagaatggcacatgcaaatttggttccaattgcaagtttgatcatcccagggaaagtggttttgtacctgtcgctttaaacaacagtggattccctctacgtctgggtgaaaaggaatgttcgtattacatgaaaactggacattgcaaatttggaggtacatgtaaattccatcacccagaacttggttttcttacagagacgcctggcatgtacccaccagttcaaccatcacctatttcctccccacatccatatccacatcattccaactggcaaatggggaggcctgctgttgtgccagggtcatttttaccaggcccatatccaccaatgatgcttccacctacagttatgccaatgcagggatggaacccttatgttgtaagtttctattacttgtcattttgtactttattactttaaagaaggcacttgcgtgccttatataaattaggaagatatctttgttctaaattggcatctccaatattgcggtaaatagtgagaattcagtggtaagttcataacaaaatagaggcaatgggctaaaatggaggttttataggaccacatataattggatgtaagttagtaattccttcatgccttgaaaacacaatcttagccatgaatagaagacaccactgactgcctgatgatttttaaaaactctttttggttctcagtcacctatgaaccaaactacaccagctgggggccagcaagctgttccagcagggccatcttatggcttgtcgcaccaggagccaacctctgcagtgacttatggcagtcattatgcgcaattgtattcttcttctgggacttcaagcagcaacatacaagaatatgtgtttccagagcggcctgggcagcctgaatgtgaacattacatgaagacaggaacctgtaaatatggagcagcctgcaaatatcatcatcctcaatacttcagtggaccaaagtctaactgtatactgagccctctgggtcttcccctgcgtcctggttctcagcgatgtgcttactacgcacatcatggcttttgcaagtttgggccgacatgcaagtttgatcacccgatgggtactccaaactacagtcttccagcaccatcacttactgatgtgccagtcgctccatatcctcacactttctctgttactcctattgctccatatctgctgccccctgatcc

SEQ ID NO: 34781 - DNA, 863 bp, Zea mays
  Clone ID: UC-ZMFLMO17312G11_FLI
ctgaagttgcagagaagagatggaaagtacttgtgtggaagactgctgtttatcttatcactctcggtatgctcattgcacttctaatgggactgaacatgtcctggactgcaatcactgcagctcttgttcttctggcactcgattttacggacgcacaagcttgtcttgagaaggtgtcatattcactgctgatctttttctgcgggatgtttatcactgttgatggcttcaacaaaacgggcataccgaacacactatgggagttagtggaaccatattcacgaatcgatagtgcgaaaggtgttgcacttcttgccgtggtgattcttatcctttcaaacgtggcctctaatgttcctacagtcctattgctcggtacaagagtggctgcatcagcggcttcgatttctcatggttcagagaggaaagcctggctcatccttgcatgggtcagcaccgtggctgggaacctcaccctcctaggctctgcggcgaatctgattgtctgcgagcaggccaggcgggcccagttcttcggctacaacctcaccttctggagccacctccgattcggggtcccgtcgaccatcatcgtcacggcgattggtttgctcatcgtcatcagttactgaaacagctgaaggcagaagagcgtagtgtaagagaagcagaatggataaaaatccttccaataagaagtacatgtaaattaggcttgccctataactcaagtgtgtatcggtacgttatgtctccgtctgtgctcttgctcgtgagcaagcagcacatggctgaccgtgtagcttgcatttccattgcataataggcttatgaagaatgctttggtaatatgattttac

SEQ ID NO: 34782 - DNA, 1537 bp, Zea mays
  Clone ID: UC-ZMFLMO17313A07_FLI
gcgagatccacatgggggacctcggcggcgcatcctcggtcaaggcggaggatggagaagtatggacgttcagtgttagatcatttgaattgcctctcccagaacgaactattaatgtgaactatgatggatttgctgaagatgtgagagttggtgatgagcttcttgtggatggtggaatggctcggtttgaggtgattgagaagataggaccagatgttaagtgccgttgcacagatcctggtttattgttgccacgtgccaatcttacattctggcgtgacggcagtatcgtccgtgagaggaatgctatgcttcctacaatttcatcaaaggattggcttgacatagactttgggattgccgaaggtgtagatttcatcgctgtttcatttgtcaagtctgcagaagtaattaggcacttgaaaagctacatagctgcaaggagccgtggaagtgacatggcagtcattgcgaaaatcgagagcatcgactctctaaagaacctggaggagatcatccgagcgtcagacggcgccatggtagccagaggggacatgggggcgcaggttcccctggagcaggtcccctcgatacagcaaaagatcgttcagctctgcaggcagctgaacaagccggtcatcgtcgcctcccagctcctcgagtcgatgatagagtaccccacgcccaccagggccgaggtcgcggacgtctccgaagccgtccgccagcgcgccgacgccctgatgctttccggcgagtcggcaatggggaggtacccggacaaggccctcagcgttctgaggagcgtcagcctgaggatcgagaagtggtggagggaggagaagcgtcacgaggcgctggagctccggagcgtctcgtcctccttctccgacaagatatcggaggagatctgcaactcagcggctaaaatggctaatggcctgggagtggacgccgtctttgtgttcaccaagaccgggcacatggcctccctgctctcgcggtgccgccccgactgcccggtcttcgccttcacgacgtcgacgtccgtcaggaggcggctgaacctgcagtggggcctgatccccttccgcctcgccttctccgacgacatggagagcaacctgaaccgcaccttctccctgctcaaggccaggggcatgatccagtccggggacctcgtgatcgccctctcggacatgctgcagtccatccaggtgatgaacgtaccctgaggtagaagagccttaccatgccgcacggtcccgtatcggaaggaaggaacacgcgcgttatcggcaccttggaaggacggttccttccttccctgcgcctaaatcgctgccctttgttttcgctgtatcagatgctgctatgctatgctaggctctagtctggcccagggaactgtggcaataatctgtggctttcaggctggtgttagaactcttgtactgcttgtaggcttaggtgggttttatcgtgcaagtagttggtttgatgtttttgtgtggtataaaagcgatttcaagct

SEQ ID NO: 34783 - DNA, 823 bp, Zea mays
  Clone ID: UC-ZMFLMO17313D04_FLI
atcgacaacttcaaccccacggtgaagatgacggttacctacggctccaacaagcaggtgttcaacggccatgagttctttccgtctgcggttctgtgcaaaccgcgcgtggaggttcagggcgacgacatgaggtccttcttcacgctggtcatgactgacccagatgtgccagggcctagtgatccatacctgagagagcacatccattggatcgtcaccgacattcctggaacaactgatgcttctttcggaagggagttggtgatgtacgagagcccgaagccgtacatcggcatccacaggttcgtcttcgtgctgttcaagcagagcagccggcagtcggcgcgcccgccctcgtccggcggcagcagggactacttcaacacccgccgctttgccgccgacaacaatcttggcctcccagttgccgcggtctacttcaacgcgcagcgggagactgccgcgcgccgccgctgatcgatcatcaccgtacctacagcctgcaggcggccggctagctgcagcaacgacaaccacatccatcagtcctcgacgctacctgctcccatgcatctccttcctcatcgcgtgcatggcgcatgcaaaacctatcgatctatagctactatatatgtggctttttattactatttcctacagtatgtggctatcgtcgtcgtcaaataagagcttatgacacctttcagcgagagctagagctagctgtcctgtctcgatcgatctgctagtagtctttctgttcttcgttttttcggtcaataatcaattagaagctagcctctctagctgtgcatgaatg

SEQ ID NO: 34784 - DNA, 1243 bp, Zea mays
  Clone ID: UC-ZMFLMO17313D07_FLI
ctcgcggtggaataatatgccaaccatctctctccggtccggtccggagcggttgaagctaagcgagagtcaactaccgccgccctctctctagtccagatttccagcggtccagaccgagagctcggctccctacacgacatcatcatggacgccgccccgctcctcgctctcctcctcgcggccgtgtccctctccgcggcggcggcgggcgacggcgcgcacccgggctactccgacgagggcacctgcacggtggacgccgccggagcgggcgtgggctcgggcccggagctgcggcgcctggaggagcgccggcccgggcgcatcatcgacatcacgcacgcgtacgtgccggaccttctggcgttcgcgccgggggctgtcacggggcccttggtccacctcaaggagtccatggcgaacgggtccgagtacaacctgtcggagctgcggttggagtgccacatgggcacccacgtcgacgcgccaggccacatgaaccaaggccacttcgccgccggcctcgacgtggacacgctcgacctcgacgtcctcaacggacctgcgttgctggttgatgttccgagggacacaaatataacagctgaagcgatggaattcctgaatatccctagaggagttcgccgagttctattcaggacgctgaacactgacaggaagttgatgtggaggaagggaggtgacatgagctatgttgggtttacagaggatggcgcacagtggctagttgacaacactgacataaagctagtcggaatcgacagtctatcggttgcagcatttgagcacttgatctctgcccatgtggtcttcttcaagaccccggatataatccctgtcgaaggcctgaagctagacaacattgagacgggaatatacatgctgcattgtttacctctcagactggttggagccgagggtgcaccgaccagatgcatcctcatcaagtgatcacccccctgctcttgctggaggtgacattgtatcatgccagctgagctgatgcttcatcgtggccaacgcattgattcgcagtcttcgtcttcgtctatatgaaacatagtgttgtatgcccatgtagatatgcttgtacggacaatagagacacagcaatacttccatcaaggaaatacttttgggtaagccggtaatgtaaaagacagacatacagttgactgaataaactagaggcctgagaggctgaggcctcgtgcttccc

SEQ ID NO: 34785 - DNA, 819 bp, Zea mays
  Clone ID: UC-ZMFLMO17313D08_FLI
ccccaatccagcagccctcgagtctggtcccccacccctcagcgcgacgaaggtaagatgttcctgcggaggatcctgaccggcgggggcggcctggcggccctgagggcggcgcgcgccgtgaaggagacgacggggatcgtgggccttgaggtggtgcctaacgcgcgagaggttctggtagggctctacgagcgcacgctcaaagagatcaaggccgtccccgaagacgagggctaccgcaaggccgttgaatccttcaccggtcaccgcctccagatctgccaggaggaggaggactggaagcgcatcgaggaccgaatcggatgcgggcaggtcgaggagctcatcgaggaggccgaggacgagctcaagctcatcgctaaaatgattgaatgggatccatggggtgttcccgatgactacgaatgtgaggtgatcgaagacgacaccccaattcctaagcatgttcctcagcacctgcctgttgctcttcctgaggagttcttcaaggcactagatgctgtcaaatctgatcctgctcttcaaggcgatgctcctcctcaagtgaaggcgtaaggatggctgttcctggctaacgtcatttcacattttgccgcggtgggtagggactagtttcttgtgtcatttgccagcaatgcgcttgctctgagcagaataaatttatggtgagtaccatcaaagtgtgaatttgaacttagtgattcggcacagtaaacttgttgcccatgaatactcgatgccctgaacatcgtttgttttgacgttataatcgatgttgacgaaatatttgatgct

SEQ ID NO: 34786 - DNA, 1007 bp, Zea mays
  Clone ID: UC-ZMFLMO17313G06_FLI
gcagaagaagtgctttaccctcacccgccccacgcgcggtagttcgttcgacacagtcacagtcacagaccagtcgtttctcccttctctcccccgggcccggagaggagaggatggccggccggagcagcctctccatggtcgcgtcgcaccggctgttcacgccggtcaaccctgtgggcggcgccgaccacggcgtggagctcgacgaggccgacgtcatctggggcggcgtcggcggcggcggcggctacccggcgtcgtcctcgccgtcgtcgtcgccgttcctgtcctccgcggtcgacccgtacgcgcggtcgccgccggtggccgcgccgtccaagcagaagccgcgtggggtggtggccggcgctccggggccggcgtcggtgcccgtcaacatcccggactggtccaagatcctgggcgccgagtacgccgggagcgggtgggcggcgcacgacgaccgcgcggacgacgacgcggcgggctgcggcggcgccgggggccggcgctgggtgccgccccacgaggtgctgcaggggcgggagcgcgcggcggcgtccttctccgtgcgcgagggcgccggccgcacgctcaagggccgcgacctccgccgcgtccgcaacgccatctgggagaagaccggcttccaggactgaccgaccgctactgtcagcgccagcgccagcgccagccttgcgcttgcgcggccggcaatgcccgcctaccgtggcctggcctcgtttgatcccgttctcgccttgaggaggaggaagtgaggagcttttgcttgattagtggccttttaatccatttggattaggtcgatgagttctttctctctctctcttttttttattatgttttggttcttgtcgctctagtcgtgatcgatgaggggagagtagagattaaaagcctctgtttttggcatttttcccccggagaggctcggtcgatgtacgtcccaccactaagattaattcatcttgattactagtatc

SEQ ID NO: 34787 - DNA, 1238 bp, Zea mays
  Clone ID: UC-ZMFLMO17314D03_FLI
cggaggcccaggccgcctgcacgctcgaggacgtggactacctggaggccccgctgatggtgcccaaggacgacctcctcccgcccaccccggccgccgaggacgagcgcgcgctggtcctgctcgtccaggtcaccgccttcgcgtgcggcggcttcgtcgtgggcttccgcttcagccacgccgtcgccgacggcccgggcgccgcgcagttcatgaccgcggtcggggagctggcccgctccggcgcggtgtcggtggagccgcagtggggccgcgacgcgatcccggacccggcggcggcgctggtggggcggctcccgacccccgacgccggcaccaggcggctggcgtacctcgccatggacatctccgccgactacatcgggcactacaaggcggagtacagcgcggcgcacgcgggcgccgggtggtgctccgccttcgaggtgctcatcgccaaggcgtggcggagccgcacccgcgcggcggggttcgagccggacaccctcgtccacgtctgcttcgccgtgaacgcgcggcccgcgctgcacggctcgctcccgcgcggaggcgccggcttctacggcaactgctactacatcatgcgcgtgtcggcgcccgcggggaaggtggcgggctcctcggtggcggaggtggtgaggatcgtcaaggacggcaagcggcggatgcccgcggagttcgcgcggtgggcgacgggcgaggccggcgccgccggcgtcgacccgtaccagatcacggccgactaccgcacgctgctggtgtccgactggacgcgcctcggcttcgcggaggtggactacggctggggcccgcccgcgcacgtcgtgccgctcaccaacctggactacatcgccacgtgcatcctggtgaagccgtgggcgcacaagcccggggcgaggctcatcacgcagtgcgtcaccccggaccgcgtcgccgccttccacgacggcatgctcgacaccagctgctgagctgagcagctctgcctgcctgtgctggattcgaggaaggcaggattggtattggattggatggggggtgggggagcgtggatgcattggttggtggtgattgtttgtcagtgtgtgtgtgttacctgctgaataactcccagaccccctcgattcagggagtttgggggagctgagctgtgttacctactcgcaccaatattgaattattcatctccgaaaaaaaggagatcaattaaccgt

SEQ ID NO: 34788 - DNA, 1731 bp, Zea mays
  Clone ID: UC-ZMFLMO17314D09_FLI
agttgtcaagatccatggccgttcttgtgctcatgttcgtcgtcttgtgccgagtgggggaggcggcgacgttcacgttcgtgaaccggtgcacggacacggtgtggccgggcgtcctgtccaacgccggcagcccaaggctggagcccacggggttcgagctcccgccgggcgcggcgcgcgcggtgccagcgccggcgggctggtcaggccgaatgtgggcgcgcacgggctgctcgcaggatggcggcacggggcggctcgtctgtgccacgggcgactgcggctccggctcagccgagtgcgcgggcgcgggcgctgcgccgccggccacgctggccgagttcacgctcgacggcagtggcgggctggacttctacgacgtcagcctcgtggacggctacaacctccccgtgctggtggagacctccggcggcggaggatccaccgggccagcctcgtgcgccgcggccgggtgcgcggcggacctgaacgcgatgtgccccgccgagctccgagccgggggcggcggcgcgtgccggagcgcgtgcgacgcgttcgcgcggcccgagtactgctgcagcggcgccttcgcgtccccggcggcgtgccggccgacggcctactcgcaggtgttcaagactgcgtgcccgcgctcttacagctacgcattcgacgatcccacctccacattcacctgcggcggcggcccggactacaccgtgacattctgccccggcgccaccccaaggtccggcctttgaattcactcgcccttcttttctcgcaccattgcctgatttattggtcactctcatcgtacacttgcaatttctcgctctctctagagagagggagagaaagagagactatgaaacaagatttggcactgcgcttctgccaagtttgtctggatctgtggatgggttcttggcttgtgaatgtggggttgatctgccgcagctcttttttaccgtgcctgccagctagtctacactatactacacagccttctgtcgtcctttagctcctcttgtcactaaaacagtcagagatttctgactcaccgcaagatttccagctattaattacctactaaaccagtaattagctcctatcgttacaagattgacattgtcagagatttctggcttctctgtgagaagttgaagtagtttaactaaggcattatctagtaatgcaatctactactgatcttatttgtattcctagaaagccgaaagacaagtaagtaggaacatgcatggtttacttgcaagatctggcatactcttgtgtttttatttttttggggctattttccatttgcgtgaattgcttttgtccgtactactgagcatgtgaacactgatcggttggcgctgctattgtgtgtatccgtaacgtgagcgcagccagaagtcgacgaccatgccgagcgcgacgccgacgatggtgccgggggggacaacgacgacagtgccaggggcgacgcccacgacggtgccggggacgatgccaatgccgggcgcgaccccagcgttgccgacggggaccatgatgccgggcactacgttcacggacgccaccccggacagcgggatgccgatgggtggtggtggtggcctgggcatcgagggcggggaacaaggcagcgtgctactcggagccagcagcggcgaaggcggcgtctcttggctcgccaacatggccaccggcgacgcatccgcc

SEQ ID NO: 34789 - DNA, 1075 bp, Zea mays
  Clone ID: UC-ZMFLMO17315A11_FLI
cacaccccccgagctgagcttagctccactccagctccaatcacagtcgtgaccagagcgcgagagctagctagagggccgtgaaaatgccgatcaataggatcgccctggggagccaccaggaggtgtaccacccgggcgccctcaaggcggcgttcgctgagttcatctccaccctcatcttcgtcttcgccggccagggctccggcatggccttcagcaagctgaccggcggcggcccgacgaccccggcgggcctgatcgcggcggcggtggcgcacgcgttcgcgctgttcgtggcggtgtcggtgggcgcgaacatctcgggcgggcacgtgaacccggccgtgaccttcggcgccttcgtgggcggcaacatcaccctgttccgggggctcctgtactgggtggcgcagctgctggggtccaccgtggcgtgcttcctgctccgcttctcgacgggcgggcaggccacgggcaccttcgggctgacgggcgtgtcggtgtgggaggcgctggtgctggagatcgtgatgaccttcgggctggtgtacacggtgtacgccacggcggtggacccgaagaagggcagcctgggcaccatcgcccccatcgccatcggcttcatcgtgggggccaacatcctggtgggcggcgccttcgacggcgcgtccatgaaccccgccgtgtccttcggccccgccctcgtcagctgggagtggggctaccagtgggtgtactgggtcggccccctcatcggcggcggcctcgccggcgtcatctacgagctgctcttcatctcccacacccacgagcagctcccctccaccgactactaaaagccgaagccgaccgacccaggggtgcgcagcgcagcgcagctagcatccagctctctctccccggcccgctcgccgccgtttagtttctctcgtgcacgtgcatgcatcgtagactgtctcaggccgccgctgcgccggcgccgctcgcatcgtttgcttttccttggaccagcagtcgtcgccgtcaggttgagctgcttgtaaccgttaattccggacccgtttgcttctgt

SEQ ID NO: 34790 - DNA, 607 bp, Zea mays
  Clone ID: UC-ZMFLMO17315H05_FLI
gtagcctgtagtccccccccctcctctctctctcttcctcccccactcgcacagtgcccaatgccgcacaaaccctagtgcccccactcccaatctcgcgcggcggccatgggaaactgctgccgctcgccggccgccgcggcgcgggaagacgtcaagtcgtcgcacttcccggcctccgccggcgggaagaagaagccccaccagcaggcgcggaacggcggccccggctccggggagaagaagcgtctgtcggtgctcggggaggaggggtgcgacgtgggcgccggcgggatcgaggagaagtacgcgctggaccgggagctggggcgcggcgagttcggggtgacgtacctgtgcatggaccggggcacgcgggagctgctggcctgcaagtccatctccaagcggaagctgcggacccccgtcgacgtggaggacgtgcggcgggaggtggccatcatgcggcacctgcccaggagccccagcatcgtgtccctgcgggaggcgtgcgaggacgacggcgccgtgcacctcgtcatggagctctgcgagggcggggagctcttcgaccgcatcgtcgccaggggccactacacggagcgcg

SEQ ID NO: 34791 - DNA, 1908 bp, Zea mays
  Clone ID: UC-ZMFLMO17316D09_FLI
gcgccgcttctcttggccattgtagagggagagagagagcgcgagcgacctaggtcagtcggtttcggttttgggcgtcagcttcagctatccgcgaccgcgacgatgggtctgcgcgtggccgccaccgcgccagctccggccggcgtgcgcgtgctcggcaggggcgccgcgcgcgtgacgccgcgaccgtgggcggctgtcggcggcaggagacgcttctccgtgcggatgtccgtcgcgaccaccgaggccaccaccaccatcgccgtgggcgcctcggaggaccaggcgctggaggctaggaactccaagacggtggtggcggtcatcctcggcggtggcgccgggaccaggctcttcccgcttaccagacgcagggccaagcccgcggtgccaattggcggcgcgtacaggctcatcgacgtgccgatgagcaactgcataaacagcgggatcaacaaggtctacatcctcacgcagttcaactcgcaatccctcaatcgccacctctccagagcctacgatttcagcaatggcgtggccatcggagacggattcgtcgaggttctagcagcaacccagaggcctggaacggaggggaaaaggtggtttcagggtactgctgatgcagttcggcagttcgactggcttttcgatgatgcaaaatctaaagacattgaagatgtgctgattctttctggtgaccatctctaccgtatggactacatggactttgttcagagtcatcggcaaagaggtgcaggcatcagcatctgttgtttgccaattgatggcagccgggcatctgattttggcctaatgaagatagacgacactggaagggtaatttcattcagtgagaaaccaaaaggagacgaattaaaggcaatgcaagttgacaccacagtgcttggcttatcaaaggaggaagcagaaaacaaaccttatatagcttcaatggggatctatatttttaagaaagacatactcctaaaccttctaagatggcgttttcccactgcaaatgattttggttctgaaataattcctgcttcagcaaaagaaatcgatgtaaaggcttatcttttcaatgattactgggaagatattggaactattaagtccttctttgaggcaaaccttgctcttgctgaacagcctccaaggttcagtttctacgatgctgacaaaccaatgtatacatcacggagaaacctaccaccatctatggtcaacaatagtaagatcactgattcaatcatttcccacggatgtttcttggataactgcaggatagaacatagtgttgttggagttcgttctcggataggctccaatgtgcacctcaaggatactgtaatgcttggcgctgattattatgaaactgccgtggaaagaggagagctgcttgcagaaggaaaagttcctattgggattggagagaatacaacgattcaaaagtgtatcatagacaagaatgcgaggatagggaagaaagtggtaatctccaactctgaaggtgtagatgaagctgatagaacttccgaaggcttctacattcgatctggcatcactgtcgtactgaagaacgcgataattgctgatggattggtcatatgagctgaaaaggtctcacaggacgggtatttgccgcacaaaatatcaataggagttctttgttagttttacaataagatgctgtatagcagtcaacaggttattcttgtctatacaagatacctttgtctacaaatcttgtctcaccatgttgtattcgactcaaacaatgttgcagtcatggacattgtccgtttcaaattttcttccttgcacatttacacaaaccttttcaatttttatttcttgctaaacaataaaagctgttgttctaatcagtatgcaacc

SEQ ID NO: 34792 - DNA, 667 bp, Zea mays
  Clone ID: UC-ZMFLMO17317B03_FLI
tcttgacaaaagcagtggaagaagcataccgaggagtcgattgcggtgacggaggtccatttggagcagttgtcgtatgtaatgatgaagtggtagttagctgccataacatggttctgaagcacactgaccctactgcgcatgctgaagtaactgcaattagagaggcttgcaaaaagctcgggaaaatcgagctctctgactgcgaaatttacgcgtcctgcgagccatgcccaatgtgctttggtgcagttcatctctcccggatcaagaggctggtttatggggccaaggcggaggctgccatcgccattgggttcgacgacttcattgcagatgctctgagaggcactgggttctaccagaaggccaacatggagatcaagaaggccgatggcaatggcgcgctgattgccgagcaggtcttcgaaaagactaaggagaagttccagatgtactgatgcttggctgaagagggatttcggatttgtacaatgctcacccagaaggaataaatacatcgcccaaatgtccattgtttcgaaaaaaaattacctcaattccaatgcttagcattctgatgatgcctgaattccttgtaaacagacacaagactgtcctttgctgtaactcatgtgcagttagtggaattcactttcgccctttc

SEQ ID NO: 34793 - DNA, 1825 bp, Zea mays
  Clone ID: UC-ZMFLMO17317D01_FLI
cctaccaaacaaggactgaggggattaaaatcctcttcgtattcaaattaaatagaaagtagattttagtcttccgatctcctgcaattcttactctcagataagctctaaatgcacttcgcctcagttggaagccacagaaaaacaaaacaaaaggtgctgccagtccgccacgcgaaaaagaagtcagtttcgcagttcgcagcacgtagacgggtgtccccccccgcccgcccatcgttgtcgtcagctccgggcagccgaaaccggaaacctcccgttccccatccccagtcggctgtcgccgtggattcagcggaacccccggcgcaaaaacaagcattatctgggagcccagcccagatgcgggcgcgttcagccgtcagccacacacgcagagacacgcacggcgcaagcgcaacttggcgcgagaataacagaaaaatatgcccactccacagctggtgaccactgccaagcgaaaggaaccggggcgatctgcctcctgggggaaagatcttgttcacctggacgcacgcgcgcgcccgcgcccgcacggacgggggccccgcggcctgctcctggaccgaaatcttcccttcccagcgcttttgcatcatcctcgtcgtcgtcgtcgtggtggtggcacctaaaagtctacgtacaaggtatttgcccagggtcagcttgcagagacaagaagaaaaaaaagggggggagggggtgtccactccactgtggccagtgggcactggcagtccccatcggctgctgccttttcgctgcacattcagcaaagcagagcctataaataggtacgtccgtcgcctggtggcatgcacaccactgcaccgagcttctccatctccagagctacactgactagggaactgctttgctggcttggaggttcacgacgaggcatgccggtctgcttcttaccagcatccatggcgggccaggtgcagcggacggcgccgtcctcgtcctcgccctcgccctcgccgcggcagctgccggtcatcaaccttggcaggctcgggaaggacccggccacgcgggcgctcgccatccaggacattaccagagcgtgccgcgagcagggctgcttccaggtcagtgcgtgctgcttgtctgttgctctgtccgtgtcctcccaacacttgttcgctgacagtcacagtgaactcagtcagccagccagccagccatgagtattctcgacggaaaataaaaatacaaagacacacgtgtcctgtgtgccctttaaaacaagtgccagtcacccatgcagctcacgcacgctgtgacccaagctgaccagcttacttaccatggaactttaagcggcaactcaccagtgatcaagtcaacaaactccatgttgtgcaaacctcggattctggtgtgatgcttcagtgccaatgctgatcaatacgctaccaattccttgtggtgccgattgacaggtggtgaaccacggcgtcagcaagtccgtcatggcaggcgcattcgaggccgcctcggagttcttccagctctcgccagagcacaaggagctgtttgcatcgaccgacatcggaaggcctgtcaggtatgacacgagctcaagggacgggatcagcagggccaggtcgttcctgaagcactacgcgaaccctctggaagactgggtccagtactggccactgcaccctccatcatacaggtaattaaccagtacgcggatggggggtgcggtgcaggctcggacgaccagccgcatcggcgtcatgtccgccgcgcccgctgctctgcttccccctcctctccgcgcccggaggga

SEQ ID NO: 34794 - DNA, 2086 bp, Zea mays
  Clone ID: UC-ZMFLMO17317F04_FLI
aaaatactcatatgtgatgtgagagttcagggtgttggtactacaaacatcctgcagcctcgtgaactgacgcaaatatcaaccaaacctgtgcaagaaagttcatgccggatttatttttcaagtggatggcaagatactccgctgtacaagcttgagaatttgggttatggccatctattggagggtcctgcagttattatgaatgggaatagtactgtgatcatagaaaaagactgtaaagccataattacaaagtatggtaacataaaaatagatatcaatgcagctccaagcactgtatcgatatcagagaaagttgcagatgtggtccagctttctattttcaatcaccgattcatgggcattgctgaacagatgggtcggacacttcaaagaacttcaatttccactaacataaaggaaaggctagacttctcttgtgctctctttggtccagatggcggccttgttgcaaatgcacctcatgtccctgtgcatctaggagccatgtctagtactgtgtgttggcagcttaacttttggggtgagaacctcaatgagggtgatgttcttgtaacaaatcatccatgttctggggggagccatcttccagacataacagttgtcacaccagtttttgatcacggtaagcttgtcttttttgttgctagtcgaggccaccatgctgagattggtggcatcacgccaggaagcatgcctcctttctcaaagtgtatttgggaggaaggtgctgccatcagagcatttaaacttgtcgaaaggggtgttttccaagagaaaggaataatccagctgctgcagtcaccttgctctgatgaacttgctggctataagatcccaggaacacgtaggatccaagataatctttccgatctccgtgctcaggttgcggcaaaccagagaggtatagcacttatcaaagaactcataaatcagtacgggttgatcactgttcaatcatatatgaaccatgttcaaaagaatgctgaggtagctgtcagggagatgctcaaaacagttgcgtctagagttgcaaaggagaatggatcatgtgttgtcgaggatgaagattatatggatgacggctctgtcattcacttgaaactcacccttgatgctattaaaggtgaagctacaattgacttcgagggtaccagtcctgaggtctatggcaactggaatgctcctgaagcagtcacaacagctgctgtcatatactgcctacgctgcttggtggatgttgatataccactaaatcaaggctgcctagcgcctgtgaagatcctcattcctaagggctctttcctctcaccaagtgacaaggctgctgttgttggtggcaatgtgctgacgtctcagagagtgaccgatgttatcctaatggcgttccaagcctgtgcctgctctcagggctgcatgaacaatttgaccttcggggacgacaccttcggttactacgagaccatcggaggtggatgtggagctgggccgacatgggacggcactagcggtgttcagtgtcacatgacaaacacaaggatgactgaccctgagatctttgagcagcggtaccctgcccttctgcacacatttagcatcagggagaacagtggaggttctggtttacacagaggtggtgatggccttgtaagggagattgagttccggcggcctattgttgtgagcgttctatctgagagacgggtgcatgctcccaggggactcaaaggaggacgagatggagatcgtggtgcaaactatttagtcagagaagatggtagaaagatttaccttggaggaaagaacactgtaacggtcagtgctggtgatatccttcagattttcacgcccggtggcggtggctttggctgtccttgatggcacttcctgcagacgcggaccttcctccatttgtttcctacctttgtacaccagtagctctatttagatcgcgattaaaataaaacgtaataaaaccgccaacaactggagattccttatgctattgttgctccccgaggcattggatccgaatgcagcatgaatggtgctattgtttatc

SEQ ID NO: 34795 - DNA, 2542 bp, Zea mays
  Clone ID: UC-ZMFLMO17317G06_FLI
ccgatctggcgtcgtcccaacctgctggagcacccagcagtgccttcctgtgcttcctcttgttcttggtgtgcgccaccttcccgcgcaccgtcacctccttcttcccgaagtccaccatgtagtccagcagcccgttcatcttggagacgacgtcggcgacccgctgccggcagtgcgagcaacccatgttggcgctcatcaccaccacctgcacctgcgcatgcatggttccagcgacgcatcattcattcattcgcatccgcattgcctctacgcgcgtaatgaataaaagaaaatgttgcttctctcgaaataaaacacacgttccgttttctaaaaaaacaaaacaaaacaaaactagcctatacgtaattaataaaaagctagttaattaagagcatctccaagagactggataaatggcttgtcaagttaaattttagctatttaatagcaaaatagctcttcaacagactatccgtttaacttgccaagctatccggctctttaaattgaccctctcactagctaaatttggctagcaactctcgccagttaaactaacttacatgtttaagagtctgttcgaatgaaatgttatatatagagtttaatctttatagacagataaatagagtaaaaagtaaagagtatattaatcccaccttccactgatcgatcaggacgtacgtacggctagagttcattgtatatagttgaggggaatatattcgtacgtagcacagggaagctaggagggaagagatgcatatgttcctctccaaaagtcacatggctagctgctgccactcttgaaccctaatgcagattgttctaataatctaatcctacacagccacaggcagccaccagctaggcagctagcggtattatatatactccattcgttcttttttatttgtcacgttttagtttaaaaataaactaacgaacaaggaacaagaacgataacggaggtagtagtatatagcagcatatgccgtgcgtgctaatctatcagctacgcaagccacttgcattatattatatatagtagatgaatactagtcgcatcgcatggcatcttaccgttgcgatcttctctgatcaggcaacaggccaatgcaaagactcctccggagatctagtcccattcccatacagattaaactcgtgcaggaggaattctagagattaagaaatataatgttcggtcatagcagctagctaactgatgatggtgaaatactgtaaatgactgagtcaaatataatggtcaaaaacacacactgcacatgcaggcaggaacgcccgccagtatatcatatgatgttgggatgagaaggagaagcgtgtgcgcttaattaatttattattatcaggtcaaaggaagcgtgtgcaagcgtagttggtgagggggttataaacgaggagcattcatcaggcatggcggctgcctgtacagtgaacctgctcgtgccttagcctattcgtctactgcctggcatgctcaccggtcaaagacagacggtttcactttcaccttcgttatgggctcctggccgccagacaagcagctcgagctctctcccggcaacagccaacagctaataacagctcatcagctgtggccgagaacggcgcaacaaacaagtggctgcaatagcatagcattgcattgcattgcatagagcggcgcaagaaacaggctacaggcgctgcatgcgtgcccggtgtctgctaccagcagattcagtctcttggtcttgccaacaagttactgccattgatttgcatgtggacaagaacaataatgtgtagctcacagattctcatctccaggatcatcagagcaagttaaaagatactacagtagaaagaaagagagacagacagacagacagggaagcaaacttgctccctgcactggagttgtttggcggattggcactaagccactaacagtaacaggggctggacttctcacctttacgctaaaagccggactgggagggcaaaaagcgaccgggtcccttttgagaatccaaggagatcaaaccagcagccaggctccagcatctctctcttcctcttctccctcgatgtgtgcagtggaacaacggacactgaacgtgtggagatggagactgtctgtcgaaatgcggtgaaggatggagtgactttactgtgctacgacactaccactgaagcctgaacagcaaaggctagcatcatatcctcaacgaggcaggaaggagagagcacagagtcctgctccggcagaaagacagagtcgctagcagagtgattgatagtcgcagctgggtttcaagaacccaacgacatgcaagccattgcggagttctcatttcttggcgctgatcagcttgctggcaatgatgaggaagaaagggagagcgcgtaccgatgggagggagagatcttccgcaaacctcagagcctgtagcttgcttggcgtgctgctgacggttgcgtccgacgaggcgccgaagctccgcttggaggaggaggaggagga

SEQ ID NO: 34796 - DNA, 960 bp, Zea mays
  Clone ID: UC-ZMFLMO17317H07_FLI
cgagaacgccacacgagaaaagaaacccaagcattcgccatcaaaaaaaaaaaaaaagagcagaaaaagtagagtagactacgacagcgtccggcgaggaggcggaggcgaagatgaggaagaagctcggcacccgattccccgcggctcgaatcaaaaagataatgcaagcagatgaggatgttggaaagattgcactagcagttcctgttttagtttcgaggtctcttgaattgtttttacaagatttaattgaccgtacttatgaaattactcttcaaagtggagcaaagacactgaattccttccacctgaagcaatgtgtgaagaggtacagttcttttgatttcctaactgaagttgtcagcaaggtacctgatcttggtggcgctgattcctgtggagatgaaagaggattacctagaagaagaaagtcaaatggcagtgacccagagaatgatgaatcaagatctagtaaaatggccataagaaatgcaaacatcagccccagaggacgtgggaggggtcgaggcagaggacgaggtcggccaccaaccaagagaaaggaggttggttatgtacaatttgaagatgagagcagcatgtttgctgaacaaggtgagcccttgccaggagaggaaacagttcaagagatcaatggcaacgagaccatgcctcaaagcacgcaacctccagtagaggctccgccaacagcccttgcacaagctacaacaagttctaaggcggaagaagcgaacagtgatcatcagtcagattggcctatgccagatgccattggaagcatcggtgtcgtgccatctggttttggacatctgacagtgcaggttgaagatgaggactacgacaatgaggattagtcagggtcatcttctcattgtatgcactaacaggactgttctggtgttgtaaaatgtaaatatagtttgaaatagttgccgc

SEQ ID NO: 34797 - DNA, 2285 bp, Zea mays
  Clone ID: UC-ZMFLMO17317H12_FLI
cgcaacttctcccactactcacgctactacccctgccctaggccacgtccaacagcctcccccaatccgtcctttggcttcgctggcgacggcggaggctggtgaaggcaggaattggtgagcgctccaattcggggattggcggaggctggtgcgcaccaaggcaggaattggcggtggctggtgcgcgccagttcggggaatcggctgcagctcacagaggacacacgacgtgtgtttccttgccgtcggttcggacatggctaggggtatgagaaagtgcatcattcaaagccaagaagagtatttggtagaggagcctattggggaaacaagtcatcggccacgagatgcagcatatgaccaccatccttctgctagagaacgccaaaaagaaagcgacaatggtaatgagttcaatgacctagatcatcataaaaaagatacaacatcttttgagactacttctggagtgtacccttctcctgatgatgcggatatagaggattctgttgcaggtgaaactaatgaagcaataagtcgtggtccgaacaaacttaaacatgtttggaaccttcaaaaaggaaaacgaattgtagttaactgtaacgagctcggccaacctattggagaggaggcaggagtcttaggaaaattccttggcatggttgctaggaatggctgcttatgtagcttaagcttcaaagattggagattactgataggaaagaaggacaggaacaatgaacaaaaaaacaagcaagatgtactaaagcaagtaaagatgagattcctataccctgcccgcatggaaaagtggatacttcgaactattgaaggcgtcttagatgatcaatgggtcgctcttgtgaataattggtttacaacaaaatcacaggatatcagtgaggcaaataggataaactgcgcaaaaaggaaggcgacccatacatcaggaacaaagagttttgctcggaacagggaagatatgagggaacaagatccagaaaagaaatacccccatagggctgtattgtatatcaatacacacaagagtaacatcacaaagaacagaaacccacatgtggttgcattgaaggaactattagtgcagcaaccaagtttagctgacactagtcatggaaaggttgcatggaaaggagatgcgcttagccaaattttaggagaagagaagcctggccatatccatggtcttggccttgttccgaatccagatcaagtgtttggtggatcaacttcaaggcatctaaaacatcttaatttaacctctttggatgcaacatcaagtgaagatgtagtatctcttcgacttcaagtggaaaaacttatagatcgtgtccagaagcaagatgatactatactaaatttgcaaaataccttggaactgcaaaaaagtcaccatgaatgtctagatgaacctttgtcggcatcaaaagatcttcagccgactatgaatcaaaaagttaatcttcttgacgaactgaatagcacaatggcggatgaaatcgaacatgatgggtacgaggagctgcaggcccagtgcaaaaaatctaaaattcaagaaaagggcaagccaccaatgccacgaggaggactccaaggtggtagagtttctacatcgttaaatgtaaaaaatagaagtaatgcagccaaggtgatgaaccaggacactgctcgaaattcctctaatcatgaaccatacaagagcaagggatctctagaaaattatttgccaagtactaaagacgatcagtctacatcaaaacgaaaagttggttctcatattttcttgatgagttggaggaatcaaaataagaaggttgcattaggtacaataattggttgtgatccaaagcaacaagttggaggagatccattgggcaaagaattttggaaggttcgtctcggtcttgtacttgtgcgtgatgaaccactaatacggccctacaacaatttcgtggttctaggagacataaacaacgaccctatagcatggccttcaagttgtatagaaaaggcagctctttaatgtcaaccattgaacaacagcagatctacatgagggctatgactttgattcttctttaaattagcgttattagtgatgagagcgatgagtctactgagtccggtttatgagtcaacctttgtttgtttcatactatcatagaaaaaatgtcaattcacacattgtgtaatgaattaagttgtggatgatattttataacgacactactatttttaatatagactgattccagatt

SEQ ID NO: 34798 - DNA, 1495 bp, Zea mays
  Clone ID: UC-ZMFLMO17318B02_FLI
acgcaacgacagcattaagttcaatgggaagtaaagagatccaaggtacatcgtcatacaccacatacaaacttttcacttgcttactcatcagaactaccagggcctaccgcttcacttctgaaaatatgtgattgcctgtccagcaaagttgaagggcagctggctttgcacaaagtaaggtggcaaaataagtctcagtctctcctggcgcatatttcaccaagaacaccggctacaatatctggattacaaaacgctagaacagtaaaaaggtatgcatcatatgcacaagacgactgccaaattactgtacagataacctgcaacttttccttgatgcaaggccaaactatgtaatcccaacaattttgtgtctacatagaagtcggctgcaagtcaggaaaatccaagtttcacggcagcctgaggtctccagatgggtcacagttgggcattctgcttctttaattcctcgagttcaatcaaggcagcgtcatgctcagtcagtgttcagggcagcggtatattcgagtagtctccatacgaatattgtcttcagccacacctgagttgatgattgtgagattttgtccttacccaatccggttgcgggacgagatcaggcattgtatttccttgtgggggaccctctgaagcaagagctactggcgcaggggcttctggtacaggaatctccggtgcgcgagtcttcggattaggaacaacaggaataaatggatctggcgcccatggctcatcatcgataacaatgagctcctctgaatctttctcatcttctttcggctcgatatcttcaatatcctcatcagccgggtcctgattatctgccaaaatatcatcatcggacgcgtccgtcccttccacggagacgtcctcatccgagaggtcatacttagagtggttttcgtcttgaatcatacttagttcagcaggcagctcagttttaacctcctattgtagctcagccacccagttccagttagccgggccttcaggttgcgcatcaaatgtaagttcatcgtccgactcgagaagtcaatcgtcatatccctcgaagtcatcttcagatcgggcgtgcgagggtcttgcttctaggttgtgggagggtcctacctctaatgacgatggtggaaacactccggtgctggaaagaggaaacacttcggtgctgatacagatgttccctcaagtgctcttctggacagtcaaacgggtgcatgccatcatagaagaaatatgcttgttctgtgaaaaatcacacaacaagcagatcacctttttgtctttggatgataaaccaaactaatttgaccattttatccagcaaccagtattaatctggaaccagtcttgacccagcttgaccaatggaagttcattggaaatgttgccacatttatcgcactgcaaaacatgtggcagactcctccatttacaagaacctatggaaggatgctttacaagcctccaa

SEQ ID NO: 34799 - DNA, 3124 bp, Zea mays
  Clone ID: UC-ZMFLMO17318E08_FLI
gggaaagcattggcgtaccaaccggaggcgacgacgatgacgatgactatgcgggtcttccaattcccatcaagagacaataaagcaggagcaggatcattgctaattctcttctgaatttcacacaggttataaaaactcttcaaatgaggctgctgccggattcaccactactgctgtgcgttgtgctcgtcttcactgcgattccatctgagcaagattcttctggtgtgctcggaacaagccaaagccaagcaggtggcagcaacgctcttcccgccgccggttgccctagaagctgtggcaacctcaccttcgactacccattcggcatcggctccaactgttctaggtctcccgccttcagcctcacctgcgacagcaccacgcaaacccccaggctctactttgaggacgacagcatcacggaggtcgttgcttatggaagcacctggttgcagatcagcctttcccaggccattcccatcatgcatggtggtgtcgtcagcacttacaacatgtcgtggaagtcttctggaagcggcttcaccctattctatgcgaacctgaacatcacaggctgcgacttcgatatataccaactgcaggataggcatgcgtcgtccgtgaagctctgcacagtcacctgtcctgatgcagggatcacggacaaggtggccaggcagaactgcaatggaacagggtgttgctccgtcaacttggatgttcttgaagccttccagctacagtttgtcctccgcagccacggcagagctcgacttggcacgcacactagccgaagctccctatgggatagcatcaatgtaacttccaccgatgcagaaatcctgtggagtattgtggatcaaccgacgtgcgccagcgccatggatgacagtgcaaactatgcctgtgtaagtaaccatagcaactgctatgatggcttgggtgggagattagatcttggatatatctgcagatgcgatggtggttataggggcaatccatatgtacccaatggctgctcacgggataaaggatataatcctaaggaacaaaaggagaactgccagcgatcatgcggtaacatcagtgtcccgttcccttttggcttagaagaaggttgcttcgcaagaaggctatttcagctcaactgcacaaatacagcgtcttccagtctccagttcgatgacgaacatcaagtgacacgcatacatatcaatgaggggcttgtggacattaaatacaccccactttacgaacaggagatgtttagggtgtatgtatctaatgaacctggcctgtacattggctctggggaatcgtcctctgtgcaatgggctgttgccaatctgacctgccacgaagcaatgcagaacaagtcgggatatgcatgtgtaagcatcagtagcacatgtttgggtgtcaactcaacagatgattacattggctatcgatgcaaatgtctgcacggatttcaggggaatccatacatacacaatggatgccaagctttaccaattaatggggaaagtacgaaaaagcaaaatcttctattaggtattgtgattgggcttagcagtggcatcgggattttacttctcggcttatgtgcaacagtgcttcttcgcaaatggaaaagggacatcaaaaagcagcaacgaaaaaaatattttcagaaaaataaaggccttctcttggaacaactgatatcatccgatgaaaatgcaagtgaaaaaacaaagattttcactttggaagacctggaaaaggcaacaaacaattttgatcctacacgaatcattggccatggaggccatggcatggtgtataagggtatcttatctgaccagcgtgtggtggcaataaaaaggtctaagaacattgaggaaggtgagatcagtcaattcattaatgaggtagcaattctctctcaaataaatcatagaaatatagtgaagctttttgggtgttgtcttgaaactgaggtcccactgttggtgtatgacttcatttcaaatggatcattgttcgaaattctacattctagttcaagcagtggtttctcattgtcatgggatgactgcttaagaatagctgcagaagctgcaggggctctctattatctacactcagcagcttcagtatcaatcttccatcgagatgtgaagtcctctaacatactactagattcaaactatactgcaaaagtttcagattttggtgcttctagattggttcctattgaccaaactcatgttgtcacaaatatccaaggtacatttgggtacttagacccagagtattaccatactggacagctaaatgataagagtgatgtatatagtttcggtgttgtgcttgtggaactactcctgagaagggagcctatcattacaagtgagacagggtcaaagcagaacttatctaattactttctttgggagatgaagacaaggccaacaaaagagatagtggctactcaggtttgtgaggaagcaaccgaggaagagattaatagcattgcctcgcttgcagagatgtgtttgagactcaacagtggggagagacctactatgaagcaagtcgagatgaatttgcagctcttgagaacaaaacggtcaaattcatgccatgttgttcaagataatgctgaagagatacaaccattgctttgtacaggagctgaatctagatacgagacgttttctattaccttgggtggtagttctaatgcagagtctcaatacagccaaagattcaatagcttggagcacgattttaaatcatctcttgggacgccacactaagggcctctttgaagtgtctgaattccactacaacataaagagcaaaagaagcttttatgaggtggatatttattttcctgcaactgcaagtcctaccaaaatactgtgttgtaaccaggcatgaacctgaacatcttaatgtgatctatctttctatccgcagaatatcatgaacagtcctttactctcttgttttttttctacattattatcatacagaagtatgttgtacttatttccctgcaaattggactcactattatgtattgtttgtaactggattcttgaagttcatacatcagatgtacacatct

SEQ ID NO: 34800 - DNA, 1277 bp, Zea mays
  Clone ID: UC-ZMFLMO17318F07_FLI
cggaaccggaggccaagctggaagccgtaaccccatctcggtcctacgagctgccaccggagtccgaatccgacgcccctgcctccaccggcacccaggagctaaagccgtgggagcagcacgccgcggtgatcaacctcccgcgctacgactaccgcgcatcagggtccctcctcctccgttcgcattccggcttcctcatcacgtgccccatcaagcgtgaaaaaagtgcaaccaaggaagccattcccatccttgaagagtaccatgcaaattgctgtgtttctgaacatgcagaaccatgtgatgtgaaaaatgcaattaagaaaagaaaactgtgctcggaggcatcaggaagtttagaagaggcagtaacgaatgggaatagtagcagtgtttcagaatcaattggaagcaccggaaacacaagctcaccccagtccaaggtgaatgacaatgttgacagggcttcaaatctctcactggttaagctatcaagaagtggcttgctcttctttaaatttcctagtggaggcgttcatgtagttgagatgcttactgaaatacttcattcactcagatccgggaaactcaaatctccacaatggtgccaccgcatattcccaattcaagaaacttgcattctatcagaagaagacctgcatgccactgtgtcaaagttattccttgacttctcgaggagcaagacaaacgaagacaagcctataaagtttgcggttgcctataatagaaggggcattgatgagacagagaagaacagtaatgaaggttcaaaccagcagactttgatggatagggagcaatgtttcaaagtggtagctgctgctgtcaaatccgttgctgagaactcagtggttgatcttagatcgcctgaggttgcggtactcgttgagatgctcccggtttccggggtacctcttggatcttcggtggctggggtgtctgttctcccagccgaactcatctcgaccaaacctcgcctttgtgtcaggtctttggtgcctgatgcaaaagcaggaaaaaagaagtgaaatccggtggcgcctcgtcaaccagagtatctgtaatgggaaactgccgatgcagtttttcacatgcctatttgtaccagagtaccatcgccttaattaagccttgtttttatgaggacatgaaaccatgatcagggcttgtccttttttacattaatcaaggcgagtttttaataagcatagaagacactggtatgccttcgacaatgtatcatcctttgcccc

SEQ ID NO: 34801 - DNA, 902 bp, Zea mays
  Clone ID: UC-ZMFLMO17318F12_FLI
cctcctctcagctcatgcacgccaacttccaggcctttcaccactgccaatcaaatctctcgctcgacgctggtcacacgcaccacgcacgcccagccgagctcctgcttccctctcccgcggtgcctggcttcctccaagctcgcccccaaccacaaccacgccctggtccgcgctccagccctccccatcctcctcttgctatggtgcccagccgagctctctccccttcctgccatggccgacgcccctccctgctgtagctcgatgccctcccctgcagcaagcagtgccctcccctttctgcagcaagtgggtgcccccagcccctcctttgttcccatggccggccacctctgctgcttccatggtgatctctaaatccctttgttgttttactagttcttgttaataccctgctgatgtgaggttttatgtgtgttgatgtgtgcgatatggagtaaaatccttggagaattaggtggagaagaaggttaagttcaacactcattaggtgttcgatgatatgctcgaactggtggccgtcttcgttcttgctgaaatcgagtcggagcatgatgtggttcgttacacgtgatgcgaaggacaagagccgagttgatcccaaaatgatgctagtgaacgaacctaaggatggatgatctgatagagtgccagaatgggagatgctcaccaagtggtcgtcaattaacaacactaacttagtgttatcccaggttataattttgttctgttatggatgctgctaagtgccggtaggctcggccttcttatataagtatatcccatctttagcttctttattgaggattgtcacttaagctagcatgtatttgaaaacctataaatattttatacattttaaattgtaattttttttg

SEQ ID NO: 34802 - DNA, 979 bp, Zea mays
  Clone ID: UC-ZMFLMO17318G02_FLI
tggacgcgcccgcgcgtgcgagaggcccaagaaacccacagcagccgctagccgtacgatggcggacaccggtgacgtcgccgccgccgccgaggcctcggcgcgaccggcgggcagcagcagcacccagccgctggcggggcgcgtggcgatcgtgacgggcgcgtcgcggggcatcggccgcgccatcgccacgcacctgtcctccctcggcgcgagcctggtgctgggctacgcggcgcgcgccgacgaggcgggcgcgctggcggcgtcgctcccgcgcgcggtggccgtgcgggcggacgtctcggacgaggccggcgctcggtcgctcttcgacgcggcggacgaggccttcggcggcgcgcacatcctggtggccagcgccggggtgctggacgacacgtaccccgccgtggccgccaccgccaccgaggccttcgaccgcgtgctcgccgtgaacctgcgcggcgcgttcctgtgcctccgggaggcggccaaccgcctccgccgcggcggcggcgggcgcatcgtcgccgtgacgtcgtccgtggtggggagcctcccgccgcggttcggggcctacacggcgtccaaggcggcggtggaggcgctggtgcggacgatggccaaggagctcgggggcacccgcgtcacggccaactgcgtcgcgccgggggcaacggccacggacatgttcttcaagggcaagagcgaggccatggtgcgacacgccgtggagacaaacccgatgcagaggctcggcgagcccggtgacatcgcgccggtggtcggcttcctgtgcaccgacgccgccgagtgggtcaacggccaggtcatccgcgccaacggcggctatgtgtgatgtgatctttagctttcacagcttcttggtgtccatcgtcgttttcctttgccacgcactgtttcgccatcttgttatctttaccttattatcattctagcacaaattcatagg

SEQ ID NO: 34803 - DNA, 2853 bp, Zea mays
  Clone ID: UC-ZMFLMO17318H09_FLI
cgcatggagtcatcgcagtctcggaagcggacgcgccaagcgtatgactgcgccgccgcgctgccaccagagcgagaagtggtagcgaggggtggcgcgtcgcctccatggagggaggatgaccgcgacggacactacgtcttcgatctcggcgagaacttgacccgccgatataaaatcttgagcaaaatgggagaaggttcgggttttctgcaatctgtcgtctcctcttctggtgggtatcttcgttattattctaatgaagagggctacgagttgggttttcgtaggtacatttgggcgtgttttggaatgctgggaccgtgaaacacgtgaatatgttgccataaaagttgttcgcagtatccgcaagtaccgtgatgctgcaatgattgagatagatgtgctcaatcgccttgcagaaaatgagaaatacagatctctgtgagtatctcagaaacttgattatgtaaagtataaccctattctgtttctgactcgtcagttcctcttcaattaccagctgtgttcaaatacagagatggtttgactatcgtaatcatatatgcattgtaagtactagcttttggtcaattatactagtttctaaaagtcagttaccaattccgagaatgcatttcatttttgcggatttgcggatgtgttgttgtttatattatttatcttactggccctcccaatacgccttgtatggaatgagagactcatctataaaaactatgataactctcctgtagttagattggcttgactgcaaaatcattttgttcttcactcatgaaggttccctcatatggtcccaaattaaaatatactttattcaatggatatcgatgattttgtcaggtttttgagaagcttgggccaagcttgtatgattttctaaagagaaatagataccgacctttccctgtggaacttgtgcgggagtttggacggcaactgttggaatctgtagcatatatgcatgacttgaggcttatccacactgatctgaagccagaaaacatactacttgtgtcttctgagtatataaaagttccaagtacaaagaagaattcacaagatgagatgcatttcaagtgcttgccacagtccagtgccataaagctgatagattttggtagtaccgcctttgataatcaggaccataactcgattgtttctacgaggcattacagggcacctgaaataatcttaggtttaggctggagtttaccatgtgatatttggagtgttggctgtattcttgttgaactatgctctgttagatctctgctcagttttctcacttttttttcctagtaccagtctggtaattatttttctaacatcacactttttttagggggaagcattgtttcagacacatgagaatctggaacacctagcaatgatggagagagttttgggacctctaccagagcatatgatacggaaagcaaggtgtgttatttgcaaccttaacttagtagatcattttatcttttgaacgaaatgtatttgtgttcaaatcagcttgtgataagcatatctttatttgcttgatgtttgttctttttttttgtggggctgggattttgggttttactatgcattatttgtttaaacattttgagaaaatgatgcattcgattctgcctgcagtagagtatcagagttatatttttgtaatcattttgagaaactgacattttctttatttattgaatgtttctaatctggtacaccttcattatatttcatgattagcagagtatcagtgtacttaactctcatatgttttattctattttgtttattgccacttgaattttcaaagctaatggctgcttttctacttgattttcaaggttaataaccgcctttttatggccactatcaatactagcttgctccccctttttttttgtttcttgtaccttgattttgatagttttgtgtgtgtatctctgctatgtgtattgcctgcttgttatatttaaccagcgacattgaaatttcttgggaactcttgtaatatttttttgtttctttcatttattttctaatattcttttattgtgcttacatgtgtcacctggaatatgtagttcttctgttcagaaatatttcaggagggcaacacgtttaaattggcctgaaggtgctgtttcaagagaaagcatcagagctgtgaagaaactggatcgactaaaggacttggtatcgaggaacgctggccattcgaaggcagagctggcagacttgctatacagtatcctccggttcgagccatcagaacgtctgacagcgcaagaagctctggagcatccattcttcaggaacccgacatgacttgttggacaggcttgactcgtgtaactctctgcttcaagaaggtatcgaggaagcaggcagagccgtccattgcaaagctgatgggtatcttgctcccctttaccagaggatttgtgtaagcctgtcagtaaggcttcttgcggtggtgataaagctgatggctttggtcacccaatgtaatgtacactagcatttttttttacctagggagtttagtgcctgtatgttgttaaccgggacgcgctatgagctgcgtcccaatgccctggttccataatccaattgcagatgttgaaaatcaagcatgaagggatccctgcgcagctgtgctcccgtagctgcaatagtctgttggatgcaagtatcgtgatgtcacgagtttgggatttgttgcattccgactgcatgggtggtgtgaagaatgggcatgaaatgccgtgtcctgttgttgagacttgtgtgtagctggtgaagtgttgttgttgatggagt

SEQ ID NO: 34804 - DNA, 632 bp, Zea mays
  Clone ID: UC-ZMFLMO17319A03_FLI
agtaacaaagatgccttgtatacagctgtggagcgactcccggaaacaggcggaggtgatcggcggcgggcacaagtcttggctggtgatcgatgacgtccggaggatgatcgagcaggaggaatgatccggcgtgtccttttagcgcagcgacctcagtattgccgcttgctcatagtcctagactgggcgtctgggccaggtgtttggtcgtcttgcatatattaggaaccatccatgatcagaggttttgaaaaatcgccggttcgtcttccatatatgaactctctccctggtgtcgcgatcaggaaaatgaaggaattgggctaccagtcatctgcgatgtccttgatgtatccatgtgtgtgtattaaaactggaacttgctgctgtatgagcaataatccagcacagcacggcaggacttattgccggtgtactgactggccttgccattagccactggatctggatggtagcactgttcatggatatgaagattagcatagcgagtacaatctctgctttagggttgtcaaaataacactggtcttgtttacaaacactagcttgtcttgtagcttgcttcttgaattctcaagagacaaattgtagccagctgggaaagtggc

SEQ ID NO: 34805 - DNA, 403 bp, Zea mays
  Clone ID: UC-ZMFLMO17319B09_FLI
gaccaacgacggcaaggaccagttctggatctgctgcgataactgtgagaagtggtaccatgggaagtgtgtcaagatcacgcccgcacgggccgagcatatcaagcagtacaagtgcccagactgcaccaacaagagggtcagggcgtgagcaaccgatgcgaccttgctaggaaggaaaggaagaaacgacctccttggcgccaagatatggcgtgtagttccctagtctgtaagcctgcatttttcatttatggttgttttatctgttgattagctgttcgacctagcattgtctaatgcgtggcatgtctcatgtgctgagtgttgacattggcatgggccccgccctctagtctgtaaacgttgtcactgaaggtacctctcggctgaccatttctcc

SEQ ID NO: 34806 - DNA, 1869 bp, Zea mays
  Clone ID: UC-ZMFLMO17319G07_FLI
ctagcttcgcttccaaccccatcgatacttcccagcaagctacactacaagctcatccgcctagtccttccatggccgatcaccagcctcaggtcgaggtcctgaccgagtcagtgcgggtcaacggcaccaaggcggaggccacgctcgtgggcggcgagctggtgtggcgccccgccgccggcggcaacggagaggggcaggagcggcggctggagctggagtcggaggtgctcgggttccagatggacgggaagcagctcaaattcgcgacctttgccgcgagcggcggcggtaatgggaaagggggaggaggggatgggaatcggaggagaggggaggtggtggtggagatggagaacgaggccaccgcggtgcggtggggggtcgtaatcagtgatcgcctagcctcgctcggccggccaaagaaattgttcattatagtgaacccttatggtggaaagagaagcggaccgagtattttccagaatgaagtcctccccctcattgaagcttctggcgtgctttatacgatgcaagaaaccaagcatcgccttcatgctcaagagattgcacattcacttgatcttaggaagtatgacggcatcatttgtgtcagtggagatggtgtgatggtagaggttgtcaatggtctcctgcaaagggaggactgggaagcagcaataaaagtgccccttgggatcattccagcaggtactggaaatggaatggcacgatctctactgcatgctgctggtgaaccattctatatatctaatgctgtgttcgcaatcatcagagggaaaggcgaggttctttagtgtcctgatgcttacatggggtctggtggctgatgttgatattgaatcagagaagtataggtggatgggaagtgctcgccttgatttttatcttctactccgcattctgaacctgcgacggtacaatgggcgtatcctttttgttccagcaccaggatacgaagaagttggtgatcctgtggaccaagctaccggttacgaaacaaacgggtttagcacgggatttcaagacgacggaagaaccggcagtaatggtgagacgtgtggctatgtgggcccatcgatcaaagaagcagaagctggtcttagatggagatcactgaatgggccattcgtttcagtctggctcggcaatgttcctttcgctagcgaagatgccatggcagcaccaaaagctgagtttgcggatggctacttggatgctgctataatcaaggattgtcctcggtgggatgtcctcgggctcgtgttccagatgaaggacggcagctacgtgaactcgccatgcgtggagtacttcaaggtgaaggcgatccggatcgagccgggcctgcgcgtgggcagcagcaccgagggcggtatcatcgactcggacggggaggtgatcgcgaggggcgacgagtccgattcccgcgccggcgacgacgagccggggcaccttatggcgtacggcccgcccatccagctgacggtggaccaggggctggccaccatcttctccccgagatgacgatccttctctcagttctcctccaccgtctgcgagtaatttgcttcgtctagcccaccctgccattctctcgcgtaggatcatgtgcttctgtatgtaaatattgctcacagcccaccccagttggatgagcgatgagccaagagggacggatactggctggatctccgtctatagattgttttatttccctgcccacatggctgccgcttttagtgctagcgtgagaaatgagagctggccagctgggcagttcataagcttcattttcgtgtgtttgtgattaatgttacttatttatacgagaagtgtttaaag

SEQ ID NO: 34807 - DNA, 350 bp, Zea mays
  Clone ID: UC-ZMFLMO17319H06_FLI
tggatatggaggctgccacccctgcttctgtcttggccaacgacattgtcgaaggggacacagtgattgtgcctcaagatgcatcgtcgtagcccgagtgccatgtgcaggggcgacgacagggggcacagggggaaatgtcctcctaatgctcccctaattctataggacatgttagtttttagctaattttcatgtaaaaagcccccctaatctaatttggtccccctaattttggatcctggcttcgcccctgaccatgtggcttgtaacccatagaatgatgtggatgaatctgttgttgagaaaacacatgttcgtgaggtcgtaaaaaaagtgccgaataatgt

SEQ ID NO: 34808 - DNA, 1600 bp, Zea mays
  Clone ID: UC-ZMFLMO17321C03_FLI
gagaagcctgtcgccgcgcgaccgccccacatggctaccgcgctcggtggggagcccaaccccaccgccgacgccctggaggtcgaccctccgcgcgcctccgccgacgagaagcatgtcgccactattattgcggggggtagtgatgcagtgacaggccacataatatcgactacgattgggggaaagaatggtgaaccaaagaggaccatcagctatatggctgagcgagttgttggaactggatcgtttggggttgtcttccaggcaaaatgcattgagactggtgaaactgttgcaattaagaaggttctacaggacaaaagatacaagaatagggagttacaaataatgcgatcaattgaccattgcaatgtcatttccctgaagcattgtttcttctctaccacaagtagggatgaacttttccttaacttagtcatggagtttgttccagagtcactttatcgcgttctgaaacactacaaagacatgaagcagaggatgccccttatatatgttaaattgtatatgtaccagatattccggggactagcttatattcatactgtaccaggaatttgtcaccgagatattaagcctcagaatatcttggtggatcctctttcccaccaagtcaaggtttgtgacttcgggagtgctaaaatcttgattaaaggtgaagctaatatatcatatatatgctcacgctattatcgtgctcctgagctcatatttggtgcaactgaatacacaacatctattgatatatggtcagctggatgtgttcttgctgagcttcttcttagtcaaccattatttcctggggaaagtgctgtggaccagctggttgagattatcaaggttttgggcaccccaacacgagaggaaattcgttgtatgaatcccaactatacagaattcaagtttcctcagataaaagcatgtccatggcacaagatcttccacaagagaatgcctccagaagcaatagatcttgtttcccgtcttcttcagtattcgccgaatctgcgatgtagtgcacttgaggcgtgtgctcattcattctttgacgaattacgagaatcacatgcaagactccctaacggacgcccatttcctccactattcaactttaagcaggaactagcaaacgcaccaccggagcttgtcagcaggctattaccagagcatgctcgacggcattcaggattcggttccttatttgggagtggaccgtagcccgtaggaaaatctcgttttaatgttgggctgctgtacgccgtcagagggcaatctgcatatcccaaatctaagttttagaacctgaccatcttgtcgaaaagttaccagccttagaaaaacccgaggtggcctcttgtgtccatgttctgccagtagcggcacataatgctggggggatggttaggtgtaattgttaagcacagagggtaactgactgagctaatgtattttcacgtttcagtctgtatcgaacttgtacctgtgtaccctgtaccaatcgcagctgatgtaatcatgtaaatgcttctaaactacttcaagttatcatgatggccaattcgcaattttacagtgc

SEQ ID NO: 34809 - DNA, 1132 bp, Zea mays
  Clone ID: UC-ZMFLMO17321D12_FLI
ttttgccgttgctggcagcttaaggtatgaggtctctcttacctactactcgtcagtgattgtttgtttcttggttgtcgcttgtggagctggctgctgccctcttgttgtgggctctttagatgtcgcttagtcgtcgctgtggtgctacgaatgctactctctggttgttattgtttggtgtcgctgttggtgttttttgtgactgcccactagttacggacaatgttgtttgttacttggtgatcctcatggagctactctctggttattgcttgtgtgttgttctctgggtatcagcatgttgcagaaagtaaccgttaattgtctacaggcagatgagaggagaggagctccagaggctgagcgtccaacagctacaggagctcgagaagaccctcgaatccggcctcggctctgtactcaaaaccaaggtaggtatgccctgctgatatactcatgagttggtgacagcatcagactgtatacagtacagtaatgatgcatagcataaccatctcttttcttttcttgggaaaaaacaaattgcagagccaaaaaatccttgacgagatcagcggtctggaaagaaagagaacgcagctgatcgaggagaactcaaggctgaaggagcaagtgacacggatgtcgaggatggagacgcagcttggcgccgacccagagttcgtgtacgaggaagggcagtcgtctgaatccgtgacgaacacgtcctatccgcgcccgtccaccgacaccgacgactgctccgacacatcgctcaggctcggctccaagtgacggagatttggcatgtccggtagcggagcggtgccgatcgcttgcccttctccactctagataggtctggattgggggagagcagcagtgctggatcgggaagacccaagtgaccaacgcgtcgcatcagaataaggcattttgagtgctgtatgatgtgtgtattctggctctgaaagtgagacctgcttttgttataatacatacatacaggcagcatggcaatacgtgacggggtacccgctgcctgcagtccgtgacctgtctgtcgtctctgtttctagtactcgctataatcaccctgcaattacctgtagctggtcatcgttaggag

SEQ ID NO: 34810 - DNA, 1032 bp, Zea mays
  Clone ID: UC-ZMFLMO17321E02_FLI
gttcggcaagatcgacatgcagctgcggctggtgccgggcaactccgccggcaccgtcaccgcctactacctgtcgtcgcagggcggcgcgcacgacgagatcgacttcgagttcctgggcaacgtgtccggcgagccctacacgctgcacaccaacgtgttcacgcgggggcaggggcagcgggagcagcagttccgcctctggttcgaccccaccgccgacttccacacctactccatcctctggaaccccaagcacgtcatcttcatggtggacgacatgcccatcagggacttccgcaacctggagagcaagggggtggcgttccccaagagccagccgatgcggctctactccagcctgtggaacgcggacgactgggcgacgcagggcgggcgcgtcaagacggactggtcccacgcccccttctccgcctcctaccgcgggttcaaggccgacgcttgcgtcgccgtcgcgggcggccggacccgctgcggcgccaccgtcggcaccgagggcaccggcgcccccgcctccgccgccggcgccggggactggtacaaccaggagctggacctcaccctgcagcagcggatgcgctgggtgcagcgcaagtacatgatctacaactactgcaccgaccccaagcgctaccagcagggcctccccgccgagtgctccatgcagtagcgcccggttattcctcgcccgtccaacaatggcgcgcgcgcgcgtgtgtgtgcatgtggtccgctctactgctaccgctacgacgatcggtgtcgatcaccggatcaaggcaagacgaaaggcatcgaaacatggtagataaataaaggacttgacgatttgtaacgcagtagctggtgcgtgcgtggtgtggtggtaagaaattcttctgctgcctgtgttcttgtagcctcctcgtcctcgcccaccctgttggtacgtgtacggtgtacgtagtctgccgccgcgcgctgttcgtgttcgtcgtgtctcgtgtctgtattatactcgtcctccccatc

SEQ ID NO: 34811 - DNA, 1681 bp, Zea mays
  Clone ID: UC-ZMFLMO17321E06_FLI
gtccgccgtcgaggctgagctcgtccagggcctcatcacctccgccgtgaggtgctccactccttcgtcgtcaagctctcgccccaggggtgcgctagtgccagatgcggcgagccagcagatcaaggaaaccgcccgtggccgccccaggggtttaggtctcctcacggcgacgggagagcgcgagccaatgtggagcgattaattggtcgctgctgccaattgttctgcgtgcggcttgataatttatttcctctagactgtagaagtttcacttcctcttgaattttaggcccaggataaacaaaagctttccttttcactgcaaacaagtactcctaaccattggaattgacaacatgtaagctgtagacaaagcccaacctaacccacgactctgctttttgcttcgtgctgcgttacatcttgcactggctgctgctggtgacaagcaagaacaaccaaaggtatttttagtttatcactgtccatcagttgaaactaaaaatgccctgacctgcctcaaatgcttaactttataactgataaagtttccaatcacaagatttacttaatttatactattatcttctgttgcagtattgattataaatgttgcaaacttgcaagtaccaacgactcttttcaattaaaatgctgattctattttccatttctactatttgtattgtatattatttattggatagagattagccgcgaattccatgcggaggccagagcacctgtaatgattctggggcagtttttttgcgcgcagtaaagaagtctacataattgccaagaatcatcttcatccatggggatccggtaaagcagcagccccttggctgggtaacctactgtgaagcatcaggtcagcagtgaaggagatctgagttcgaagcaaatttgccgcgaattctctccggaaatcattcgagtggctggattttgaagcgcagccatgggatcggaggattttgtctgtaaaatgatgtgattcggcgggtgagagactggttcttccgggtccattgtagcagcagtccttttttttatctccttagttttgttggagttcttccgggtgagagactggttcttccgggcccagcggcgggtgagagactggttcttccgggtccattgaagcgcagccatgggatcggaggattatgtgaaccactgctttctagtgacactgatgtttatatgtagctcttcaaatgtctgtccaggatgcaaacatgtccagtgacactgatatgagtaaggtgtttgaagacagaacgtttgtgtcatctatccttaattcgcttcctggtgttgatcccaatgatccatctattaaagatttgctggcatcattgcacagccagggagaggaagagaagaaggaagacaagttagacaaaacagaagacgagaagaactgcttcaagctggagtgatgtcgctgtggtgcttttgtgactgatcatctctggagcttttgtgaatgatctagctagctatctgtaattgatctagttgtgaatgatattataattgtgatacttttgtgaatatataattgtggtgcttttgtgtttatgtgatggatctatgactgtggtatactgattaattgtgtatgtctttatgattcgtgtataaaaatctgtgatttgtggtgctt

SEQ ID NO: 34812 - DNA, 1757 bp, Zea mays
  Clone ID: UC-ZMFLMO17321E08_FLI
aacagagcacgagaagttgactatcgcgaggtggccaggaaggaaaagtagctgcggcaagcggcatggggtcgcccaaggcggccaagagcatggtgaagcagcgcatctggcgtcaccggctcgtcgcgccgttcgctgccgttctcatcacggccgtcgtcgtattctccggcctgttcgcgcaggacccaagtgccacctcggagttcactgccgtgaatgtgggtaacaccctgccagtgcgcgataagtcggaatccacagagcccaatcaagctttccaaggcaccgtgcctgcagcaggcgagagagggacagcaacggcagtgccggcccaacgagaaagaagcagtggaggatctgaacctgaagagaagcaatcgcccccacaggaccaggaaggagaagaaacctctgctaagtcaggtttagtccagtacacaacatgcacacctcgaacgggagcaaccgtctgtgatctctccaaccagcggtacgacatctgtgagctttgcggtgatgctcgcaccattggccgctcctccacagtaatgtacgtcccacagccccttacttccaacggtgaagagtggaacattccagcacagtcacggaagagccttccgtggatcaagaaggtgactgtcaaaaccctgaaggcttcccaacaggcgccaatctgcacatccaggcacgccatgccagccatcgtctttgcgttgggcgggttcacaggaaacgtctggcacgacgtgagcgacgtccttgtccctctgttccttaccgcccgccagttcgaccaagatgtccagctactcgtcaccgacagccggccctggttcatcaagaaatactcggcaatcctccgccgcctcacgagacacagcgtcatcgatttcgatgcagacgatgaggtgaggtgctatccgcatgtcatcgtcgggctgaggagccaccgggacctcggcatcgatccggactccacgccgcagaagaactacacgatggtggatttccgtctgttcgtccgcgaagcctacggactgcccgcgcctggagtggacataccgtacagggctgacaaagacgagcccgagaagaagaagccccggatgatgctcatcgagcggggcaagacgcggaggctcgtgaacacgcctgacgttctactcgggcttggctggttcggcttcgaggtggtcagggcggatccaaggacccactctgacctcgaggagtttgcccgcctagtcgactcgtgtgacgcgatgatgggcgtccacggtgccggtttgaccaacatggtgttcctgaggtcgggcgcggcgctggtgcacgtcgtgccctacggggtcgagttcatggctgacgggttctacggcgcgcctgcgagggacatgggcctcaggcatgtgcggtacagcgtcggtccagacgagagcacgctgctggagaagtacggcaggaaccatgcggtggtgagagacccggaggccgtaaggagcggcggatgggagaaggtcggggaggtctacatgaccgagcaggacgtcgtgctcaacgtgacgaggtttggacctagtttgttgaaggcaatagagttcattgtgtaggtgggtggacgagatgaggtttgtgttagctatgacaatggaactagtgtacaccgtcttttttttatattaggttttattgtttctgcttctgtacagggtctaaaatgtatgatgtagtgctctgaccaattttaaggt

SEQ ID NO: 34813 - DNA, 1555 bp, Zea mays
  Clone ID: UC-ZMFLMO17321E09_FLI
attttttactcctcctcttcccccccaaggccccaaccatcccactctctctatacaacagccacccccgcgcccttccgcccttgtcgagtccaaatccaggttatagatcctctcgcgccgccgctcgcagccgctcgccgcccggtacatctcccccgcgcctctccctgctcctggatttcaccgatctggcatgctttactgtcccgtcatacggtggcagcgggagccgcccccttcctgcctccacagctcatgccatgcatggccgatccattccctcagatcgggattgccgcagacatgccgttgcttccccgttagcttctcccttgtcacaccccctcgcttcgttctgcgtagtttcggggtttgacaccgcttgtctatcccgttcctatagcttttagggtttcgagctcaaactccgcgccggcatctcagttgctgcaagtggcggcggcaagctagaggcagcaactgcataccttgcaagaaaaaatcggttttgttgacgtaccgatgattttcttgcaagttgtgcagttgttgtctcaagcttgctgcctccctttgccagaactattgaatgtgaaagcacagttaagtaatgccacgcccagagaatccaaaaggttgctgatataaaaagttgctaataagtggtggaacttttagcggagtaaaattgtatgcctttatgaaataactgaagtagatatgttggcatgctattgtttgaatcaagaaatgatattatatactccctccgtcccaaaatattagtcgttttagccattgaatttatgtctatatttaaatgaatgacaatgaatctatatataatataaaacacatacattaagtattgtatgaatctagtaaaatgctaaaacgactaatattttgggacggagggagtacaaaataacaagacgagaaatgactgtatgaaatcaattaaggcaaatacaaaacctcttcatcttgtgttgatattttatttcagacacatacttaaattaagaaacaattttatctaatgatatgaagctggacgtgtattggcatgctttgattatgtaatttattgctgttatctacacttctcacatacaagtgctgacatctcaatggagctaaataatcccagagcatgtgaaatcctaatgacgcatgcgtcttgagggacgaaacaggacaagtcagagattggtgatgaacttgctggaacaagcttatgcatgaaactgctgatggttttaacctttttaggatttagctaaaggctataataatcttcaaaggttcaatataaattcttggactatagactgaagtatttggctgctgatcttccaagatctctccagttcagaggatgggattatgggagcttagaccagggttgaaattagcctgaggttttgacttcgtccagtaaaaaaaattgcttggagggccacttttggcatatgaaccatctgtgttttgtgcttaatgttcagagtactagtttgtattaattgcacatttgcagccactttttttg

SEQ ID NO: 34814 - DNA, 2007 bp, Zea mays
  Clone ID: UC-ZMFLMO17321E12_FLI
cccaaaaggtcacgcaggatcataaacaataatggcagtaaccagttttcaaacttccaatccgcctaatatatagagcagcccttgcatcctaatctcacaacacagagcaaaacaatcaccactgcaggtagagcaaaacaatcaccacacatggcaaccggatcatcgctggtgccactgctgctgattgcagtagctgttgcacagattgttgggtcacaagctggtagcatttccatatactggggtcagaatggtggcgagggcacactggccgacacctgcgccaccggcaactacaggttcgtcaacttggcattcctggcagcctttggcaatggccagcctcctgtcctcaacctggcaggccactgtgacccgacaaacggcggctgcgcaagcctcagcggcgacatcaagtcgtgccagagcagcggtgtcaaggtcatgctctccattggcggcggtgcgggcagctactacctttcctcagccgcggacgccaaggatgttgcgacgtacttgtggaacaatttcttggggggtcagtcatcttcccgccccttgggtgatgcagtccttgatggcatagacttcgacatcgaaggcggcacaaaccagcactgggatgatcttgcaaaatacttgaaagggtacagcaactctggcaggagggtgtacctgaccgctgcacctcaatgcccgtttcctgatgcctgggttggtggtgcgctcaacaccggcctgtttgactacgtctgggtgcagttctacaacaaccctccttgccagtacagttcaggcagcaccactgatcttgctgatgcatggaagcagtggctgtcaattccggcgaagcagatctttcttggcctcccggcttcccctcaggcagctgggagtggttttataccagctgatgacctcaagtctcaggtgcttccattgatcaagagctcagggaaatatggagggatcatgctgtggtccaagtattatgatgaccaagatggctacagttcttcagtgaagagtgatgtgtaggttgttttccttctaaagaatgaactacttgcggagctgtgatggtgtcgagccagtagcaaggtcaaatccaggaggaataaatgcaacatcatcccattttgaggaggagctatccttcatagatttaatgatatcttccaaagaagaaacctgagtgtcaccaaacctaacagcaggattaggtttttgctgatcacgggaggtccggtgcagtgagttatccaagtcctcctttctgaaaaaaactggacgatatctcttgttgtcactcatcaagaccaggctccttgactgaaaaactggcactcctggaaatccctctccggcatacagtccttcatcttgcatcaacttaattgcattagccacctgagatgaatcagggaggaatctaaacgccacaccatccgacttcatttggataaccttgttcagcgcgacaggaacgacaccagagccggcgcgcatatcgccatccatctgctccagcagcgcgtcagcatcttccttccggaagcagagcagcccgagcgcctgcgttggactcacgctctcgcccccttgccctcccacgcgtgtggacgacacaagcacgaactcctgggcggcgttggcgagcgcgtacacgggcaccccggcgagccgctcctcgatctcagaggtaggtagggccccggaggtggaggctggcgaggtgatgcgcgcccagggcggcggcggcgggagcgcccgggggaaggaggagaggaaggaggtgacatgggcttggatagggaggaaggggttggggaagcgggggctagggttagtgtctatgttggaggtgccgccgtttgtagttgggttcttgagccatgggaactggaatcgaaaaggcatggcggcgacggtggcggccggtggccggtggccggtgggagagccggagaggagagaggcagggccgcaacccgcaag

SEQ ID NO: 34815 - DNA, 1131 bp, Zea mays
  Clone ID: UC-ZMFLMO17321G06_FLI
gggtcgaggtacatcttcttctccaaaccccattcaatccacaatccgcagaagcactagacgcgcctcgctgctgctttgcttcctcagattctggagaaaggggaactccaggtctccggcaaggagagggaggcgcagctctccagccagttccgcgacatcgcaactattgtcatggagaagaccatcaacccagagacccgccgcccctacaccatcaccatgatcgagcgcctcatgcacgagatacacttcgccgtcgacccaaacctcacctccaaggaacaggctctaaaagttatcaagaagctcacagagcatttccccataaagcgtgcaccgctaagggtgcggttcactgcaccaaaacccaattttccaggccttacggagaagattggcggatggaatgctaccataatttcaaaggatgaattgagcactcagccttctattgtatgcgagatcgagccatctcttctgcgctcatgtgaggagcggttgaaggatgtccaagggagggtcgaagtgctgtctgtctccacgcacgtagaaagtggcccatctgtggaacaacacaacagtgtggaagtgccacaagcggctcctgtaaaggaacctgatgctgttgctcagataagtgagaccatgcagaaacagagcatttctactgaaagccagggcaatgcacaaggcaagcaacagagaaggtgcaaggagtgtgatgtactcgtggaggacaagctttacagagagcactgcaagagtgggtggcacaaacacaactacacacgccacaagaatgggctcccgcctctcagccaagaggagtgtatggtggagatggaattggccgactccaagaaagaccttaaagactacgatttctgatgaggatggttaacaaggggtgcacagggcatgaagttgtttccaatccgtttttattttaacgaggaagtgaggagtgaggcacatggtcgttttctgatgctgtataggaattattagaatgagatggtttagccacatctttgaactgagggtagaacctgtctgtctgtggattgctttggctttgtatcgtggacgagtgaacttggtagtggcattccaaattcgacattc

SEQ ID NO: 34816 - DNA, 2308 bp, Zea mays
  Clone ID: UC-ZMFLMO17321H07_FLI
cttggagcgcgagtttaccccgagcaaatcgcggcggcgctcgtgcccgtgcctcccgcgtcgaaccctagtgcaactaccagatccggagatcccgcgcgggcgcgggcgggacaccaagcttctgactcaactcaatccccgcacctgccaatgccaccccctcggcgctgatccgatcccgccgccgccgacactcgcgggcccgccccatggattccgcccggagctggctccagaagctgcagccgcgggacaaggacagagagcggggcgccaagacgccggcgccggcgtcgcccaacggtggcgccggcaactccgcgaggatggccgccgcggcgggggaggaggcgctgtctagcgccaccaagcagaaggtggcggcggcgaagcagtacatcgagaaccactacaagtcgcagatgaagtcgcttcaggagcgcaaggagaggcgttggatgttggagaggaaactagcagatgcagatgtatctgaagaagagcaaaacaatatcctgaaagatttagaaaaaaaggagacagaatacatgcgcctacgaaggcataaaatgggcgttgatgactttgaattgcttaccattattgggagaggtgcatttggggaggtgagactttgtagagaaaaagctacatccaatgtgtatgcaatgaaaaagcttaagaagtccgaaatgttacgaagagggcaggttgaacatgtcagagctgaaagggacctccttgcagaggttgatagtccttacattgttaagctgtactgctcatttcaagatgatgagtttctgtacctcattatggagtaccttcctggtggtgacatgatgactttactcatgcgcaaggacacactgactgaggacgaatctaagttttatgttgcagagacaatactagcaattgaatctattcacaaacgcatttatattcatagggatatcaagcctgataatttgttgctagatcgaagtggccacttgaagctttcagattttggcttatgtaaacctctagatagcagttgcttcccaaatctgagtgaccttgactatgcagcaggtaagagcaccaatccatcatcagatggtgataagcaatccagtaactctactgcccccaggcggacacaacaggaacaactactacattggcagaagaatcggaggatgttggcttactctactgttggtacacctgattacattgcacccgaggtactcctgaagaaaggatatggaatggaatgtgactggtggtcacttggtgcaataatgttcgaaatgcttgtggggtatccgccattttattctgaagacccaatgtcaacatgtaggaagatagtgaattggagaagtcatctaaaattccctgaagaggccagcctttctctagaagctaaagatctcattagcaagctattgtgtaatgtggatcagagaattggaacaaaaggtgcacatgagataaaggcacatccatggtttgcaggtgttgagtgggaaaaactatatcagatggaagcagctttcattcctgaggttaatgatgagttggacacacaaaactttgaaaagtttgaggagactgctcctccaatgcaaacttcatcaaaggcaggtccttggagaaagatgctttcctccaaggacgtgaactttgttggctatacctacaagaactttgaaattgtgaacgatcctgagcttccaggaattgctgagctaaagaaaacgaacaacaagccaaagcgaccaaccatcaaatcattatttgagactgctgatagtgaagaccagccttctgatggcagttttctgaacctattacccacacaactggagctgccagagagccttgagccctctcctcactccagtatctcttctgaggattcccaagcacggaataggtagcaggtctctattcagaggacaagctccataaagtttgcttttgaagagatgtttgtggtgctcagcagccatctaatgtacattgtcctgtacattgttactggtttccaaagttcctttggcaacgacacgaggaggttggttgtcatatagaggaggaggtatttgttctctcctgtaaatccttggattctttgagtttctgagatttattctttcgatatagcatgccaagggggtatgctgcctgtttcctttttacgtgcagaaatctgcatttctacatcgttgttgtaagatttgagacagtgtaaagaaattgcaagtgataaacaagcgaccgaaaatgataatgaaaatgctatttttcttct

SEQ ID NO: 34817 - DNA, 1245 bp, Zea mays
  Clone ID: UC-ZMFLMO17322B05_FLI
ggccgggctgaaggggaggttcttgttctccgtcgccggcgtcggggacgacctctacgtcgtcggtggccggtccggtggctcggatgccagcaaggtgaagacgcacaagggagtgctggtgttcagccctcccaccggctcgtggcggaaggcggcgcccatgcggagcccgcggtctcgcccggtgctgggggtgtttgagatgtccgccagctgcagcattctccacactcgcgtagagaagaacgtccggcgcggcaagtctcggttgggtggcgcatccgctgtgtacgaggacccgcaccggctctccctcaggcgcctccgaatcagggacatgctggacgaggacactgattccactgagcgcgcttcgtatcatcacggcagatccgccggacacgaggagggcaaggaaggccaaccgaggctcgccattgtcgccgtcggcggacgcggtcgctgggacgaaccactggtgtcgggggagatatacgatcccgtggacgacaagtgggttgagattgccgggtttcccaccgacgtcgggctggcctgctccggcgtcgtctgtggccggacgttctacgtgtactgcgagtccgacacgctcgtcgcctaccatctggacaagggctcctgggccgtcatccagacgctccgctcgcctccgcggctccgcgactacgccccgacgctggtgtgctgcgcgtcgcggctgttcatgctctgcgtgtcgtggtgcgaccgccacgagccggtgagccgtagggagaaggtggtgcggaagctgttcgagcttgacctcggctcgctccagtggactgacgcgtcggcgcacccggacgcgccgatggatccccacgcggcgttcgccgtcgggcaggacaggatctacgccgtagagatgttcaggatcttcggcaaagtgctcgatttcgttactgcctgccgggtttcggacgccgaacagaagtggagccgggttggccgggaaaacgcggcgacggaggccgactccatgtcatgcaggctcaaatccatggcggtgctgcacttgtaactgctgcttacttttgattttctttctttctttattcctttcttcctccttgtgtgttgtagcttgtagcgtatagtctggttgcacagatttgttgtttccatgaacagacatcacatcacgtcatcacggcttttccattattcatttatttgtaggcgaatcatactcgtggttcc

SEQ ID NO: 34818 - DNA, 1764 bp, Zea mays
  Clone ID: UC-ZMFLMO17322B10_FLI
ttccattccattccaatacccatctccccgccggcctttcccctcccgcgtgccgatctgcctccggaggctagctcgaccggccgatctagctcgcgcgccgccgctttcagctcgatcagctgccgcacgtcgtcgaccgacccgccgtcctgtgaggcgatcgacagattactaagatggctggcgcggggggtgcgacagccgtgcagcggccggcggcggcgggggcgccggctgtggcaaggaccggggtcggggcaggcggcgcggtcgccgacccgcgcgcggaggcgctgcggtgcccgcgctgcgactcggccaacaccaagttctgctactacaacaactactcgctgtcgcagccgcgccacttctgcaaggcgtgcaagcgctactggacgcgcgggggcacgctccgcaacgtccccgtcggcgggggctgccgcaagaacaagcgctcctccaggggcagcggcggcgggaggaacgggtccttctcctcctcggcggattcgacggcgctgcccctcccgccgcctccgacgacgacggggtccctgccgtcgtcgctggggctgcctgggggcgcctcgctcctcctcggctccgctctccctggcggtgccggtgaccaccaccacctcggcctcttccaggcggccatgcagtcggtggtttcctccgacgcgaccgcctacgacgagatgcagcagacgcagctggaccacctgctgggcctcggctacggaggcgccggcgcgcagatccagctcaagccgtggatgcaggaggccgccggggctggcggcgcggccgggatcatggacagcttctacgcgccgctgctgtccagctccctcgtgccggggctggaggagctgcacgtcaaggcggaggccgccggcgccggggatcaccagcagaagccgtcatccagggaccagcagagcgccagctgggactgggagctgccgacgccgtcgtcgtccaacgtcgacgccaacgtcacggcgtctgacgcgctcatggccgccgccgccgccgctgccgccgcgtccatgaaccccgctgttagtgttagctccacgccctccgcggcaccaaccgccccctcctcgttcttatactggggcaacggcggcattggcggcgctgccgcggcctggccagacctcgccaactgcggatcctccattgccacgctcttctagcccaagccgccctggctgtcctgctggcctcgttaacttcgtttttttaccttaatttctggttaattttttcttgactgaaataacatgtaatttgcggggaaaagaaaactgagatgagagagggagaacgcgctgtgaaagaagagagctagaccatctcaccacctcatagggcagaaacttagacaaatcaaacaaatgatccaatccaatatttcaagagaattccttcgccgcgactatgatcttcatgggatctacggtcttggccgtcaagcgatgatcaaggccggccgtccacaactggcatgcatggatttaggaggaggaggaggagatcctgagaccatggcgagctagagatcgatcgagactcgagagcaaagaaggcaagaagttgtaagtgccgtgctgccctgacactactccttgatttgctactttcttggctagcttctccgatccttgggtgttttgtacatagggcatatggtgtggggggtaatacaatatatataaggcggtggcccatgtgagatcatggtgc

SEQ ID NO: 34819 - DNA, 1084 bp, Zea mays
  Clone ID: UC-ZMFLMO17322D02_FLI
tggatttagtgactcgagggaacttggtgatggtggttttggaactgtttacaaagggaaactccaggatgggagagtagttgcggttaagcgcctctacaaaaacaactacaaacgggttgaacagttcaaaaatgaggtagacattttgtcccgcctcctccaccagaacctagtcatcctatatggctgcacgtctcgtagcagccgtgaccttatgctcgtgtacgagttcatccctaacgggacagtcgcagaccatcttcatggatcccgtgcgtcagaacgcgaccttacatggcctctaagagtgaacattgccatagaaacagctgaagcacttgcatacctccatgcggtcgaaatcatacaccgcgatgtcaagaccaacaacatactgctggacaacagcttccacgtcaaagtcgccgactttgggttgtcgcgtctgtgccctcctgaagtcacacacgtatcaactgtcccgcagggcacaccaggctatgttgacccggtgtaccaccagtgctacaagctaactgagaagagcgacgtgtacagcttcggcgttgtgttggtggagctcatctcctctaaaccagctgttgacatgagcaggacccacagcgatatcaacctggccaacatggctctcaacagaatccagaaccacgaagttgatcagctggttgaccctgagcttggatatgaggctgacgatggaacaaagaaatcgatagatctcgtcatggagttggcatttcagtgtttgcagttagaaagggattcaaggccgtcaatgaaggaagtagtggtggccctgaactgtatcaagaatggggattccccagagaataagatggacaggagctcctcatctcctaaggaagacgcacacttgctgaccaatagcatacagtattcgcctgactctgtaatccacagattccatagccaatcgactacgcactcggcagcatcaaatgctagtggatgagataccttgtatatatactgatcctgaagaaataaagcctcatcggacgaattgtatacaatatagagatttgttagtgaactgatt

SEQ ID NO: 34820 - DNA, 3034 bp, Zea mays
  Clone ID: UC-ZMFLMO17322E01_FLI
caaaggtgaagacgatctgcagagattttacacgtgggaagtgttcaagatcagcaaatgagtgccgattcttgcaccattcatctgttgaagatgctgcaattgtttgccaagattttttgcgtggacaatgcaatcgcatagcatgtaggtactctcatgtagtagcacatccggtgccaccaatgagccatgttcctatgccataccctgagatgctttacatgccaccaccaccaccaccacctcttggagtaccaatgatggggcctccgccttcaccatttactgataataagaacagagttgaagtttgtagggacttcttgaagaacatgtgcaatagagaatcctgccggtttttacaccctgggacacatacagcggctgcgagcgccaatgttgaagtatgccgtgattttaaacgaggagaatgcaatcgacctgcctgtcgctttttgcatccatatacaagttgaagttttctgttagctaaagtaaagtaaattgtaccctgttttcctcttcataatacaaatggctgccaaatacatatagatgaaagaacgctcccctaagaacacctagttatagagttaacttcaacgtcaacttgtggatcttttgtccattcaaaccagctagagcaaaatagagtttaagtttggtaatttttgtcatttgggtaaattaaggtattttcaatgaaatgcaacttttatctgatctgaacaggcatgcgaatgaacatgttggttctctaagatttccaattggctaagatagcatgcacttgttgaagtgatccactgtttgaccaccttcattgtcttttactccacatcaattctgttccttctgggaaagctcttctgctaagtttgatcttagatttatgaaccacaagtccacaacaatggcaaatgacctcttatatgaaaaaaaccctgacctgtggggggtaagattgcccccacgggccatggcattatattaaaagaccttctcacgtaggtcgagaaaacctctaaacccttgttccacccacatacaatggcatcatagcacatgtgagaatgaccgcgagtggaccgaaccttagacatgtgctttggcctaagcctgaaatttgctcccatgacgtcaaactcaggatctgaggagtgctactcaaaccacctaatcaattcagctagaggccctttcgcatggcctcttgtatgactccacttttagaatttattactagtttatggtgggctattgataaaatattaaaatttgtatggtctgatctgctcctgtgtatttctctcgcacgaactaatttcctgaagttagttgataaactaatgagagtatctttcaagtgactactattattttgctaaccgggttatctgacatgtgtcaatgtgtcatacctaatgttgggtcttataagatgtaagactaacagtagctgttgctatatgttttttcatttgagaaatcatcagtggcaaaatgtagaatctgctttttattttttccctttactgaaccagaaactgcaggcaagtccccatatttagttttcagtcttattaacaatgctgttagctgtctttaacatatgggtactgcttgtttcctcagcttgagtgctctgcccaccgccgccgctactgctgtgctgctgctgctgccgccgccgccgccgccgccgctgctgcgccaccaccacccattctgcttctgccaccaaagagctgctgcgctggctgttgcgtcgctaaggtgccatagagcaaggaagccatagaaggcgctatatgtatgcatcgaataaaagatactaatatcctgtgatattcagatggttgcttgaacttgctttactcaatgcttgagcagtacccccttcactatgggggctgtgtgtggttttgtatttgttgtcataaaagatattttttgactctagctaatttgatgtctgcgctattgacttccccttagcatcacactttattgtttgtataagttattgagcaaatgtttcgccacggcaggcctgccgctgtttcaaacaggcaccgccagagaacattctgatgtgctttgtgttactaaactatcatatacagtaccagctaccgagttgattgaaacggcaaggtatctgaaaggctggttggttgatgggctcctatgcaaagcgtgaggcagagctgctgttcggatgcggacacaaattctacaggagtacgggtaagcgattttaagcatgagctctggggacacagattcagacattgcaacggttttatgggtagcctgcctgaagggtcgccacctaatccctgccgatcggggcaatgctattctgggaaatgctatgcttgcacttgtaataactgccgcttctctgactgagcttcgtttgcagctgctggacttcaatcatgccgcttctctgtgattgagcttcgcttcctttttgctgcagctacttttcgtcgtacaagtggttaccaacagctgcagtagatttggtgtgccgctggctgctttttctgaccccctctacgaacagtaggtgtacattacaagcggaaggtggcgtcacaggacaggagaaagcaagcacggtccaaggccgttctagctgtcgacgccgctttggataaaaaaaaagaggtgacgcgagagcgggagaaaaagccagattcatctgcagtgtcactgatccggcgtcgacgccgcctcgtagagcggggaaatgacatgggctacgacttatacgtcactgcttaagtaagtaacagtaacgtgacggcctgactggtgaactcgcaaccaccgcttttgttttagatttatctcttttccaagttcgataggtttgcgttattttgcctccaattgtttttttgggggttcattaatgtatgtgatttgatgcgctgaggcatcgacatcacgggtgtaagcagctagctgctgaggtctgccttgccttatcgtcgcgattaataaagctgtttctttc

SEQ ID NO: 34821 - DNA, 1431 bp, Zea mays
  Clone ID: UC-ZMFLMO17322F09_FLI
ctcctcaccgaagacgccattagccatgagcagcttggcttatccgctcctccggctcccgtgccgctgctctatcgcgccggcgccggcgccggcgtctcagctccccgcaccggtgtgtctatctgcttcggcttccgcaaatgcagggggcgatctgacggcgcgggaaaagcgagcgcagcgtcgggaacggcgggagctgcgtgcgacggactggaaggaggaggtgcaggaccggctgatccacgagccagcgcggcggcggaagaagcctcctaagcgttcgtggagggaggagctcaacctcgacctcctcgccgagctggggccgcagtggtggctcgtgcgcgtctccatggcgcccggcaccgactacgtcgacctcctcaccaaggctatctcacggcgctactcggaagtccccttcaagatttacaatccatcaatccaagtaaagaggagattaaaaagtggtgcaatcagtgttaaatcgaagcctctgcatgccgggttggtctttctgcattgtaccttaaacaaggagcttcatgactttatcagagacacagagggttgttatggctttattggagctacagttggttcaatcaagaggcagattaaaaagccaaaacctattccagttgatgaagttgaatcaattattagagaagagaaggaggaacaagagagagttgacagagaatttgaagaaatggagaatatgggaaacattgagcctttcagtaaacccgttgaagaatctgaacttatgttaatgaataagatcaagaagcagtttaagaaatcgtcctcacagggtggcactagacacagtgctttttcgcctggtgcaactgttcatgttctctccgggccttttgcagacttcactggttccatcctggaagtgaatcgcaaaaacaagaaggccactgtacagttgtcactttttgggaaagagagttttgtggatcttgattttgatcaaattgaggtagttgaagtggacgacgatgatagtaaactatgaggaatcttgtgtttatgtatcacagtagccgataactttttatcaacaacccagatctccagctgggcctgagtgaatgaagcaggaacttcagtgggtgggcagtggaccgttgaagacccagctatcagcaagagaaacagttagcacacctgcgcatgagctaccgtcaaaattaaccagtaagttctgactgagttcgccagcacgtgttctataaccttattacattgaaattgatttcccctcttcttctttcctgtttgtcggggttactgaaatgcaagtttataaacaatgaggatgctgaggttagaaagctcgctgatttccactaggctgttcacattattttccctgtgctcgaatgcagaaagcagtcccttaggccattc

SEQ ID NO: 34822 - DNA, 1369 bp, Zea mays
  Clone ID: UC-ZMFLMO17322G02_FLI
ataatataaatctttgaaaaaatgggttttcaaaatggcccttaaagagaagataaaaatccgagacctctgatcattagcgaccatagaaaaagtgagaagatataaatctttgaaagttccggattttaccgagcgctaaccatgagcgcctcgcgtgcgttaaattggcagtgtcggcgcagcagaaattcgggatcaactacgggcagatcgcgaacaatctcccggacccgacgcaggtggcgaccctcctccggtcgatgaacgtgaacaaggtgaagctctacgacgcggacccccgggtgctgacggcgttcgccaacacgggcgtggagtttatcatcgccgtgggcaacgagaacctgcagaccatggccggcagccccgccgcggcgcggcagtgggtggcggcgaacgtgcggccctacatcccgggcacgcgcatcacctgcgtcaccgtgggcaacgaggtcttctccggcaacgacacggccacgatggccagcctcctccccgccatgaaggccgtccacgcggcgctcgcggacctgggcctcggcggccaggccaccgtctcgtcggcgcactccgtgaacgtgctcgccgccagcttcccgccgtcgtcgggcgcgttccgggaggacctggcggagtacatgaagcccatcctggacttccacgcccagacggggtcgccgttcctcatcaacgcctaccccttcttcgcgtacaaggcgagcccgggcagcgtgtcgctgccgtacgtgctgttcgagcccaacccgggggtgcgcgaccccagcaccggcctcagctacgacaacatgctgtacgcccagatcgacgccgtgtacgccgccatgaaggccatggggcacacggacgtgggcgtccggatctcggagaccgggtggccgtccaggggcgacgaggacgagaccggggccacggtgcagaacgccgccgcgtacaacggcaacctcatgcagagggtcgccatgagccaggggacgccgctcaagcccaacgtgcccgtcgacgtctacgtgttcgcgctcttcaacgagaacatgaagccagggcccacgtcggagcgcaactacgggctgttctaccccaacggctcgccggtgtacgcgctcagcgccggctccggcggcggttcaggtccgggcgggtcgctcaacccgtactacacatccatgttctcctcctcgtccagatccgcggtgagcgcgaccttcttgacagagagagtgatgctgttactgctgctgcaagcaactgtaatactccgacactactgctagtcagtgaataccttgtaatcttgtatacgaaaaaaaaaatgcatctcaattcaacc

SEQ ID NO: 34823 - DNA, 1273 bp, Zea mays
  Clone ID: UC-ZMFLMO17322H02_FLI
ccgcttcctccaaagccactccaaacccccgcttccagaaccttctcgaaactctccgcctcctcctctactcgctccgatggcgaaggaaccgatgcgcgtgctcgtcactggcgccgcagggcaaattggatatgctcttgttcccatgattgctaggggagttatgcttggtgcagaccagcctgttattctgcacatgcttgatattccgccagcagctgaagcccttaatggtgttaagatggagttggttgatgctgcatttcctcttctgaagggagtcgttgcgacaactgatgttgtggaagcgtgcactggcgtgaatgtggccgtcatggttggtggattccccaggaaggagggaatggaaaggaaagatgttatgtctaaaaatgtttcaatctacaaaacccaagcatctgctcttgaagcccatgcggcccccaactgcaaggttctggtggttgccaacccagcgaacaccaatgctcttatcttgaaagaatttgctccatcaattcctgataggaacgttacttgcctgacccggctggaccacaacagggctcttggccagatttctgagagacttagtgtccaagtcagtgatgtgaagaatgttatcatctggggtaaccactcgtccactcagtaccctgatgttaaccatgccacagtgaagacttccactggggagaagcctgttcgtgagcttgttgctgatgatgagtggctcaatggcgaattcatcacaactgtccaacagcgtggtgctgcaatcatcaaagcgagaaagttctccagcgctctctcagctgctagctctgcttgtgaccatattcgtgattgggttcttggaacccctgaggggacatttgtttccatgggtgtgtattccgatggttcatatggtgttccttccggacttatttactcattcccagtaacatgcagtggtggtgaatggaaaatcgttcaaggcctcccgatcgacgagctctcaaggaagaagatggatgccactgcccaagagctgtcggaagagaagtcgcttgcttactcatgcctcgagtaaattataccacacacccagagagcaattgctaccccctgtgttttgaataaaagaaactccagctccgtccatagattctcactcagaactgctgcacgtcgctgtgcaggcgtgttgctggcttcgcccagcgtgtacgagactacgagggcttgtagcccctttttggcctgatgacttgcgagacatttattg

SEQ ID NO: 34824 - DNA, 3610 bp, Zea mays
  Clone ID: UC-ZMFLMO17323B11_FLI
attacatgaaacttttacagacccgggatgaataggtgtgagattagtgaagaggagactacgaatgctctgaatgcactttatgtccctgcccctgcaaatggtattcctgcagttggtcatcctcatgttgcttcaacaggactagtaacatccagcactcccaacatgaatggacatattgagcagaatagaaaaagaaaaaatattccaagtgatggaaattttgtggctgagggttctcacctaacacaggtttcaggtcatccaatgagcaaccaacatgctcctagtaaaactaaaacttatactgatggtatccagtattcggctgagaggcattctgtaagcaaatcagttgacccaataattgaaaagaaaaggtccaagagcaagcatcacagtagctattctgatggaggagatcttgttgaaagacctaagaagcattctaaagtgaaaaacaagagagacttagatcatgatgaatacaaagcttctaagaaaattaggaaagaagagcgacaccattttgatgtagatcggatccttggatctgatttagctagcggagatgttcctgatgaggccaaggctttgcctgcgaagtcagcaacctcaaagggttcaggtgaaaggactgacctttcttcatcaaagcaaaaaagtgcctcacggcataatcgtttggaaacttccaagaaagcaagacaagatgatttagttggtcctgaagacgagagcaagggatattttcaccagtcagatgtacaaagatcagatttgtctagtaagaagaggatagtgaaggaatgggaggagagccagcacaattcagtagctcatgtaagcaaaggagctgtcaaagaaacctatagggaccagaacttaaaggaagcaaagttgaaatcattgaattctgaagagctgttttctatgacgagcaccaaaccaccaaaagttcaacatgctgatcaggttttgtcttatgatggggggcgtatgaacagtgagttagttgaggataacacactctttagtggcaaaagaggtctgcctgaacaagaaaagagcctttctgatcaggctttggacttgggtgaacctgctagtgatgtggcctatattcagacttcagctgtaacttcaagttcttcaaaggcttcggtctcacaaaaaaagaagcagaccactcaagctatgaagacttcaccaattgagcctctttcttcatcaccacggaggaactccaacattgacaaggtctctgtccctcatagtagaatttcaggtaaggatggatctctgaatgctaactcagccactgtgccaatcatggcaaaacaactaaatactgaagttcgcgtagcaagcaatgatcaacggtctagtgaacctgtttcggttggttctccccgaagaaaatctgatagggataatggactggttcagttaactcaaggtcatgcctctgatggttttcatcttgaaaggggtttcaatgaggacctgcagcctgaatctgggagaaaggattccaatgtaaagagctcccatattcctaaagcttctcaccatttgcattctggtgaaaaaaacaactacaatacagatggctctcctatgcaaccaggaaagcatcctgttgatccaaagacatcagtcttggataaatgtgattcaagcatgcatgaaagtaacaaaagcacaaattctcttcaggatagaaatggatcaactcattgcccaccagatggaaatcctctgctcggtttaccatctggaaaagagaaatcatatatcaacagcaacaagcaagattcacagaagcctaaaccccagatggtctgctcacctttgaaagaaaacaaactggattctcactccacaccattaaaacctaatgggtcaaaattgactccacaatcaagacaatacaatgctcaaaatggaggacgacatggcactgcaaagcatgcaattcctagtcctgctgatacttctagtccagctaggaaggacaatacttcaactgcatatgctctcaaagaagcccgggatttaaagcataaggctaatcgtttgaagggagaaggaaaagagcttgaaagtacaagactctactttgagtctgccctaaaatttttgcatgttgcatcacttttggaacctcctagctttgatggattgaaacaaggtgatgcagcccagagcatgtattcagatactgcaaaactttgcaactttgttggtcatgcatatgaaaaatgcaagaagatggctgctgctgctttagcatacaaatgtgttgaagttgcttatctgaaggctgcatactacaaacacccaactgcaagcaaagatagacaagtgttacaggcagttgtacagactgcaccaggtgaatcaccatcatcttcagcctcagacattgataatttaaataacaatggattatccaaggcctcttcaagcaaggatgctaattcaccacaagtggctggaaatcatttgttgctggccgctcgaaatcaaccacacttgatgcggttactagcttatacaaatgatgtcaatagtgcctttgaggctactcggaagtcacacatggcaattgcttctgctgctggcaatcatgaaaatggagtcgatggtcttccttcagtaaaaacagtactggattttaacttccgaagtgtgaatgatctactaaggcttgtgcgaatttcaatggagtccatcagctgctgacgtgttcagaatctgagaaagtgccacccgttggaagttcctgttggatgtttaatccaattaacttttcttgatgaagtagcatgaaactgaatagttcaacagtgaacagtgtaaaagcataggtcttctcatttgagcttgctggtcaatttgtacagagactgatcgtggaattcttccttctttcttattttgatggcacccagttagtatacaaagttgcatatccacttggatgatttagttagtgaggccacaggttaagatgagctttgcactgctcaatgctcgtaatagttttgaggaagaaggatgctcttgcgcatgcagttgatgattcatttgagcagtgcaaaatggtgtgtccctatcttgcgcatgcagttaatgattcatctggaaagcggcttgctactgagcattctcttccgaccgtatcatagtttcctttgagcagtacaagatggtgtgtcgccacttcaattttgatgggagaggacagcaaagccaactaattgtgctaaccaagaaatcagctactatgccatgtcttctggatgaagttcacgcaggtttcaaataagaaatcacttggactatcggacttgtatgaatgttgtacaaagatctctaatgtacattaaccttttttttttcagccagcgcatgtacatggtggggcatttgttaccacgtgctggtctctatgtatgacgcctttggttctgccaagcctgtctttcattattcttcaaattttgtgatatttagttgtttattaaggtatataacgtttagtactgggaatttgttgcagaatgcaaaaatgaattccgtgctgtgcaacttgtatctt

SEQ ID NO: 34825 - DNA, 1349 bp, Zea mays
  Clone ID: UC-ZMFLMO17323E04_FLI
gatgccgccgcccggcgtcgacccggagctcgaggagttccacgcccacgtcgccgcgcacctcgcggacctgagcggccccggcgctgctggggaggaggagttcatgtccatcgcgtggatccggcgcctgctggaggcgttcctgctctgccaggaggagttccgggtggcggtggccgaggcgcgccgccgccgcgccggggccactccccccgccgccgagaggctggtggccgagttcggcgaccgcgccgtcaaggtcctcgacgtctgcaacgcggcgcgcgacggcgtcgaccaagcgcgccgctgggagcgcctcgcgggcatcgcggcgtccgcgctgctggcgcccgccgacggccagatccacgagggccagctccgtcgcgcgcggaaggcgctctcggacctctccgtgctcctcatcgacgacgccgcagccgccgccgccacggggcccgccggcgggctcgcctcgatcctcgcgtcccaccgcaaccgctccttcggccgcgcgcgggcgtcgccgtcccgcgccgcctcctcctcctcgtcgtcctcgtcgccctccgcgcacttccgctcgctctcgtggagcgtgtcccgcacctggtccgcggcgcgccagctacaggccatcggggccggcctggccgcgccgcgcgccagcgaggcctcctggagcctcgccgcgccggcgtacgccatgggctgcctgctccacctcgccgcctgggcgctcgtcgccgccgtcccctgcccggaccgtgccgccgcgctccaggcgcaccacctgccggccgcgccgccgcgcgccgcgttcccctgggcgccgccgctcctcgcgctccaggaacgcctcgccgaggaggggaagcgcaaggaccgccgcaattcgtgcggcctgctcagggaaatccacgcgctggagaagtgcgcgcagaggctcgcggaggccatcgatgccgcgccggtcccactcaccggcgagcgggaggccgaggtgcgggaggctgcagcccaactcgccgccgcctgctccgccatgaaggacgggctggacccgctggagagacaggtccgcgaggtcttccaccgcatcgtgcgcagccgaatggagggtctcgattcaccgatgcccaatgccgattgagctcaatcaacatgatcatcatcatcttgcctttagatttcccaatgtggcggtgctaggtagctatcttttttcgctcgctcttgtgatcagctagtggtaagtataaaatgtgtgtccttgtgtaaaggattacagaaaaagggagagggaaggtgtcatctttaggtaaagatggttcctttattcc

SEQ ID NO: 34826 - DNA, 1092 bp, Zea mays
  Clone ID: UC-ZMFLMO17324C04_FLI
tgaactggctggagcggttcccacaatacaagcatcgcgatttctacatcacaggagagagctacgcaggccactacgtgcctcagttgtctcaactggtctaccggaacaacaaaggcatcgagaagccgatcctaaacttcaaaggcttcatggttggaaatgcggttattgacgattaccacgacttcatcggcacattcgagtacttgtggacgcacgggctgatctctgacgaaacctacgggaagctgcggcttgcctgccagttcgacgtatctgagcatgcgtcgaaggagtgcaacaaggtcttcgacatcgccgaggccgaggaaggcaatatcgatgcgtacagcatctacacgccgacttgcaagaagacttcactccacaagcgcaggctaatcagaggaagaacgccctggttgcccagagggtacgatccctgcacggagaagtactccacgaagtactacaacttacctgaggtgcagagagctctgcatgccaatgtcaccggaataccgtatccctgggtaacctgcagtgacccagtgtatgatttttggaaagattcaccgaggtccatgcttcctatctaccgtgaactcatcgccgcgggcataaggatatgggttttcagtggtgacgctgattccgttgtcccgctcaccgcgacaaggtactccattgacgccctctttctaccgactatcacgaactggtatccttggtacgacgacgaagaggtcggtgggtggtgccaggtgtacgaggggctgacactggtgacggtccgaggcgcagggcacgaggttcccctgcaccggccgcggcagggcctgaagctgttcgagcacttcctgcggggtgagcccatgcccaggcctgtagatagcgtccagtcgttttagaactggttgctgtctccccggttggtgaaggaggagacctggctgcgctgcgcattcttgttgctgtaaactcatccgtcacactccgttgttaggatagatttgctgaaaatcagaacgtaatgttgctcgtttcagtgagcagattgggtatttagcaatgtctcgttttgacagt

SEQ ID NO: 34827 - DNA, 1259 bp, Zea mays
  Clone ID: UC-ZMFLMO17324F04_FLI
acatttcaacatgaaatgatctccatgagaagaatgtccgcctgacttcagtagaccaggacaatttagtttgaagatgctggatcatttctgtgatgattaagtctttgtcacttcaataagcgtcctgtatggtgttgcctgtagccctgtatggccgaagctactaaaggtaattagggtttgataaagttaaagcaaccgagtcccaaacttttgatcttgattcgtgcaaacggggacgatgcaacacattttcaaggtattctggacctttatgaagcatgctctgggcaggtcatcaacaaagacaagtcttctgttcactaaaaatacgagaagtgaggcgaagatggcggtcatgcaagctctaaatttaacacaagggactttcaatgacagatatctgggcttaccagttcgctttgggcagtccaggacaaaaacttcttagtacttaaatgataatgtgacaacgtattcaaggttggaaagaaaagctgctgtcaaaagccggtaaagaagtgctgattaaggccgtagcacaaggaattccaacatacgctatgggatgctttgacttaaggaagacttgtctgctcaaatcagcaatgccatattcagatattggagtcaacaggacaagggaaacaaagtgcattgggtgaattgggctaaaatgaaaatgctaaagagttgtgaacttgtgatggaatggattttagagatatctatgcttttaatatggtgttagctttctaaacagggatggatattagctcaaaatccagattcctcgtgtgcaatacttctaaaagctaaacattttcattcgacagatatcttacatgctaagccaagtgagggtatgtcttatacttggaggagcattctgaagggaatggatcttctcaagaagggggatggccaatggtttcctagaggcctgctgcgaggaccgtgcactccaaggggaccaaacatgttaacttttgtcaatgatctgacagacccggttactggacaatgggataaggatttaattgaataaactttttggacggaagatttattaagttgcatgtaccagttcaatccaaaagttgttaatggggaattgcactggacaattcactggaaggctggttgggttcgtagacatcgtaggtggttgtatgttcttttataaacttagtcaaaactaaacaagtttaacttcaacttataatgaaattaaatagactaataagtacattgct

SEQ ID NO: 34828 - DNA, 1383 bp, Zea mays
  Clone ID: UC-ZMFLMO17324F12_FLI
tcttcgtgcagcagctgtccattgccgctgggttttctttgttcgcattgggttttggaggagaggtcaaggctgagactcggagacgaaatgggtcataggatgttcagtcccttgggcttctttcttcttgccatcgtcgtcctctacggtggaacagagcagaggcgagcggaggcagcagaaggagcgagcccgcacaggatgctggccaccatctcggtgtccaagccgtcttaccccatggtcaccacgcccatgtcggcctacggcgacccggtctccacgccaggcaccccgtactcaacgttcccgtcgctggcgaccgggaacggcggtgccggtgccggtgccggtgcaggcggcggtgctggtgtaggcgggggcggcggcgggggcgctggtgtaggcgggggcggcggcggcggcgggacgtggtgcgtggccagccagagcgcgagcccgaccgcgctgcaggtcgcgctggactacgcctgcggctatggcgccgactgctccccgatccagcagggcgggagctgcttcaaccccgacaccgtccacgaccacgcgtcctacgccttcaacagctactaccagaagaaccccgccccaaccagctgcgacttcggcggcacggccaccatcaccaacaccgatcccagttcagggtcgtgccagtacccatcgtcaagcggtggcgctcagagcacgatgccgccgccgtccccgacgagcatgccgccgacagtgcccaccgccccgatgaccccgacgccgatgacgccggacaccaccccgaccaccggcaccccggtctacggattgtccccacccgactacggctcattgtccccacccgactctggctcgatgtcccctcccggctacggatcgacgtctcccccggactacaacgacgtcggcgccgccgcgacgacggggcagggcggcgcggcgctggcgctggcgcttctgtgcgtcctggtcgcgacagtatcgctgcacgtctccaaatgagagcggcggcataggaggaaattatgcatgcctgtttcggttgagacgttacatggcgcgccccgtgcgtggtggctgaaagacgcacgcacaggtccatcgccgaagatctccggtggtgtgctgcccggcgccgggggagcattcgagcagtgttgcaagtctgcttagtgttgtataagaaatgaggcgagcttctagcagcgcccgagttctagcagatgcaccagatgtttatacatacatacatgcttaaatatataatggccattccactattgtacttaggagtatatgagaaaatttgtttccttgccctctccatttgctcatgctaaataatatagttatgattaggtaagc

SEQ ID NO: 34829 - DNA, 810 bp, Zea mays
  Clone ID: UC-ZMFLMO17326B05_FLI
gcgggatcccgccgctggcggtgcgacctcggcggcgacgagcgctggctctcgggggccgctggtgacgaccaattcgaccgcctcccggacgcgctcctcctcgtcatcttcaaccgcatcagcgacgtcaaggcgctcggccgctgctccctcgtctcccgccgcttccacgagctcgtgccgcttgtcgactccgtcctcgtccgcgtcgactgcgttatccccgacgagcccccgtcatcctcgtcctcctcgtcgacgccgtcctctcctacggcgtccgtgcgcgcccgcggggtcttctcacagattgcgcgcatcgtgctcggcggcatcgtgaagcccatccaggcgcttggtcagatcctctcacccgccaactccgcctccggctttccggcatccgccgcttcgtcgctatcgtcgtcgtcgtcctcctcctcgccactgcctgctggggacgtgtcgcaccactcgccatcggaggtgctccgttccttcaaggagctccgccaccttcgcatcgagctcccagcgggcgagctcggcatggacgatggcgtgatgctcaagtggaaggctgacttcgggtccacactgggcagctgcgtcatccttggagcatcctcagcctcgccgtcgccctccccctcctcagctggctcagatagtccgagcgccgctccctctgatgacagtggccacaccgagcctgatgaatgtgacgattcaggaagcatccctgagtcgttctacacaaatggggggtttaagctgcgagtggtttggtcaatcagctcattgatt

SEQ ID NO: 34830 - DNA, 1264 bp, Zea mays
  Clone ID: UC-ZMFLMO17326B09_FLI
cgccggcgaaaggcgggagcagcgcgctacccattcaccgccccctgatttcttgggagttgcggatcggtctccggggcagcgtggaacggctgggcccctcggatcgccggagatgctgccctacgcgacggcggcggaggcggaggtggcgcttggccggcccatgacgcccgccgaggcgctgtggttccggtacaccgcgggggtgtccgactaccacctctactgctgcaacatcctcttcctcttcgtcgtcttcacggtggccccgcttcccatcgcgctcctcgagctccgggccccggccgcggtctcgccgtacaaactgcagccgcgggtgcggctctccagggccgagttcgtccggtgctacaaggacgtcctccgcatcttcttcctcgtcatcggcccgctccagctcgtctcctacccggcggtcaagtttgtgggaattcacacgaagttgcctttgccgtcccttgcggagttggcagcacagctactggtgtacttccttgttgaggactacctcaattactggatccacaggtttctccacggggagtgggggtaccagaatatccaccgtgttcaccatgagttcactgcgccaataggattcgcagctccatatgcacactgggctgaggtgctgatactcggcatcccctccttcgtcgggccagccattgttccaggccacatgatcacattctggctctggattatactccgtcaggtggaggctatcgagacacatagcggctttgatttcccattcaccccgacaaagtatattccattctatggaggagcagaataccatgactatcatcattatgtaggaggccagagccaaagcaattttgcttctgttttcacttactgtgattacttatatggcactgacaaaggttacagattccacaaaacatacctagcaaagctgaaggatctggggcataatgatggccagaaaggagacggcagcggacccagctacgtgaaactggattagattgcaagatatagtgcatcttgagtgtttctatggtcatcgacttcactgtggcatttcgaaatgggatattgctgagttgggctggtcacgtgtgttctcatttctgtagcaggcatacagctttcagctctgccttcttctttcttttttttttctagcgtttatgaaattctatggaacttgtacgctgacgaataacaacgcaactctcacgaataacaacgccaattcttaaagttc

SEQ ID NO: 34831 - DNA, 1528 bp, Zea mays
  Clone ID: UC-ZMFLMO17326E08_FLI
atcctatatacattcaagagggacgccttactccaagaagtgatgtttatagctttggattagttctatgtgaactaatggctggaaaaggggtaagaaaaggtgcaatcaacctcattctatacgccaacaaaggctgtgcaagtggtaaagggttcagagagatttgtgatgctgcaatcgcaaacgagaacaacatgaagatccttaaagagatgcagaaactggcagccgaatgcctatcgctgaccatttctaggcgtcctcagatgactgacgtggtcaaacgcctccggacgctgagaaaggaactaaagaacaggcatgagaactattcggaaccaatcttggcatcgcaccattcgtggcgcaagaacaagaagcaagagatgatcgcgcccacctataactctaagctgcagatcaagaagagcctgagcttcttcaagaggagcatcagcagttccaaggtccaatcggagcccagcaacgtgaggattttcgcgcaggaggagctgaaagaagtcacgcacaattactcttgtctactcggtggaggtctttcaggcaaagtctacagagggacactcgaggacaacgcagtggtcgcggtgagagtgttctctgaagtgctcgagggcttcgaggaagcgtttgtcaatggcgggatgatcctgtctcagatatcccacaggaacgtcgtcaaactcttgggatactgcttggacgccgattgcccggcgttcgtgtacgagtacgcagctagaggcagcctatccgatgttctggacaggcacgaggacttcccgctcgatctacgcgcgaagatcgcggtgaagatcgcagaggcattggagtatctccattcaccagcgaccggtatcatcaggcacggctacgtggtaccgtccaagatacttctggatggcaatttcatgccgaagctcactggcttctcatgggcgaggaagcttatcaaggacccgattcacgatcgctgtgtgtcactgagagtgaaagccgatgtgtaccagttcggcgtccttctcctgatgcttatcagcaggaagaactttgtgttctacgccgaccacgacgacatcgttgcgcagttccgcgcggctcggcaggcagatggcagcgggagggcgttcttcgacgatgatgttgcaggtcatggcggagacgttggtctgcttgaggagatggggaggctgtcgctcaagtgtgtttgcgaggaaatagaccagagaccgacgatgagtgaagtggcagagcaccttcggatcattacgaggtcctggaagaagtgttcttcgtcagagggagctacggcgctggtatctaaagccatggctaaaaagtcccatgtcgccgccgaggctgaagccactaaacttgattggccacctggttcggacattagagactgaccaccgtaaggaatcgtgtacatactgtgaatgatgtattgtattgtataatcatcatcagcaatctttcatgcgctgcaatttggtttgcaatt

SEQ ID NO: 34832 - DNA, 714 bp, Zea mays
  Clone ID: UC-ZMFLMO17326G02_FLI
ccgctagctcgcctctccaaccaaacgcaaagcaaagaacagaacccaattccatcgtatcgttccccactcgggctcccggtctcctccaccctcctccctcgcctcgcggccttccggcatttgctccagctcggaactgagccgcgcgagacgaggctgacggaggggatggagtcggacgcgtccacctccccgcggcggcgcagcacgagctgctacagcgacagcggcgattcctcctgctccgagcccttcagcgagtgcggcagcgacgacctctccttcacgcccgccgccgccgcgggcatccaccgcctgctgctctcctgcgcggccgaggcgtcggaggacgcaatctcctcgctcgtggccgagctggaatgcccgtcgcagtcgctggactcgctccgccgcgcggcgatggagctccggctgctggccaagcacaacccggacaaccgggtccgcatcgccgcggcgggcggcgtccgcccgctcgtcaggctgctgtcgcacgcggacccgctgctgcaggagcacggcgtcacggcgctgctcaacctctccatctgcgacgagaacaaggcgaccatcgtcgaggcgggagcgatacggccgctggtgcacgcgctcaagtccgcggcgtcgcccgcggcgcgggagaacgccgcgtgcgcgctgctccggctgtcccagctcgacggcgcctcc

SEQ ID NO: 34833 - DNA, 1390 bp, Zea mays
  Clone ID: UC-ZMFLMO17326H05_FLI
atgcggactacaatgtaatatctgatcttgcactgaagagggtgaagcaggatctaacaatgcatggtggtcaagtctgcagcagtattgctccagctactcatttggttgtagtttcggttttacaggtctataactttgataacctgtacaagagcttccctcctgctgaaagacgttatctacatgacaaaagattacatgttgtcagtaataagtggttggaagattcagtggagaaacaaatgaagctctctgaaactgcttacagccttaaaccagatacactagaagaactagaaattgaaaggagtgaggaaaatgttcagcctccggagcataagtttgaggaacacaaggagtttgaaagatctcatgcggaaaatatgccaaggaaaaggagtaggccaaccagttcaagaactgcaagggctgctcctagagcagtccgccgaataaggcctagaagaggaaaccagaaagcaaaaataggtgatgttgaatctgaagaaagtggccccagcgaatgccaagatgatgaaaatttggacacagatgatacctctaagattgaagaaggtattaccaacaaaaacaaaggactccctgcacctgcttcaaaaccagcctggagaacaagggctacaaaaggaaatcagcatacaaaaatgggcgacggtggatctgggccttgtgaaactgggaaagatgatcagaagttggacacagattacatctctaaaatggaagtagataacattgataatgactgtggaccaccgccaggtgctcagcttttcacgttgggggagcaagaggtcaaaggtgtcaaattgaacaccgtggaggagaaacaagacatccctttccagagaacaaccgctgctgaagcgatgagtagcacgcctggtgagaagatagaacaaatggctgatccgttgcacgccatgcttctggatatgttgccactcctgggccagaaaaggacagaagatacaagcaaggcgcccttggcgaaggctgagacagatccacctgcgataggaagctccacatccaattctgagattctgttgccagatgctggaacatccggggttccagccccagagccaagtgcagctccaccaaagaagaaaaaagtgagttacagagatgtcgttagtgaacttctgaaagattggtgagcgagcttggtcagtggggataacctgcggtctatgttttactcccgtaatcgctatcttgtaaataggacagcgccatgtaagtaaccatgtttgtagggtcaccttggctgcttgtcgtgccctgccctctggagctcacttgttttgcctgttgagaattttgactgttaatcctagcaacactgacgttgagttggacc

SEQ ID NO: 34834 - DNA, 327 bp, Zea mays
  Clone ID: UC-ZMFLMO17327A03_FLI
ctcacaacctctgcagtaccctattatcaggctgctggccaaagccctgtcttggctttagatgttttcctagttcaggcttcagcgaacaccatcctgtcgcatttccttggggtggcgagctccctggagctgctgcgctcggtgtcactgcctccagcagaagccgccgtcccggccccggcccctgcacgggcctgagccatggcccgttgggcaggtcaagaaaaaccttcaatccttggctttggctctagacagttgctatttcttgattgcatgtacaacttgcatcaagaatacatacacatcgatgccttccagttc

SEQ ID NO: 34835 - DNA, 1147 bp, Zea mays
  Clone ID: UC-ZMFLMO17327A12_FLI
ggcgactccccgagcagaagaacccgatcgaacgcggcgccggtcacggcgccagcgttcctgtgggcgcccaaaaactacggattcagctctgatgatgctaaggaggtagtccattaccaaacaatctcaccaaagagcttagctaaatctgttctcgaggaaggtggctggtcaaacttcatgtgctcaagggaggatactcagaataatgttgatgttgccattgtttttattggctcaaagctgcaatcgtcagacatatctaaagataagcaagttgatccagctttagcagacacactgaagctctccttcacacgctcagagttttccatggcattcccctacgtttccaccacagtcgacgagagactagaggactcgttgctatccagctttgccgagaactgcaacaatggtttcggaagaaaccgcgtcacctacacagacacgtgtaccggtcaagatctgaagaaataccacaacatggatgccatcaatgacctggtagtgtcaggggtagcgtcaaggagagtcaaccacccaagtggacagaccgatgtaatcgtcttctgtagcggcgggttcgagaatccaggcactgcgaaatcagaaggagagctgctttcccagcttgtggacttgctggacttgtcgggagccaaatatacggtcctctatgcgtcccaaccgtctggtttgctggagagcccttcgggcctgccgctgggtaggcatctcgcggagaagaagactaacggcacgaaagctgtccagggcgaaaaatgcgatggcgagtgcctcgtcaaatctagtctcctcgaaggaactttcgttgggatagtgcttctcatcatcctgatatcaggactcatgtgcatgatggggatcgatactccctcgaggtttgaagctccccaggagtcttgatctctcccttggactgcagaatccgcgggggggttgtgacgagggcacgcggcggcgttgaggggggccggtgttctgttggtctgcactgtggatatatatcgtttagcttcccatttggaagggagtacgccttgtgtatttttttgtaccgagccaactgtcactcacgatgtgctagaattttttggtgtaatatttgcgtttcgcgtct

SEQ ID NO: 34836 - DNA, 1099 bp, Zea mays
  Clone ID: UC-ZMFLMO17327C02_FLI
gagtcatccgatggttggtcaatgcgcacattttctgaaatggtctcaacatcccaaagagagaggtggtcacttgacagtgagctcgtgggatccatttctagtaaaatgacaagatcaagtgcttggagttctactacatgcccccctgaccaagacgggtgcaagctgtgtttaaagctgctaaaggagagatcgacatggaacgctcaggagctggctgttgttgctgttttgttgtgtggacatgcataccatgctgactgtctggacagcataactacagaagctgacaaatatgatcctccatgccctgtgtgcacgcatggtgagaaatgtacagtgaagctatttgggaagctggaatcaaagatcaagaacaagataccaaaaaatgtggcagttgatattaatctagatgggaatagtagtaataagcaccagaagaaaggtagaagagagcccaggttaggtacaagttcaagcatgaaggtgccatttagtcgtccatttttgaggagacatttctccattggatctcgaccacctcggtcggtctcagaaactgattccacgagaaagaagggattctgggcaaggcactgggagagagtagaatagaatccaattgtcgttaggtgggttggtctcaattattatgttttggaaggatctttaagaagagttgaactccccagcatacaagggctgccgagcaaccaacatatttggaagtttctctcagccatcgtattctgatactggtgcagagcgcacaacaaggtttcttataccatgcgaggcagggtcgttgtaggccccgcttgcatctaagtaatagtagtatcgatctaacagaaacggtgtggccttcctggatttaaggcacaatgctgggttataagattacacaaccagcatgctagattattcgccttcctggatttaaggcccaatgctgggttataagattacacaaccagcatgctagattattttgtacctgcagtttttttaatgattggctaaggtatttgttgttgattgatggaatgcgtttaagttgaaggcttcagtggtactgtagaacttttcgatc

SEQ ID NO: 34837 - DNA, 1290 bp, Zea mays
  Clone ID: UC-ZMFLMO17327E10_FLI
ggcaaggaaagtgggaaggtaggagagagagggagacagggaaagctctcttcctcctcctcctcctctcgaattccgtctcttgtccctgtcgtcctcgcccggtttccccggtttttgagaggggaaagaggaggcggaggagagggatggggagggacgagaggttcccggtgtgggaggccgcgctcggcgccggagtcgccgccgccttcgccgctggactcgtcggtgtctacctttccatgccggactccgactacagcttcctcaagttgccacgtaatctcgaggaactccaaatcctcactggccatcttgagaactatactagtgactacaccctacaggtgttggtaggttattgcgctgtgtacatcttcatgcagaccttcatgatcccagggacaatattcatgtcactgcttgctggtgctctatttgggcaactgcgtggccttgcactggtggtctttgctgccactgcaggtgcttcttcgtgctatttcctgtcaaagatgattgggaagccactggtgttcacactgtggccagataagctcagcttcttccagagacaggttgctaaaagaagagagaagttgttgaattacatgcttttcctcagggtgaccccaacattgccaaataccttcatcaacttagcttcacccatagtagatgtcccctaccatatattcttactgggaactctcattggtcttatcccagctgcttatgtcactgtcagggctggaattgctcttggagagttaacttcgctgagtgacctttacgacacccagtcgatagcactgctattcctgatcggtgttgtttcagtcacaccagcattgctgggcaaggatgaggcacaagagaaaccaccagaaatggcggtaggcgcgtcatgatcaccaaagcacctagcggtgtccacgtcacctgtatatatgtcaacatccagcatgcagtggcttcattagttcggatcaacgggcccttgtggctggatgataaaaatggttcgcatggccacacagcttggcgggacctcggcctaaactccctccactgctggcctacagaggcgcctgtgttgccatcatcagaacatgattcggtagccattcaccacattattaatgaatgaacctgggaagcagaattgcctgtagacgagctgctctgatgtgtaaacgagtagcgctgttcggataggacaggcatttagtccaatccctgtatatattaaccagattcattcaatccatattcagtggttcaaac

SEQ ID NO: 34838 - DNA, 1048 bp, Zea mays
  Clone ID: UC-ZMFLMO17327F04_FLI
caccgcctccgccgccgacaacagcgtagtgtagtgtagttccggagagggttggggagagtagtagtgatccgcaatgtcgacggaggaggctgttgtggctgaggtcccggtgaccgaggtgccagcggaggtcccggcggcccaggtggccgaggcgcccaaggcgaagaaggcgcccaaggagaagaaggcgcctaaggagaagaagccgtccgcggcgaagaagccggcggcgcaccctccctacgctgagatgattgtagaggcgatcgctgccctcaaggagaggaaggggtcgagctcggtggccatcagcaagtacgtcgaggggaagcacggcggcaagctccccaccaacttccgcaagcagctcaccgtgcagctgaagaagctcgctgccgccggcaagctgacgagggtgaagaactccttcaagctgccggccaccgacgccaagcccaaggccgccaagcccaaggcacccaaggccgcgcccaagcccaagccctcgccgaaggcgaaggccaagaccgctgcgaagcccaaggcggcgtcgcccaagcccaagcccaaggccaaggccaaggccaaggccaagcctgtcgctcctgccgccgcgtcgcccaagccccgcgggcgccctcccaaggtcgccaagacctccgccaaggcctcccccgccaaggcagccaagaaggcggctgctcctgccaagaaggggaaggcagcggcggctcctaagaaggtggcaaccccgaagaaggctgctgctgccgctccggccaggaagggcgtggccaggaaggccaagaagtaggctgcctgccttgtcgctggcgagatcccccctcaattccgcctatagattcccctcttgcctggattttgatccaatcgtaatattgtcagtagctctagattcgtcggtagctccagcatgagtgtcggtggtagttctgtgcctgtaaaaacttgggatggttgatcgcgtgtgatcagccgtcatgctcctccagtctctatgaacaagctaagctataatagt

SEQ ID NO: 34839 - DNA, 1516 bp, Zea mays
  Clone ID: UC-ZMFLMO17327H09_FLI
agtgcctattgatgcagggaaggaacaaagctctaccactgattgcgaggctccaactaaacttcagaatttggtctgttcaaagagtacacaaaaccattcccaatcccatgttaaattgggtctgtccaaagaacctggagacatttgtgcaaatatcacacaatattcccatcgaaagaagcactttgcagaacatagtgcagtgaattgcaatgcagaccaacactgtttagcagtgatagatgattgcataaagcgatctggcctaaactctgctgctcctgattttgttcccttagctgttaggaaatcaaataccagcgatggttcctgttcttcatctggaacgaacgtatcgggaattctgaaagagatcaatagtttgtcggaggtgttatgcaataattattctgatgaaattaagctagaggagcatgaccacagcctcctccaatcagtaattgggaatcttcagagttatcttcacaaagcaagcaaggttcctgctatggttgattctgacaagtcagggggactaaaggcttgctatgctcagaatgcagtttcaaaacctgtcgcaggagactacaacggtagtttcactgccgataatggaaaaggcataagtatctctaatcttggtgattctagtcctttggtcggtgacttaaggaaaaagagcgtgacagggtaccagcagcctgcactcagcaattttccaaaggagctctcatgggaggagcggtcacaggctcttatctataagaaactgtggtttgatgcagaacgcacaaactgtgctttgaagtatcaacttaaacaaacgcgtgtggaaatcgacctagagtcaagcacagctcatattggcgggggtccaagaaacagttctttccatctatgtgatgtgggtgtagatccaagtagttcctatggatctgccataacttgcccaccgatgatgctcaagggccatcctggagaaagaaagagtcataacctcctttctgctgctgaccacattcagtcaggagacagcagtgctctgtcaagaccaaaaggttacatagccgtgccagagaatattgaggatggatatttcttgtcagggccggaagaaaccggtgtccgccgccatgcacgtcctggtctacaaagtaggcccctcggaaggttgaacacaagtacgtcagatggaatgtcatcctcgtatgtcactggaagggatgacattctgcgtggcagctgcgagtttggatcttcagattgggagcatgtgttgaaggaagaaatcggctcaacctaaaaaaaaatttgaagggatctggcaataagtatatagtactgtacatgtatgagctaccacgaagctaggaattcggatcttcttgattttttttttgcttgacaaggctgatgaatgggcactggttggaatggtgctgctctagcctacggaaaaccccttatttatcttgtcttgggaacaatgcctataaatcataacttggatggc

SEQ ID NO: 34840 - DNA, 1672 bp, Zea mays
  Clone ID: UC-ZMFLMO17328B04_FLI
cctgttgtcccggcttttagacgcaacttccatcgctgcgaagctatccattcgtgttcgtcatggccgccagcgtcaccgtggaaaacctcaaccccaaggtcttaaaatgtgagtatgcagtccgtggggagattgtcatccatgctcagcgcctgcagcaacaactacaaacacaaccagggtctcttccttttgatgagatcctctattgcaatattgggaatccccaatctcttggtcagcaacctgtgacattcttcagggaggttcttgctctttgtgatcatccgtgcctcttggaaaaagaggaaaccaaatcattgttcagtgctgatgcaatttctcgagcaaagcagattcttgcaactattcctggaagggcaacaggtgcatatagtcacagtcagggtatcaaaggactgcgtgatgcaattgctgctggaatcatgtcacgtgatggattccctgcaaatgcagatgacattttcattacagacggagcaagtcctggggtccacatgatgatgcaattactgattaggaatgagaaagatggcattctgtgcccaattcctcagtaccctttgtactcagcctccatagctcttcatggtggagctcttgtcccctattaccttaatgaaaaaactgggtggggtttggagatctctgatcttaagacgcaactggaaaatgctcggtcaaaaggcattgatgttagggccttggtggttatcaatccaggaaatccgactgggcaggttcttgctgaagacaaccaatatgatatagtgaaattctgcaaaaatgagggccttgttcttctagctgatgaggtatatcaagagaacatctatgtggacaacaagaaatttaactctttcaagaagattgtaagatccatggggtatggcgaggatgatctccctctagtatcgttacagtctgtttccaaaggatactatggagagtgtggtaaaagaggagggtacatggagattactggcttcagtgctccagtaagagagcagatctacaagatagcttcagtgaacttgtgctccaatatcactggtcaaatccttgcgagcctcgtcatgaatccaccaaaggctggggacgaatcatatgcttcctacaaggcagagaaggatggaatccttgagtctttagctcgtcgtgcaaaggcgttggaggatgcattcaacaagcttgagggattttcatgtaacaaggccgaaggagcaatgtatcttttccctcagattcatctgccacagaaggcaatcgaggctgctaaagctgctaagaaagcgcctgacgctttctacgctctccgtctccttgaatcaactggaatcgtcgtggtccctggatctggatttggtcaagttcctggaacatggcacatcagatgcacgatcctgccgcaggaagacaagatccccgcggtgatcagccgcttcagggctttccatgaggcgttcttggccgagtaccgcgactaaactgttacgctgtgtgtgagttaagttggaggttcagtagaactgtagaagagctcagtgacagcgcagaaagaggcagtgttagaaaggcttaggtccttcttcacaggagcaacagttgtcttgtctccatcaaggagaaataaaaattttagttttac

SEQ ID NO: 34841 - DNA, 2128 bp, Zea mays
  Clone ID: UC-ZMFLMO17328G01_FLI
gctcaggtgcccctcgcttcctttccaaatccgtgcaccctgctcctcttttgtaatgcacctggtcgccgaggagagttcctcgacgacgtgatccgcacacacgactaggagaactgtctccaggtacacgagaggaaaaaggaagcagcgaagaaacctatacaaacaaggttatccaagctgctaaagaaccagggctacgtccttaccataatccatatccgagaggtaaccttctgtgatgttataataaacacctccatattattctacatagcgagccacaacagaattttttttgacaacattttttcacattctattcgatattaaattagtttataaggtaaataattccaaattggtaaaagatgagttcaaccttggcccattcttctcacagctgcaggcattagccaacagacctacatcttgcatatgtatttctcttgcatctacttacctctatggttctagcatatggctgcatatatggctgattatgacactgatatatatgtttcgatttccgatgaaaatacattcatatcaatatatgttaccataacttttttgtcgatcgtattcattgttgctagaattctatcagaacaagcatgacaataagcttcgctgctgactctgcagatatccacctgcaatatagtgataaataatagaacatttgtgagatgtcgtggtgccccatcatgatttctttgcttgccttcaaattcttcctatgatatggctaacaaaatgaaatggtagattcaggtgacttcgcaaccttttgatgtttaggttagaacagtgtgatggtcaagttgtaaaaatggttgcaaaattgctgaatacatgttgaagaaatggttgcacatatgattgattctggaagaaatgaaatcactagagagaagaaaataggcgctgaaatggtaataggaacttgaagtttgtccttttcagacttctacccagaaaatgattttgtttcgttttccttgcttaatattcctaaatttttgactgactaagttagtgctctattgaacactgaatgctgaatgactgacactggattattatttctcgtagcacagactctcgcgaagtgcgaacaatctactcgttcaaataaaaaccaataagatatgtggtaacttcaccttggtttcatacaccttttcagttgaactgatgaacccatgggcatgggctatttttgcacatacctcaatactaatccatgcatagatgttgtttacacttcacagtgggaggcaatgcaactcaacaggtaacattattgcatttaaagttctgttctaccagttctgtgatggaatggatgattctatttaagcctcaatgtcacagcattagttatattggtggattcctcaaagtatgattgttcacatttattcattaccatggcagcacctcttacagacattttaatgattggtgcagctgattttgatcttactggacatttagtgtggccaagggcagtcctgatgaacaactaactatctcaacaccctgaaactcttaagggatgttcagtaatcgagctacgatctgggattggtgagaaaattcactgccagactccctgctgcctttggttgtatgaaagctaaatatactatgacctgttgtatgcatttctggcgtattgtgtagccgtttctgcaagggtggtagagcataaatgatgcagttaccttctatacttgcatcattccttattattcagttgaagtgccacacatattgttagataaatgctgcacttcagatatccattgtgttgggggtcttcttctctaccaaaggtcctcaagacaaaaacacattcggcaagataatacaaaggctctccgaaactatcatcaacctcggctttgcatctcaagacaaagactttgtgtataagcaacgctgcagaatgctgaaggctcaataccttcggctcggatcaagcaaagaaataaaagactaaatagaccttattagctttagttgcttgtaaataagcgtttaaggatacggatataattttattcgggctgcgtcccgtgcctataaatagatgaatagtaacctcgtactgttc

SEQ ID NO: 34842 - DNA, 1122 bp, Zea mays
  Clone ID: UC-ZMFLMO17329C05_FLI
cagcgtcgcccagggtgccaacgctgggcagggggtgaccggcttcgattccgtccgagagagtctcaagcgctccccgctgcggacaccgcatcctccgtcgacgccgtttctgactctttcgcagagcaacatcttcagcccggagttacagaggaagtttaaggctgtagatgcgcggaaggatgggaaggaatctaacgtggcgctttcgaggctctacagctacgaagagcttgggaagaagctaggcgagctccggccagctgttggggccaaagacggtaaggagtggttctctcttaaggagctgcaggggcggatcgccaagctggcggagttggagaagcaggagaaccagttttcagggtctctttgggaaatcaagaattgcattgggaacctgaatcataaaccagaaaacggggctccgcgggtaaacattcatgcactgctgaaccttcgcggtcagccgacgccagactacatgagtcagcctccgcaggaggagttgttagagaagtacttccatccagatcatatgtcatccgaagagaagatgaaattggagctccaaagggtgagggatgagttcaagatgtccgagaatgactgtgggtctgcacgagttcaaattgcacaactgactctgaaaatcaagcatctgtcagctgttctacacaagaaggataaacattctagaaaggggcttcaggagatggtccaaaagaggaagaaatacatgaaatacttgcgaagaaccgactgggactcgtactgttttgttctatcaaagctggggctacgcgatgtgcccgagtacaaagctcctgattacaagagcaaagcaaccactaaggccaaatctaagaagagcaagagcaagaggagaaagataaaggcataggagcggtgaacaaacacaccctttgcatggctaggaaatgattcgagaagatagatccatccaatcttacagtgttttttttttgacaagaagctgtttgtaataaccatctctttggaggccacggtttttccttgttctgcttggagcggcaaccttcctgtaagttttgtaacaactgatgtcttacattattgcttttgagttctcccgct

SEQ ID NO: 34843 - DNA, 2218 bp, Zea mays
  Clone ID: UC-ZMFLMO17329E02_FLI
ccattaatactcgacacctccccgtcttcttcctcctcccccctccgccattgctccacgagtccacaagacatctcccgcgcgccagagctctagagagaaactggacaggagcgcgggcttcggactcccatctccgcgggggcacaaaagatgcaggtcctcatgactcccagcctccgcgcagcgcaatcggattgtcaatgaatctacaatgcaaatagtccattgcaatgccaaggttgcttcctgactgaccagatcgagcgtgttgaactctctggtcatctcgtctgaaaaaacagacaggtgtttgcagctatggcttcgaaggcaatgccccaaattctcccagaaacgccaggcatcccaggcacgaagcaatgctctaagagtgctccccctttcgagcttccccagacgaacaattcctgtgcttctgcgctgacggtgttaccaggaacaacaactgacctgagcaaatcgagccataaacctgagctgaacgagcagaaaccagaccaccgcctcaaggaacctgtcgacgccgcgtcggtcaagttccccgtagaaccgagcaagaaagcggtagcggagcatgggagcacgaacgggggttccacttcgtttcagacgtgtggagggactagccaggcccaggcaaaggtcagtgcgagtgctaaggccgctgatccacccgagatcggtgacaggggcaacagtggaagatgcaggcctagcacaagcagcgacatcagtgacgagagcccgtgcagcagcatgagcaacagcacgaagcctcacaaggcgaacgattcgcggtgggaggcgatccagacggtcaggaccagagacggggttcttggactgagccatttcaggctgctcaagaggctaggctgcggcgacatcggcagcgtgtacctctctgagctgaatgggaccaagagctatttcgcgatgaaggtcatggataaggcgtcgctagcgagccgtaagaagctgctccgggctcaaacggagaaggagattctgcagtgcctggatcaccccttccttcctacgctttacacccacttcgagaccgataagttctcctgcctggtcatggagttctgccccggaggagacctccacgctcttcggcagaggcagcctggcaaacatttcccggagcaagctgtcaaattctacatagcagaagtcctcctggcgctagaatacctgcacatgctcggtatcatataccgtgatctcaagccagagaacgtccttgtccgggaggacgggcacatcatgctctcggacttcgacctctcccttcgctgcgcagtcagcccgacgctgatcagatcctcgaaccctgacgcagaagcgctcaggaagaacagccatggctactgtgcgcagccagcttgcgtcgagccgtcctgcgtcgtccaaccgtcatgcgcagccccgaccacctgctttggcccgcgcctgttctcctccaagtccaagaaagaacggaagccaagacctgaagctgccaccccggtcaacccttggcctgagctcatagcagagcccagcgacgcacggtcgatgtcgttcgttgggacgcacgagtacctggcccccgagatcatcaaaggcgagggccatggcagcgccgtcgactggtggaccttcggggtattcttgtacgagctgctgttcgggaagacgcctttcaagggatccagcaaccgggccacgctgttcaatgtcattggccagcagctgcgcttcccggagtacccggccgtcagcttctcggcgagggatctgatcaggggtctgcttgtgaaggagccccagcaacggctggcctacaagcgtggagccacggagatcaagcagcatcccttctttgagggcgtgaattgggcgctcataaggtgcgcaagcccaccggaggtaccaaagcctgtcgagatcgagaggccgtcaaatcatccttcatcgccgtctggagctgctgctgacgatgcctccgttggtgcaccccagaaaggtgtcgacggctacttggagtttggtttcttctagcaaacatgtgggctttttttttacactggatgtagggttttctgatgttatgtttttagcagatggttggtgttgtagatttgtgccttcaacctgttttgttttgtattttacacgttcttaaagttcacatctgtaattcagc

SEQ ID NO: 34844 - DNA, 1733 bp, Zea mays
  Clone ID: UC-ZMFLMO17330A08_FLI
agcaccacgccaccccttcctgtctctctgctcctccgcatccgcttgtgcgcccgtgccgctcactgcactccattcccaatctctctgcctcccctgcctgtctctccacgccagtgcgcgcagatcgggcgggtgtgaagaggagctcatcacatcctctgctgcttcttctgtccaataagagctagctagctagctcgctcgccgattcaacagcaagcggcggcagtgatgcgcggacttgtcctcgcatagccaagatccgtccagcagcggcagcttgagcgcagacagattcaagaatggaggagaaagcggcggacgcgacggcgacggcgacagtggcggcggcggcggcagcggatcaggacggcgcggtgtactgcagcgagcacccgtacccgccaggcgcggcagcggcggccggggcgggcgccggcggcatctgcgccttctgtctgcaggagaagctcggcatgctggtctcgtcgtccaagtccagccccttccacccgccaccgcagcagccggtctccgccgcttctccgtcctcgacgacgccgccgccgtccaaccgcgcctcctccgaggcgccgccgccgccactctaccctcccgcggcgtcgcgcaaggtgatgcccgcgcagagcgcgggcggcggcggcggcgggctcaagaggagtaagtcggtcgcgccgcggccggaggagccgctgccgccgcccgcggtcacggcggacagcccgcgcaagaagagcttctggtccttcctccacctctcgtcgtcgtcaggcagccacaagggcggcgcgtcatcggcttcggcgggcagcggcggcgccgcgaggaggaactccgtgtcggtggcgtcggcctcgtcggcgtcgctcgggggccggctggaggcgatcgtggagccggagagcccgggccgccggagcgagggctcctcgtcgtcgtcgttcgggcggaaggtggcgcgctcgcgctccgtgggctgcggcagccgcagcttctcgggcgacttcctggagcgcctctccaccggcttcggcgactgcgcgctccggcgcgtcgagtcccaccgcgagcccaagcccaaggccgcgctgggccacctgggcggcggcgaggagcacgagcaggaccaggaccagcaccaccgcatcaagtgcgccggcttcttcggcggcggcctgggcgccgcggccccgccttcgtcatcctactggctctcggcacccgacggcgccagcgccagcgccagcgggagcgcgaggggctccggctcgcggagccaccggagctgggcttgggcgctggcgagccccatgagggcgctcaggccgaccagctcctcgtccagcaagagcatcatggccgcgcccacagccgcgtgagtgaagggcagcggcagcatgcatgcagatgcgggggtagcttcatggggttgatgctgccgctgcgtgagcgatcaatggccggtgaatcatcatccattccatccctcgaccatatatactagtactacataaatgtctccatctttattggtgttctcgtgtccatgccttacgatttttaagcagaacctggtcctgtttatgttggaaatgttgctatggatctagctatagctactgcctttacatttgggattcctgtctccagtggccaagaaaactgtggaacttgttaatctgtttaacccctggagtatttgtctgggc

SEQ ID NO: 34845 - DNA, 1302 bp, Zea mays
  Clone ID: UC-ZMFLMO17330A11_FLI
aagtcagcattctggggccaccttcttcggcatgtgatgcagcaggggcagaagaacatggtggaattctttgacctactcctttctccggcatcgaaaatcttgaacacctggtttgagagtgaggttttgaaggccactcttgcaactgacgccgtgataggagctatggctggtgtgcacactccaggttctggatatgttcttctacaccatgtcatgggggagactggtggtcagcgtggtgtttgggcgtatgtccaaggtggtatgggttcagtgtcatcagctataagcaaagcagctcttgaagcaggagtgcagattgtaacaaatgccgaggtttcccaagtaatggttaatgaaactagtggaatggtagaaggggtagctttggttgatggaacagaggtgcactcgccagttgttctctcaaatgccacaccatacaaaacatttgtggacctagtaccttctagtgttcttccggaggacttcctctgtgcaattaaggcagcagattacagctctgcaacaacaaagattaatgtggctgtcgacagactgccacagttccagtgttgcaacaccaatcttgaaggtggcccagagcacatgggcacaatacacattgggtccgaaagcatggaggaaattgacgttgcatacagggaagcagcagacggcatctcgtccaaaagacctgttatagaaatgacaattccttctgttttggataagaccatctctccgccaggtcagcatgttattaatctctttgttcagtacacaccctacaaactttcagaaggcagctggcaggattctaatgtcagaaaagcctttgctgagcgatgcttctctttgattgatgagtacgcgccaggcttcagctcatcggtggtaggctacgatatgctgactccgcctgatcttgaaagagagttcggcctaacagggggaaacattttccacggcgcaatgggcttggattctctcttcctcatgaggcctgccaagggatggtcggattacagaactcctgtgaaggggctgtacctctgcgggagtggcgcacacccaggtggcggggtgatgggcgcgccaggacgcaacgccgccgccgttgttttggaggaccacgtgaagacaaagtaggtgtagtgtagctcgctggaaaccaagatggcatttttatcatcaggagaaaatctttgatgccatggtgctgttttagtgcctttcttttcttttcctttttggagaattattgtcgcaatccatagtcggagaacttatatc

SEQ ID NO: 34846 - DNA, 1143 bp, Zea mays
  Clone ID: UC-ZMFLMO17330A12_FLI
agcagcagaggcagcgacacgatcgcgagcgcacgcacgtaagcacgttgtcggaagctcaagttagaagaagcaccagtgcctgatcgatggcggcccaggctctcctctccggccggcagctgctgggccgccccgtgcagtcggccgtctctaggtcgtcggcgaggaaggcgcccttcgtcgtcagggccagctccagccctccagccaagcaaggtgccgacaggcagctgtggttcgcgtccaagcagtccctctcctacctcgatggcacgctgcccggcgactatggcttcgacccgctgggcctctcggacccggagggcaccgggggcttcatcgagcccaagtggctggcctacggcgaggtgatcaacggccgctacgccatgctgggcgcggtgggcgccatcgccccggagatcttcggcaagatgggcatcatccccccggagaccgcgctgccgtggttcaagacgggcgtcatcccgcccgcgggcacctacaactactgggccgactcctacacgctcttcgtcttcaacatggcgctcatgggcttcgccgagcaccgccgcctccaggactggtacaacccgggctccatgggcaagcagtacttcctcggcctcgagaagttcctcgccggctccggcgacccgtcctaccccggcgggcccctcttcaacccgctcggcttcggcaagaccgagaaggagatgaatgagctcaagctcaaggagatcaagaacggcaggctcgccatgctcgccatcctcggttacttcatccaggggctcgtcaccggcgttggcccgttccagaacctgctcgaccacctcgccgaccccgtcaacaacaacgtgctcaccagcctcaagttccactagaacgttggtgcatcagcatacctgctgccgccgccgccagttgtttgctgtggaaagctagatgcatgcgtgttgtaaaggaacctgaagcgttgcatcggtcatgattcatgcatggccagcctgctgcctgtaacaacaaactagtattgatcttattgagaccggaaactgtattgcacatggtaaatcaatgtacaattcctccctagatgcggacaaatttctcctaaggccatgaccatggtgg

SEQ ID NO: 34847 - DNA, 691 bp, Zea mays
  Clone ID: UC-ZMFLMO17330B02_FLI
gcttgattcggaattattaggccaggagcaaagcaaaagctttgatatgtactcctctctttcccatcttttcccgtctgtccccactcagcaccttgccaccttgtgtggtgtgtgactagaaagccacagctgccgagttggaactgcaaggaacacatgagactgagggttgcacacacacacctgttgcttagattaactttatttacaagttcatgctttacaagattaagcatcttcatctttcttttgacatttttgcagcgacagatccaaacattcatctcggaggccaagccacgagcaactggaagattcagtgtggcttgcatccttgaaggcaagtggcgccagttctatgaaaataacgtcatggtggtcggcgcccactgtgttccgatctgcattagcaattgcagtggcgaccttgcttggtgcacaaattgcaccggatcatcctgtggtcggcttgctatgattcggcaaggttgcggttcttgattcttaggaggcatccaagttattttcagaccggaagcagattagagcagtagtagatcagcaatggggagagaattctgtgtaggttttttgttggtggataggtgctagcgctagagaaggaacgatgtgttacaagttggcaatcggaattccatgaatgcattacataagcacattgcctttc

SEQ ID NO: 34848 - DNA, 879 bp, Zea mays
  Clone ID: UC-ZMFLMO17330B09_FLI
agccaagcgagggagcgagtctaggcccgccgatcggcccggccatgagcgtcaagcagccaccgtcctcgtcgacggcggcggccttctacgcgacgctggcgcgcggactcgacgacctggaccgggcgctggcggcgtcctctcctccctcgtcgtcgttcctgtcgctgcccacgctccgggccgcgctggcgctgctccgcgccgcgcacgcgggcctggcccgcctcgtcgcgtcgctccacctcccgggtggcgcggcctggctggacgagtacatggacgaggcgtccaggctgtgcgacgcgtgccgcgcgctgcggctcggcgccgctgccgtcgaggggtacgccggaagcgccgcccagctcgcctcgctcctcatgcagggggcctcgtcgagcccccacctctcgagacaggtggcgcgtgcgatcagcgtgtgcaggcgcgaggccatggcggtgaaggaggagaaccgcgcgctggtggagacgcgcgcggatgcgctagcgctgcgcctgagcgagggcgtccccgccgacgccaagctgggcggcttcaacggcttccgcggcgtgctctgcgccacccggatgctgacctcgttcctgctgacgctgctctcgtggggcgtgctccactactggcccgcccccaacgcgggcgccggggactgcgccgcctacttcggcgccgcgttcgcgacggcgctgtcccgggcgcagcagcgcgcggcggcggaggccggcaggtccgtggcggcggccggcggcggcggcggcggcggcggcggggtgatgatgcacgagttccggcgcgcgcgggcggcggtggaggaggccaaggaggccgtggagcgcggcggcgacgtgg

SEQ ID NO: 34849 - DNA, 813 bp, Zea mays
  Clone ID: UC-ZMFLMO17330C02_FLI
cacattcttcattcatcgttaaccatctgttttgacgatgaatgaagaatgtgcttgtgtaaccctgctttaacagctgcatgtgcatagcaacagttgttcacagaagcttttcgtagatttgtcaaaacagatggttaacgatcttgagaattcagggcggtcattttcaggcccatcacatggttgggaagctggcattagtctcccggaggatctcgcagatttgtttgaagcaatagctggcgcaatttacgtggacagcgggaacgacaaagaggttgtctggagtgccatcaggcggctactggaacctcttgccacccccgagaccatggagcctgaccccgtgtcggaactgaaggaattatgcgagcacaaacactaccctaagccatcgtactctccaactcgtgacagtgtagctggagtgacaagggtggttgcacaggtgacggctgcggggactgtgtactccgggactggaacaggccgcaaccaggatgtggcagaggttctcgctgcaaaggctctgctcaaaaagataaaggccgcagcaagaggatgaagcttggacttgacttggaccgggcgggcatttgatatttgggagtttgcgcacatgatagctgttctcgcagaggtatcaaaacaaactactgtagtatataaatgttgtgtatatgaatcaaggacagttgaactaccccttggtttcgatagctgcaaaaaaacaaaacaaaaaactcgaatctactatgcacagtggcttcatgtggtggacccttaatgaaatgatgaattctacgtggc

SEQ ID NO: 34850 - DNA, 578 bp, Zea mays
  Clone ID: UC-ZMFLMO17330D01_FLI
cgaggctcaaatttctgctaacctcatcaaacatgggccattggcaatcggcatcaatgctgcctacatgcagacatacatcggaggcgtgtcatgcccatacatctgtggcaggcaccttgaccatggtgttctccttgttggatatggtgcttctggtttcgcccccattcgcctgaaggacaagccttactggatcatcaagaactcgtggggcgagaactggggggagaacggatactacaagatatgcaggggttccaacgttcgcaacaagtgcggcgtcgattccatggtctctaccgtgtccgcagtccacgcctcgaaggagtagactctggtcagcggtgataatcgtgattccatatattgtagaactacaatccctgctagtaatccatttgtgctgtttatgtatcgaaggcagcaaagatgtgtgaagcggcaatgggatgcttgctgtaaggtaatatgtttggcttgctaggcatgctacacgctatttggatgtagcaacgttatcaccagctgtatacgctttttaatcgacaacatttgaataatatgtacataacatt

SEQ ID NO: 34851 - DNA, 1573 bp, Zea mays
  Clone ID: UC-ZMFLMO17330D06_FLI
accaactcgagtcatcgagttccacagctctcgcgtcgcgcgcagccaatccctctccctccggcctacacagcccagaactcccttctccatctctctctctctcgcccgtgtcgccccctgtttgcatacaaccccatggcgacccacgccggcgagaacggcagcgggcacgagaacggcggcgggcacgcggagtggcggttcgcgcgggcggcgaaggagggcgcgctggccgtggcgggggacaagatgagcatccgggcggtgcggttcaagatcagcgcgagcctggacgcgcgcgacccgcggcccgtgctgccgctggcgcacggggacccctcggcgttcccggccttccgcaccgccgccgaggccgaggacgccgtggccgccgcgctccggaccggcaagttcaactgctaccccgccggcgtcggcctccccgaagcccgccgtgctctggcggagcacctgtcgagcgaccttccatacaagctgtcgagcgacgacatcttcgtcaccgccggaggcacgcaagccatcgaggtggtggtctcagtcctcgcgcagccgggcaccaacatactgctcccgaggccgggctatccgaactacgaggcgcgcgcagggctgcacaacctggaagttcgccggttcaatctgatccccgagagagggtgggagattgacatcgacggtctggagtcgatcgccgacaagaacaccaccgccatggtcatcataaaccccaacaacccttgcgggagtgtctacactcgtgagcatttggccaaggtcgcggaggtggcaaggaagcttggaatactggtcatcgctgatgaggtgtatggaaatctggtgtttggggacacccctttcgtccccatgggtgtctatggccacattgcccctgtgttgaccataggatcactgtccaagagatggatagtgcctgggtggcgacttggttgggtggccgtatgtgatcccaacaaggttctgcaagaaaccaagatcattgcatcgatcacaaacttccttaacgtttcaacagatccggcaacttttgttcagggagcacttccccatattcttaagaacacaaaggaagattttttcaagaggatcattggtctgctagcggaaacatcagagatatgtttcagcggaataaaggacatcaagtgcatcacatgccctcacaagccagaaggttccatgtttgtcatggtgaaactaaatttgtatcttttggagagcatccatgatgatattgatttttgttgcaagctggcaaaagaagagtccgtgattttgtgtccagggagtgttttgggaatggaaaactggatccgtatcactttcgccattgattcatcttctcttcttgatggtcttgagaggctgaaatctttctgccaaaggcataagaagaagaatttgcttaatggccattaactatattcgacttcaaagttgttacccacttccatcgttttccactgtatcatcaacaaaagtgtaacattgaaatccctcagaagtaataaagttaatgtttacatatgag

SEQ ID NO: 34852 - DNA, 2109 bp, Zea mays
  Clone ID: UC-ZMFLMO17330D10_FLI
tgctgctgcatttcacccagaagacaaaggtatcgagcagaacccacaaactcttgacaaagatgaactttctccatccggattgcctgattatatggaacatgtaagcgccgatgggatgcatccacttggatcaaacgagttatccatggctacaaggaccagtgagacaggagatggggaggaaactatagtagaggatctgtataaaggagaaagtgaattagaaaaccaaaacaaacaattggagtccacaccacctgaccaatatttttcttctcctggaattcctgctccctctgtagtatccactgctttacaggtgcccgcagggccgattgtggttccagcttctgttgacccaacccaggaaaatgctatagctgcattgcagattctaaaggtgatcgaatccagtgctcaagctggtgaattgtgtacccggcgtgagtatgctcgatggttggtagctgcgagcaattgcctttcaaggaacactttctcaaaagtgtatccagcaatgtatattgataatgtcactgaacttgcatttgacgatgtcacacctgaagatcctgattttccattcatacaaggcctagcagaagctggattgatttctagcaagctttcaagatctgatatgaatatcccagaagatgttcatgacaatcatatcttgttttcccctgagagtcctttgtcacgtcaagaccttgtgagttggaaaatggccctggataagagacaactgcctgaagttgacagaaattgtttgttcaaactatctggctacatagacatcgataagataaacacagctgcctggccagctttggctgcagacttggatgctggagaccagagcattacagctcttgccttcggtttcacaagacttttccaaccgaacaaacctgtgacaaagggacaagctgccctagcattttcagctggtgattctggcgaagtggttctggaggaggttgcccgtatcgaggcagagaaaatagctgaagcagctgtaaatgcacatgctgcattggttgctcaggtcgagaaagatcttaatgcaagttttgaaagggagcttaaggaggaaagagaaagggtagagacccttgaaaaagtagctgaagaagctagggtggagctagataggttgagggcagaaagagaggaagagaagaatattctggtcaggggcagagctgctgttgagtctgaaatggaagttctgttgaagttgaggagtgaggtagaggaacagctgcagaacgtactgagcaagaaggtggaggtgtcgttcgagaagagtaggattgagaaactccaaaaggaaattgagagcgataactcggctgttgtgcaacttcagtatgagcttgaagtggagaggaaggcgttatctatggcaagggcttgggcagaggaggaagccaaaaaggcccgggagcatgcacgcgcccttgaggaggcccggaaccaatgggagcgtcaaggaatcagagttgttgtcgaaggagaactgaaggatgacgcctcagctggggtgacatgggctaacgctggcaaagaaaacgcagtcgacgagtctatcaaccaggcagaagctctgctggagaagctcaagacaatgtctggtgagatggaggtgaggtctcggggtgcggtggagagagtgatgcagcatgtgaggtccttcatcgcaatcctaaagcagcaagctgcagatgcaaggcagtggtgtaccgagtttggggcttgtgctgcttccagggcaaacgaggtatcagcacaagtgaagggaagcgtatctgcgtttggtgcaacccttggagacaagtcgaagagggcaatggaagagtgcaaggacggcctggagaggatttcacacagattcaagacagactagataccaattttgttgtttgcttgttttttggggatgatgttgttgcagagttgtttactatagcatgctggaacgaacagtaagtagttcccgaccgtggccttgtggaataagtaagtgcaacgaagcacttgtggccttctggaataagtgtaattaataccaacagtaattaataatagttcccgtttatt

SEQ ID NO: 34853 - DNA, 1294 bp, Zea mays
  Clone ID: UC-ZMFLMO17330F04_FLI
cagcaagacaaagatatacatcgtcatggagctcgtcaccggtggcgaactcttcgacaaaatcgcctcgcgtggaaggctgaaagaggatgacgcaaggaagtacttccagcagctgatcaacgctgtcgattactgccatagccgaggcgtctaccaccgcgatctcaagcctgaaaatctcctgcttgatgctagcgggacgctcaaggtttcggattttggactgagcgcactatctcaacaagtccgagaggatggtctgctgcacacaacctgtggaactcccaactatgttgctcccgaggttataaacaataagggctatgatggagctaaggctgatctgtggtcatgtggggtgattctctttgtcctcatggcggggtacctcccatttgaagattcgaacctgatgtcgctctacaagaagatcttcaaagcggatttcagttgcccgtcctggttctccacaagcgcaaagaagctcatcaagaagatacttgaacctaatgctaacaatagaataactattgcagagctcattaacaacgagtggttcaagaaggggtatcagcctcccagatttgaaacagcagatgttaatctggatgacgtgaactccatcttcgatgaatccggggagccagcacagcttgttgttgagaggagagaagaaagaccatcagtgatgaacgctttcgagttaatctctacgtctcagggcctcaatctcgggacgctcttcgagaagcaaacgggttctgttaagcgagaaacaaggtttgcgtcaaggcttcctgcaaatgagatactgtcgaagatcgaagcagcagcaggacccatgggcttcaacgttcagaagcgcaactataagctgaagctgcaaggggagaaccctggaaggaaaggtcagctggccattgcaacagaggttttcgaggtcacgccttccctgtacatggttgagctgcgcaaatccaacggcgacacccttgaattccacaagttctaccacaacatctcaaatggactgaaggacgtgatgtggaagccggagagcggcatcgtggaaggcgacgaggcgcggcaaaggaggtccccgtgatggggtctgcaaccaagttttagaagtagcgctgcagataactagtcatcagggacagggagcctggtgggaactgagcctgtgactgcttcctgtttgtgttggatgtttttgttttttgtctaaggtgctttcagactaaagtatgctggataatgcgaacgaagaatgtgcagagttttcagc

SEQ ID NO: 34854 - DNA, 2935 bp, Zea mays
  Clone ID: UC-ZMFLMO17330G05_FLI
ctctctctctctctctctcgttgcccccgcatactctctgtctctggtggcggcgagtagcatactctctgtcttgggcgctctgtctctggtggcgacgactcgccgccgccgccgccgcgataggccacgcctcctggtcgccatttccggatccttaccgacgacgcgcacccaccaccccatctttttccgttcctgctgtgcgacacacaaaccctagctgtatcgggtgggctgtgaaatggaccaagctgcagattcctctgaactgcttcgtcgcatcgaggagctccagcgcgaaaaggatgaaaaacagaattctttggaactattgttaagacggattgaagggctacaatatgaaatggatgaaaaagtagatcttgttgaagtgttaactcgtcaagttgaaaatctgcagcgagagcgtgatgagctcagaaaagatattgagcaattatgtatgcaacaagctgggcctggttatgtttctgttgcaactcgaatgcttactcagaggacagcagctttggaacaggatattgagaacctccagaaaaagttaggtggttgcttaagagagaatcaaaatttgcaagaggagcttgctgaagcttatcgaattaagagccagcttgctgagttacatggtgctgcactatcaaagaacaaggatcttgaaaagcaagtaagatttttccagagcagtgtcgctcaagcgtttgctgaacgggacagttcattaatggagtgtgagaaagcaaaagagcgggaagaagcagtgtcaagaaagtttgctgattttgaggaaaggatgagagaatatcaatcagagattgatgaacagaaacacttaaatgatgacttgcagagagaactgacagaactgaaggcacatacagaattgtccttgaaagttattctaaaattctatgaccttcgttgcagagactctggatgttcttcaagccttactattgaagagaagtgttcaatccttcttggtgattctgctgacaattggagttttagctctgatggcggaacctcaactttgaagtacattgtaaaccacccttatccattataaagaatgattcatatttaagtatgcgatctgtttttttttttgcatttgtattgcaagatacaaattctctgtggcactaaacatcatctggcgcagagccagaaaattatagatatggggacgaaatgctaaaaaataaattattagaaggcaaaatcagcattttcattgaattttatgtgcataagaggaacttatctatcataacagagtgcttgatcctccctccttccgcccctgaacatgttaatgcattgttggctaattggcttgttcagttttattctgggaactaaatgaatgcagaaggtaggaaatgatgaaactttgctggcatctgtttcaggacttatgcagttatgctttgttcccagtttctcattcaacatactgctcaatacatggatagaaaacatccgtattattgatggaagtcataaatttagtgctaatcttctcatttgtcctattcagtaagttatagttcagtatgattgtcatgttctatttgacctaattgtgtcatgtacttgagtaatacaacatgacttgcaggccctaatttgttttcaagaactgtttattgatttttttttccagttgatttggtcctaaaccaaagtgctttgcatagttaaggcgagtgtttgacccccgccttaccttcgaagcggtaaagtgtaaggcgagacaacaccttaatcatatataaatataggaaaatatagaaaattagtcttgaatagaagtacgaaagtaccaaacagaagcctataagttcaatataagcaaacataataggctaaaagtccaacataagtaggttctgatactctcatctctcaagttctgatacatcatcaaactcatcaaaaatgggaggattactgtcttcttcgcgttctctcccaccggatatatcatcatcttcactcacattcaagtcatctttcgcatgattggttgccgcgtcctacccgcccagactcgcggcatgcgttggccgggcgcgagcgagtgtttggttgccgcacccacgccctccggactgcatgtgcgcatgcagtttagtgttttttttcgccgttctgcctgcaagcgtggagaagccggaaattaccttcgctgggggaccaggcccgcacgaggcaggcacgtgacagaccggcaaccaatcagcccccttgtggatctggctcaaagtcttcgtccatggcacctccctcttcttcttacggcctcattcttgcatgctttctctatgtaaggccagaactttgtctctgactagcttgccttggaaggttgtgccctcgaagcgactccgatgctctagtagcaacatcaacatgatccatcatgtgaggtcaacaatattatcattgtccctgctggggtgtaccactgatgagtatccactcgttgtcccaatcaaaatcctcaataattaatgggtcatagcttgtgccggctttctccctcatttgaaacctacttcgcatcttttgattgtatgaaacatagaccaagtcattcaaccttttatgcaacaacaagtttctcttctttgtatgtatagtaagtaacaaacccaacctaaataagtagcaagaaatagattgaagctagtaaacataagcgaagtagcaaaaaatggacttacaaattcaaatgtgcttcaattcctctcacaaccggatgaggaagcacaaagtctaaccagtaaccacacgcttggcaaacctttgaaattcatatgctcggccgccatatgaacgttatcaatcaactacgcagatgcaaacagcgacacggtcacacacataggtatacaacagcagg

SEQ ID NO: 34855 - DNA, 450 bp, Zea mays
  Clone ID: UC-ZMFLMO17330H01_FLI
ctttctgtgcgtgaaggcatcgaaattgttgtatctggtggtatgtcgatgccccaaattctgtcaaccctcgacccgcagatgatccttggggacagaaccggaccaagcagaagctgaagctgctacgagccctttgtttacctttgtgctgatgattgttagtaacattttcatacaggctaccacgagtacggcaaactagactccgagcacaagtatctgtatattaagtaggtgtaggtgactcacacggtttgattatttgctggactctgtaccatggtttgtagtttgtactgcatccgatgcaagaaagaagcatctcacctgtctgtgatatatccaactgttgtcaaattactatcctctgtgtagtccttgattctcatctgacaacgttgaattgggttcttgacttgtcgatggttagctgcattcttttcttct

SEQ ID NO: 34856 - DNA, 1487 bp, Zea mays
  Clone ID: UC-ZMFLMO17330H04_FLI
cgggagggaggcggggtttttgcgtgatttgagttctccggttttccccacgctcccgccatggtgtccgaccaggagatcgccagctgcgtcgagtccgtcctccgaggctccgccggcgggcccggggaggtctcgctcaccgccgtgctgcagcaggcggaggccacgctcggcgtcgacctctcccacaaggcgggctttatccgcgaccagatggacctcttcttcggcccgcgcctccagccgcagccgctgaccacgccacagctggcgcctcccccgcctcaggccgtcgttgcccccgcggacgccgtgcctcagcatcaggttctgccgcaggcaccgccttcggctcagcagatgcagccgcagccgcagcagctcgcgccgcttcagccgcatctcatgttccagaccattcaccagctccccgccatctctcccgtccctgcggtctccgcgccgccggccatggcgttctacccgcctccgccgctcgccttccgctacaccaccggcctcgctggggccgccacgggtgggaccgtctccttccagcagccagcccctggggctgggggcactgcttcccccaacgctgcaccgcaggtcgccggcgacaacaaggaaagttcttctaagcgaaaaagaggtggacctggtggtttaaataaagtttgcgcaatttcacctgaacttcagaccattgttggtgagactgccatgtcaagaactcagattgtgaagcagctctgggcatatatcaggcagaacaatcttcaagatcctgatgacaaaaggaagattatttgcaatgacgaacttcgtgtggtttttgaaactgacaccaccgacatgtttaaaatgaataaattattggctaagcacataaccccacttgacccaaaaagtcaacttcatgaagtaaaaagaatgaaggctcccaccatgtctcctcaacctggacgtcccattgatcaaccctccatagttatttctgacgcactagcaaagttcattggaacagatggaacatttcctcaagatgatgccctgaaatatctgtgggattacataaaagcaaaccaacttgaggatgtcatcaacgaatcaatattatgcgattcaaaacttcaagagctctttggctgtgagagcattcctatgtcaggactatcagaaatgcttggtcaccacttcatcaagaaaacatagcaaatcctcattaactgatctaggattgcagtgtggcagataggcctaacattacaacatggtgttctttacagaatggacagcatagcttatgtatttcttcaatgttgtggattatgaattgtgtccggcaaatatcagattatttgcggtaagcctgtacattgttatgcgtgctggctactgctgtgttgtctggtgtaagtgtgtaaccttctctactgaattcgtagtgctaattcctaaatgtcaaaatgtcattgctgact

SEQ ID NO: 34857 - DNA, 854 bp, Zea mays
  Clone ID: UC-ZMFLMO17330H09_FLI
caatgattcacagagatgggagataatttgcaagttgtctatcggcattgtgaaaggactggaccaccttcacacagcatcgcagaaaccaatcattcatggcaatctgaaaacaaataacattatgcttgacgctgatttccagcccaggatatcagacttcggcctctaccttctgctgaaccctgctgctgcgcaggagatgcttgagacatctgcaatgcagggttataaggctccagagctgatcaagattagggatggcaccagggagagtgatatctacagtttgggagtgattatgctcgagatgcttgctcagaaggaggccgcaaatgatgaatcgccaaatgcgcgtgacatccatttgccggtctctttcagagatctggttctcgagaggaagatatctgaagctttcagttccgagcttatcatacagagcaagaattctgggaaggagggcaatctgaatgcctactttgaattggcaacggcttgctgtaatccatcatcgtcattgagaccagatacaaagaaaatactaaaaaggcttgaagacatagcaagataacaatagatgcgcgcggcggtgaggctccagtctgtttagaaattagaaagtgtggtgtgttatagcagcggccagcaggatagctttgacgtcccttgtattgtttgttacttcctgcatacagcagatattgtgttgggggcatttggaaaatgatcctaacataagctaggagccccaagcatgtatagaaaagtatatttcccacgtaccaacataggaactcatccgagaacataatgtgtgtgctttcagcgtggaattttcataaaatttcctt

SEQ ID NO: 34858 - DNA, 1332 bp, Zea mays
  Clone ID: UC-ZMFLMO17331E08_FLI
cgcctctcgagtctcgtccacccgtcgtcctcctagctcctctactcgccagtcgccatgggcaagattaagatcggaatcaacggcttcggaaggatcggcaggctcgtggccagggtcgccctccagagcgaggatgtcgagctcgtcgccgtcaacgaccccttcatcaccacggactacatgacctacatgttcaagtacgacaccgtccacggccactggaagcacagcgacatcacactcaaggactccaagacccttctcttcggtgacaagccggtcaccgtctttggcatcaggaaccctgaggaaatcccgtggggtgaggctggcgctgagtacgtcgtggagtccaccggcgtcttcactgacaaggacaaggctgctgcacatctcaagggtggtgccaagaaggttgttatctctgccccaagcaaagacgcacccatgtttgttgttggtgtcaatgaggacaagtacacctcggatgttaacattgtttccaatgctagctgcaccacaaactgccttgctccccttgctaaggtcattcatgacaacttcggcattgttgagggtctgatgacaactgttcatgccatcactgccacccagaaaactgttgacggaccctcagccaaggactggagaggtggcagggctgccagctttaacatcattccgagcagcaccggtgctgccaaggctgttggtaaagttctccctgatctgaatggcaagctcactggtatgtccttccgcgttcctactgtggatgtctcggttgttgacctcaccgtcagaatcgagaagggggcctcctatgaggatatcaagaaagctattaaggctgcttccgagggtccactcaagggtatcatgggttatgtggaggaggatctggtttctaccgacttccttggtgacagcaggtcgagcatcttcgacgccaaggccgggatcgctctgaacgaccacttcgtcaagcttgtctcgtggtacgacaacgagtggggctacagcaaccgcgtcgtcgacctgatccgccacatgttcaagacccagtagagggttttccccctgcttctcatggatggttgctgcttgtgtatgccgagaataaatgtggatgtcgccaggttcatgctgagtctggacatgttttgcacttttgtttccatttctgccatcatctgtggcagatccgctcgctaatatgggacctgagattagctttttgctgcttgtggtgaggttgcagttttgttatgtgtttctgtgttgttagtactcctatgatttaggtgttcgttatatagaatttacccc

SEQ ID NO: 34859 - DNA, 999 bp, Zea mays
  Clone ID: UC-ZMFLMO17332B09_FLI
ggcaagctcagcttcgccgcaggggaggagtctccgaagctgccgctgccgtctcctggtggcagcctcaccaggagcgggagtggctcactggaaggtggtgctgtcgcgctgttcaatatggagtttaccaacggagagtttaccgactccgagaagaagaaaattatggcgaatgagcgacttgctgagatagctctgacggatcctaagagggtcaagaggattctggcgaatcggcagtcagcagccaggtcaaaggagcgcaagatgaggtacattcaggagcttgagcataaggtgcaagtgctgcagacagaggctacgacactctcagcacagttgacaatgctgcagagggactcagctggattggctactcagaacaacgagttgaaaataaggcttcaagcaatggagcaacaagcacagctgagagatgcactgaacgaagcgttaactgccgaggtccagcgtctgaaactcgcgactggggaggtaaccgatggccggatgccgaagggcctacagcagcagatgaactcccagatgctccagatccagcagctgcaggttcagcagcaggcgccccaggcacagcagcagggccagcgacagcagcagcagcagcctcagaaatcggcatagatcaggtcaggtcgagagaaggacgctgaagctaattgagcttgagcatggccaattgaaggatgctgggtggggagaaaaaacccgagtcttttgcgtatatcagacatgttgtaggatagctgcaatagtagggcgacaggcgccgttggtttcgccgagtcaagtaccttagctggagtatgtcgtcttggtgtcgtagtaccatacatgattgcctgcctgcctgcctattgttgaggcgtcttggtagcgtccctgaacgttctctcggaggtgcttcttctgttcttttgtctaagagggctagggtgtcacaaatgtacctgcgtaatagtgtaattattatct

SEQ ID NO: 34860 - DNA, 978 bp, Zea mays
  Clone ID: UC-ZMFLMO17332E03_FLI
aacccccaaaccctccgtcctaacctctgcgccaccggcgtcaccaccgccggagccgcagccatgaacgccttcaggttcctcggggacatgacccacctcttctcggtcctcgtcctcctcctcaagatctacgccaccaagtcctgctcaggggtgtcgaggaagacgcaggagctgtacatgttggtgttcgtggcgaggtacctggacctcttcacggattatgtctcgctctacaactcggtgatgaaggtggtgttcatcaccagctcggcggccatcgtgtggtgcatgcgccgccacccgcaggtacgaaggacgtacgacaaggagcaggacaccttccgccacacggtgctcgtcgccgccgcattcctgctcgcgctgatattccacgagcggttcaccttccgcgagatatgctgggcattttcaatctatttggaggcagtggctattctcccacaattagtgttgctccagagaagcagaaatgtggataacttaactggacaatatgttttcttccttggggcctaccgtgcgttttacattctaaactggatttatcgttatttcacggagggtcatcgcagcagatggatcccttggcttgctggtttggtgcaaacagctctgtatgcagatttcttttactattatttcttaagttggaagaacaatgtgaagctcgagttgcctgcttgagcatgcttcgttttgccagaaagcgtgcaagctacgtgactcaagttttatagaatttagttgattatatgggcatggagagacttggtaatgacgtgagcagttgcagttgatgccaaacccttgatcttgtctgcgaaaattggcatttgtgtttcccatggccaagacgatacgattccaaagctaacagatgctgctgcacagaagtaggctagttcctttttgtacctcaatacttttgatatggaaaatcatatacagttc

SEQ ID NO: 34861 - DNA, 1057 bp, Zea mays
  Clone ID: UC-ZMFLMO17332H10_FLI
cggcgacgcgcggaatccacgaccacgaggatcctctgcagaggcgcagcagggctctggaggagggaggaggagggagccgctgcggcgcggggccgtcagcgcgcgcctcccggtgccggaccacatacgccggccgccctacgtcggcacggccgccgtcccggaggtgtgccccgaccggcaggtgcacgacggcgagagcatcatgcggatgctggacgcctgcgagctcgccgctcgggtgctgcaccatgccggggcgatggtcaagccctcggtgacgacggacgagatcgacagggctgtgcaccagatgatcgttgacgccggcgcctacccctcccctctcggatacggcgggttccccaagagcgtgtgcacgtcggtgaacgagtgcacctgccacggcatccccgactcacgcgagctacaggatggcgacattatcaacatcgacgttactgtctacttaaacggataccatggggacacctcgagaacgtacctgtgcggagaagtcgacgacgcaactaagcagctcgtgaaggtcaccgaagagtgcatgatgcgcggcatatcagcctgcaggcacggcgccagtttcaaggaaatcggccagagaataagtgagcacgcggagaagtatgggtacggcatcgaccccttcgtggggcacggcgttgggaggatgttccacagcgagcccatcatatggcatacctacgattacgagcccgggttcatggtcgcaggccagacattcaccatagagccgacgctgtcgatggggagcacgcagtgcgtggtgtgggacgacgggtggacggccgtggcggcggacggcagcctcagcgcgcagttcgagcacaccgtgctggtcaccaccgacggcgcggagatcctgaccgggttcccgtagctgcctgcacgcatcacgtgagcggtgagcctgggtgggccactccgtcggcgagggacggaactgcaggagcatgcatgcagctatgcgcacgctgacaattttattaaaaaatctatgttggacggttgccgt

SEQ ID NO: 34862 - DNA, 741 bp, Zea mays
  Clone ID: UC-ZMFLMO17333B01_FLI
actcagttggctcaagaggtcgccgagaagcactccgcagtagagggcgacttggtggtcaatccgtcggatgaccatttctggtttggccggccaaagatcgtcctgtacctgatccacttcatcctcttccagaacgcgtttgagatcgcattcttcttctggattctgactacctacggtttcaactcctgcatcatggaccacgtccccttcattgtgccgaggctcgttgtcggggccatcatccagctcctctgtagctacagcaccctgcctctgtacgcgattgtcacgcagatggggactttcttcaagaaggagatcttcgatgagcacgtgcagcagagccttctgggctgggcgcagaaggccaagaagaggaaagcgctcaggaacaatggcaatggcagcaatggcgccgcggccgggtcgtcacatccatctgcgactgcgaggctcgaactgatgagacgagctgtcgctcttgaagaaggcagtgccggtggcaacgggagtgaggctagtgcggccgagctacacgacacgggcccgaagctctgaacgctgtagaaaacgcccggcagagcgtcagaagatgcagtgtttctgtacgcgagccatatgtcactatgtcgtgtggctgtttagccaggtggtgtagtgtgatactgcgtatcatgatttgtatgcttttctggattgagcttgaagcgtgttatggagtggggagctttgtgt

SEQ ID NO: 34863 - DNA, 1240 bp, Zea mays
  Clone ID: UC-ZMFLMO17333B08_FLI
gctgctggctgcggctatatacccccctctctctgtctctctatctccttctgttcttagacgtttctccatagcctgagccaaatctagggggcttgcttcatctgctgtccgatcgtggtttggtttctcggggctggcgcggtcaagagcgcacctgaattccaccgaaatccgccacggtagttcttgcctaggtgtgtcgttggtcgttgccttgtgacccttgcggattttcttgtttctttttgagttgcgatctttgcaggttagtctcccccccaatccgtaatcatccggcgtctaggaaactgcagtccagttttcttatttgttcgtctcgtgccttctccccatcctggttagaaagaatatcggaagggggatttttttttttgcctgttcgtagaggaagcagtgaagacataattgttgcatctgataaagctcgggcgaaatacacgcaaatccttggaattttgcatccctttgctggctcttttctgattcagagaacccaatgggggatgtgtccttgaatcgacccgttaaggccgagccaactgccggtggcattgccaagggaaaccgagttctggacacgatgtccgccgggtggacggacgagagacacatgctgtatataagctccatggaggcttcttttgtcgatcagctatacaaccatggaaaccatccgcacgacgcaaatggcgctggcttcaaggttctccgcaggggggtgtgggagtacatcgagtatgagaagaccagtgcccctgtgcgaagtggggctaaatgctgcgtccctgcaaatccttggatccggcatttcaggccacgtgactgcggtagtaacgcacagagtgacgcggtcgaggcctcagtgggcgaccatgagtcgggtactcaggcaagccgcaagagcccttcagtgtctcatggaagggaacggggagcttgtaagggagaaccccagattctacatgaaagtacaggtgactgaacatctttacttagtatctgaacactgtttttttttagtttttactaagcatcgtcacagcccagctacaaagtgtcctaattagttatgcagctagttcttaaaaatcaatgcagttgatccttgatttttttccatggcacgtactgagattgcataaacttcactcatgcatttagcagcagtaacatatctgtagaagagacatgaataacaggacagctcaattactcc

SEQ ID NO: 34864 - DNA, 1289 bp, Zea mays
  Clone ID: UC-ZMFLMO17333C08_FLI
ttggcaggtcactgccgttgccgccgcgatgaagaggtacggactgcagctccgcacgaagccgccatcgtcctcgtcgtcacgcgcgccgccacctcccgcccggcccctggcggccttcgccgacgacgatgacgatgatgtggaggcagaaatcctccgccaggcggccaagaagcgctccctccagaaggttgaggagcagcaaaagaaggccatggaggaggatccctcggtgtacgcctacgacgagctgtacgacgaaatgaaagagaaggaagcccgccctaagatgcaggataaggtcgtccgcgagtcaaagtatattgcacaacttaaggaaaaagcagagctacgcaaacgagaacaagatataatatacgagaggaagcttcagaaagagagaagcaaggaggaccacctttttggggacaaggataaatttgtaacatcagcctacaggaagaaacttgaggagcagcaaaagtggcttgaagaagaaagagtgaggcagcttcgagaagaaaaggaagatgtaactaaaaagaaagacctgagtgatttttactttgggcttgtgaagaatgttgctttcggtgcacagacacatgataacacaaaatctggtcaccctctaaaggctgacaataaacctgaggatacaaatactagtagccttgatgctgaagcctctgaaccttctccaaagcgtagaagagaatccagtatagaatcagagaggactaagagtatggatatggaagagccgtcggcaagtcgaatgagggattcaacagctgctgcatctactgagaaaaatgctgctgatgtttcatcaaatgctaaagagatcccacaaaacattcagccagcaaaggttactgatgatcactacaagagaagtgatggcgcacttgctgctgctagagcgcgagcactggcccgaaagaaagcgaaggaccagcaattgtgaagtacaaggcagaaaagtttaccgatccttgaggtacaatttcatgttttattcaataggatcgtgtaaagatgtcatctgaaatgatctgatagctcccttgcactttaagaagcattttttattgtggttgatgcgtatctatgttgtaaaatgacctcatcagatgccatcttctgccagtaactttggtgttttgacacgtcaactggtttgaacttatatggccgtgcgatagactgttttgcactgtagaatgtaccgagtttgaaatagaaagtgtgatagtgagatatactgctcagaacatttcatg

SEQ ID NO: 34865 - DNA, 2905 bp, Zea mays
  Clone ID: UC-ZMFLMO17333D07_FLI
cagaggccaacgatagttcaggacacggcagacgggaggtgcctcgacgaagtgcatggcaacatagagttcaaggaagtggccttcagctacccttcccgcccggacgtcatgattttccgagacttctccctcttcttccccgccgggaagaccgcggccgtcgtcggaggcagcgggtctgggaagagcacggttgttgctctcattgagcggttctacgatcctaatcaggggcaagttttactcgacaatgtggacatcaagacgctgcaattgaagtggctcagggaccagattggcttggtgaatcaggaacccgcacttttcgcgactacgattcttgagaacattctttatggcaagcctgatgccacaatggcggaggtcgaggctgcggctacttcagctaatgcccatagcttcattgctctccttcctaatggctacaacactcatgtgggagatagggggcttcagctctccggtggtcagaagcaacgcatcgccatcgcccgcgcgatgctgaagaatccgaagctcctgctactagacgaggccaccagcgcactcgacgctggttcggagagcatcgtccaagaagccctcgaccggttgatggtcggcaggaccaccgtcgtggttgcccacaggctatcgaccataaggtgtgtcgacatgatcgcggtgatccagcaaggccaggtcgtggagactggcactcacgacgaactcctcgccaaaggaagctcgggagcgtacgccgcgctcatcaggttccaggagaccgccaggaaccgcgcgtgcccgtcgacccgcaagtccaggtcgtcccgtctgagcaactccctctccacccggtcgctgagcctcaggtcggggagcctgaggaacctgagctactcgtacagcaccggcgccgacggccgcattgagatggtttccaacgccgacaacgaccgcaagtacccggcgccgaggggctacttcttcaagctcctgaaactgaacgcgccggagtggccctacaccatactgggcgctgtcgggtccgtcctgtccgggttcatcggccccacgttcgccattgtgatgagcaacatgatcgaggtgttctactaccggaaccccagcaagatggagagcaagaccagggagtacgtcttcatctacatcggcaccgggctgcatgccgtcgtcgcctacctcgtccagcactacttcttcagcatcatgggcgaaaacctcaccaccagggtgcggaggatgatgctcgcagtgattttgaggaacgatgttgggtggttcgaccaggaggagaacaactcgaaccttgtcgccgctcgcctctccacagacgccgccgatgtgaagtcggccattgccgagcggatatcggtgatcctgcagaacatgacgtccctgctcgtgtccttcgtggtgggcttcatcattgaatggcgggtcgccctcctcatcctcgtcactttccctctcctcgtgctcgccaactttgcccagcaactgtcgatgaagggtttcgcgggcgacacggccaaggcccacgccaagacgagcatgatcgccggggagggcgtgagcaacatccggacggtggcggcgttcaacgcgcaggacaagatcctgtccctcttctgcagcgagctgcgcgtgccgcagatgcacagcctgcgccgcagccagatctccggcgcgctcttcggcctctcccagctctccctgtacgcgtccgaggcgctcatcctgtggttcggcgcgcacctggtccgcacccacgtgtccaccttctccaaggtcatcaaggtgttcgtggtcctggtgatcaccgccaactccgtggccgagaccgtcagcctggcgccggagatcgtgcgcggcggcgagtccatccgctccgtgttctccgtgctcaacagccggacccgcatcgacccggacgacccggacgcggagcaggtggagtcggtgcgcggcgagatcgacttccggcacgtggacttcgcgtacccgacgcggcccgacgtgatggtgttcaaggacctgagcctgaggatccgggccgggcagagccaggcgctggtcggggcgagcgggtccggcaagagcaccgtcatcgccctcgtcgagcgcttctacgacccgctcgccgggaaggtgatgatcgacggcaaggacatccggcgcctgaacctcaagtccctgcgcctcaggatcgggctggtgcagcaggagcccgtgctgttcgccaccagcatcctggagaacatcgcctacggcagggacggcgcgacggaggaggaggtcgtggaggcggccaaggtggccaacgtgcacggcttcgtcagcgcgctccccgacgggtacaggacgcccgtgggcgagcgcggggtgcagctgtccggcggccagaagcagcgcatcgccatcgcgcgtgcggtgctcaaggaccccgccgtgctgctgctggacgaggccaccagcgcgctggacgccgagtccgagtgcgtgctgcaggaggcgctggagcgcatcatgaagggccgcaccgccgtgctggtggcgcaccgcctgtccaccatccgcggcgtcgactccatcgccgtggtgcaggacggccgcgtggtggagcagggcagccacggggacctcgtgtcccgccccgacggcgcatactcgcggctgctgcagctgcagctacaccatggctgatcgtgcgcctggagtagatactggagggcgcgcggccggtgtagatactggagggcggtgttagcgtggcgtggcccaaccgtggccggagaagacgtgttttgatgtgaacgatcaggattgtgccgacaaacaagtgatgcagtattcttcttgcactcctgccggctctgcc

SEQ ID NO: 34866 - DNA, 1115 bp, Zea mays
  Clone ID: UC-ZMFLMO17333F05_FLI
attagctgctgcataattgcctattacatgctcgtgcacagaccgtctggtaatgctaagcctatagcttccaagctagttaaatgcatgggaccgaaatttactaaatttacaactactgtttcatggctgttcctgtattcatttggttgttgtcactatgtctattgtatcagtttcctgtcagaattggatgtgtggctaccaagctatgtaactgtaatgaacatcatttgcagttttgtagacattgtccttatatgaaaacttgctcattctactttgttagctttctgttattgcattcatgtcaaataccacacaagatattgctattatttggaatgaagattcatgccaaatgaaggcttgcccatgagcatctgtacaagattatgcatcttacttacccaactaatttaatgcaatatgagtgaggtcctgtctgggtaggtgggatttggatcctaacacttgtctggaatttctttgtaactttacattggcttaagtgctctgcttgtatgtactcttctgttttataaaatcatcatatcgtggtgtctgtgtaggactgtaggaaagctctgtaatgctccatcaacctttgttgtacacaaccatattaggtttatgtatagtttaggtcaaaccatgcaatttgttttcccaatagtgtcattttcttctctttttttcctgcagatatgctggtgctgtttttgcagatgcatgtttgaagggtctgaatggagttccagacattgtagagtgctcttttgtgcaatcaactgtgacagagttgccattctttgcctctaaggttcggctcggcaagaatggagtggaggaagtgcttggtctgggtgagctcaacgagttcgagaagaaggggctggaaaacctcaagggcgagctcaagtcttccatcgacaagggtatcaagtttgcccacgggaactaggcaccttgcgtccttgcccggcttctaacaattgatgcccccccttgcatttttgtttgactgcctatttttcctgccccccgtatggttggggcaatgaggcgtagtggtcgataataaaacccagcggaacaaagaaaacgtgtaccag

SEQ ID NO: 34867 - DNA, 2660 bp, Zea mays
  Clone ID: UC-ZMFLMO17333G02_FLI
catcaatccaccgcccttctcccatctcttggctcttgcttgcgcactcgtccaaacggtaaaacagcaagcgctaactgatccaaaacatcaaaagcgccgcgcaggcagaagcagcaggtaaagaaccggaagcccaccaggagcgcattcccactcatcagccagcagagctcagatataagctcaccagcactaccccttcccatcctctcccactccctcctccctccccctcgtccagtccactcccattgggcgagaagccgagaaggacagggagggagcgagagctagccaggccgtcccgtccagagccgctatgtccggcggcgcgcccctcctggccctgctgctgctggcggcggcggccatgatcgccccgtcgccggccaatgccgccgtgtcgtacgaccacagggccgtggtcatcaacgggcagcgccgcatcctcatctcggggtccatccactacccgcgcagcacgccggagatgtggccgggcctgctgcagaaggccaaggacggcgggctggacgtggtccagacgtacgtgttctggaacgggcacgagccggtgcgtgggcagtactacttcggcgaccgctacgacctcgtccgcttcgtcaagctcgccaagcaggccggcctctacgtccacctccgcatcgggccctacgtctgcgccgagtggaacttcggcggcttccccgtgtggctcaagtacgtccccggcatcagcttccgcaccgacaacggccccttcaaggcggcgatgcaggcgttcgtggagaagatcgtgtccatgatgaagtcggaggggctcttcgagtggcagggcgggcccatcatcctggcgcaggtggagaacgagtacgggcccatggagtccgtcatgggcgccggcgccaagccctacgccaactgggcagccaagatggccgtcgccaccggcgccggcgtgccctgggtcatgtgcaagcaggacgacgccccggaccccgtgatcaacacctgcaacggcttctactgcgactacttcagccccaactccaacagcaagccgaccatgtggaccgaggcctggacgggctggttcacggcgttcggtggcgcggtgccgcaccggccggtggaggacatggccttcgccgtggcgcgcttcatccagaagggcggctccttcgtcaattactacatgtaccatggaggcaccaacttcgaccgcacctccggtgggccgttcatcgccaccagctacgactacgacgcgccgatcgacgaatacggtctgctgaggcagccgaaatgggggcacctgagggacctgcacaaggccatcaagcaagccgagccggcgctggtctcaggcgacccgactatccagtccctcgggaactacgagaaggcgtacgtgttcaagtcgagcggcggcgcctgcgcggcgttcctgtccaactaccacaccagcgccgcggcgcgggtggtgttcaacgggcggcgctacgacctcccggcctggtccatcagcgtgctgcccgactgcaaggccgccgtgttcaacacggcgacggtgagcgagccgtcggcgccggcgcggatgagccccgcgggcggcttctcgtggcagtcgtacagcgaggccaccaactcgctggacggccgcgccttcaccaaggacgggctggtggagcagctcagcatgacgtgggacaagtcggactacctgtggtacaccacctacgtgaacatcaactcgaacgagcagttcttgaagtccgggcagtggccgcagctgaccatctactctgccggccactccctgcaggtgttcgtcaacggccagtcctacggcgccgtgtatggcggctacgacagccccaagctgacatacagcggctacgtgaagatgtggcaggggagcaacaagatctccatcctcagcgcagcagtcggcctccctaaccagggcacccactacgagacgtggaacgtcggagtgctcggtccggtcacgctgtccggcctcaacgaggggaagcgggacctcagcgaccagaagtggacctaccagatcggcctccacggcgagtcgctgggcgtgcagtccgtcgccggtagctcgtccgtcgagtggggcagcgcggcagggaagcaacccttgacatggcacaaggcctacttcagcgcgccgtccggcgacgcgccggtggccctggacatgggcagcatgggcaagggccaggcgtgggtgaacggccgccacatcgggcggtactggtcgtacaaggcctcctccagcggctgcggcggctgcagctacgcggggacgtacagcgagaccaagtgccagaccggctgcggcgacgtctcccagaggtactaccacgtcccgcgctcctggctcaaccccagcggcaacctgctggtgatgctcgaggagttcggcggcgacctgtccggcgtgaagctggtgaccaggacggcgtgaccaggaatggagaggggagggcatgccgcacgcacacaggatgtgaataatttgctgggaagagaagcgagctgagggcagggcgcgcgcgcgcgcagacacgacacgacacgacaccgattctttcttcctcgtgaagtatctatagatacggcgtacatacggacac

SEQ ID NO: 34868 - DNA, 2251 bp, Zea mays
  Clone ID: UC-ZMFLMO17333G08_FLI
caagtattggattgatgtgcaactgcgttggggagactatgattcacatgacatagaacgttatacaagagccaagttcatggattacacaacagacaatatgtccatatacccatcgccaactggtgtgatgattggaatcgatctagcgtataatttgcactctgcttttggcaactggtttcctggatcaaagccactacttcagcaggcaatgaacaagatcatgaagtcaaatcctgctctgtatgtcctgagggagagaataaggaagggtctgcagttgtactcttctgaacccactgaaccatacctgtcttcacagaactatggagagatattcagcaatcaaatcatatggttcgtggatgatacaaatgtgtatcgagtcactattcacaaaacatttgagggtaacttgaccaccaaaccaattaatggtgctattttcattttcaatccaagaacgggtcaacttttccttaaggttatccacacaagtgtatgggcggggcaaaagcgtcttgggcagctggccaagtggaaaaccgctgaggaggttgctgcattggttcgatctcttcctgtagaagagcagccaaagcaaattattgtgacaaggaagggcatgttggatcccttggaggtccatctacttgacttccctaacattgttattaagggcagcgagctgcagcttcctttccaggcttgcttgaagattgagaagtttggtgatcttatactgaaggcaactgaaccacagatggttctttataatatatatgatgattggttgaaaagtatatcatcatacacagcattctcccgcattgtgcttattctacgtgcacttcatgtgaataatgagaaggcaaagatgttgctcaaacctgacaaaacaattgttactgaaccacatcatatatggccgtctctgaatgatgaacagtggttgaaggttgagtgtgcactaagggacctcatcctttctgattatgcaaagaaaaacaatgttaatacttctgcactgacacaatctgaaatgcgagatatcattcttggcgctgaaattgctccaccatcacagcagaggcaacagattgctgaaattgagaaacagtcaagagagactactcagttaactgctgtaaccacaaggacgacgaatgtgcacggagatgaactaattatcacaaccacaagtccatatgagcaacaagcattcgcatcgaagactgattggcgtgtcagagccatctctgccacaaacttgtatctacgtgtaaatcatatttatgtcaattctgatgatataaaggaaactggctacacttacattatgccaaagaacatattgaagaaattcatatgcatagcagatctgcgtacacaaatcgctggattcttatatgggctgagtccacaggacaatcctcaagtcaaagagattaggtgtatagccatccctccgcagcatggaacacaccagatggtgactctgccatcaaatcttcctgaacatgagttccttaatgatcttgaacccttgggatggatgcatacacagccaaatgaagctccacagctatcaccacaggacctgacatcacatgccaagattctggagaacaacaaacaatgggatggtgagaagtgcatcattctgacatgcagcttcaccccaggatcttgctcgctgactgcttacaagctgacaccaagtggttatgagtggggacgcagcaacaaggacaacggaagcaacccacatggatacctcccaactcattacgagaaggtccagatgcttctgagcgaccgcttccttggtttctacatgattccggataacaccccttggaacttcaacttcatgggagtgaagcacgacccacagatgaagtacaacatgaagctgggcatgccccgggacttctatcacgaggaccacaggccgacacacttccttgagttcagcaacatcgaggagggagaggtcgctgaaggtgatagggaggacacattcacgtagggcgctgggcgcctgttttagaaactgtatctcaaacgcactttagctctgttctgaatggcaatgtgtgaaagctgtaacctgactcgactggtgtcatctgttttttggcttaatcctgtatcataccttgttgtaagacagccctggagaggggtaaaaattgtacaagtgcacgccatggcaacagtaaagattttacttagtagctatgct

SEQ ID NO: 34869 - DNA, 4072 bp, Zea mays
  Clone ID: UC-ZMFLMO17333G09_FLI
ctggtgagggcaaagtagctgtatattacctcgccaggatttcggacccttctgatttacctcatgctactgtgtctaccaatgaggactatggtgaaaaacatatttcacctgcaactatatctaaaaggagttgactccaagtgttgcaggctcagtatataagagtactctcacagaacatggtgctgagccatctagtgcgcaaacaggtagcaaccagcaggaatcaataaatgtgaaaaacagtagctcagcttcaaaagaacaggaaacaactgacaattcattgtttatctcttccaataagaagcccttagacaccaagcaagtgaatgtgactggtccacctgcagccttgcgtagcttagcgttaacaggaaacacaaaacctacaatattttccagcttttctactgaaggcatgaatccaacaggaggcaatgcacctaatgaattagcttcttccttgcaaccaagcagcagaagttttggaaacaaccaaactggtaaagaaggcctggattcagttcaatcagtgggaatatttggtggatctcaaaactccaataaagatggtgatgtctatggtttcaagtcttcattattcacctctagtggatctgtccctgccaagatcggagaaaggaatgaggttggttttggagttccttcgctgcaaaccagctacaccgctgatagaaaagtttttggtgcttcagttgccttaagctctgtaccttcatcatctatatctccggctaaaccttccccaattggatcttcaagtggatttcggacagcaaactctgaagcacctcaatcattgcgtggatcacctccgtcacagcaatctatgggcaaatcacataacagcaggacacaagcaccggcagaatattctagaaactccaagaagggcacaggattcgattctgaacaagacttgtctaaaaaattttacagtataaatgaaatgacgaaggagttagatgccctactagcatatatagaaaaggatggtggttttagagatgcctgcataaccatccagcagcgtcctctttctatgtttgaggatggcttacaaaactttttgcagctgttgcaggtcttcaagggcaaagtagaggagcaatgttcaaaaattgaagatctgaggaacaacatgtttcaagtttctgctaggcaaacttacatgaaaggaattgttagccagtcttcagataatcagtactgggatatatggaaccgtcagaaattgagtccagaatttgaagtaaagagacaaaatattctcagagctaaccaggatttgacaaatcagctggttgagctggagaggcacttcaataatctggagatgaacagatccagtgaaacaggaagagtggcttctaatcgaagagctgtttattctaataagacaagttcgagtcagacacaattatccagtgtatatagtgcactgaactcgcagttggcagctgctgagcagctatctgaatgcctttcaaagcagatatctgtgttaaatattggttctcctagtaggaagcaggggatggtgaccaaaaagttgtttgagtcaattgatttagcccacacaactgatgcaaccaaattttcaggcagcactcctaagccagttaagcggtttccatcagtgaatgagcattcaaagggaatattagggtcttccaagggtggtgagcctgagactgctcgaaggaggagggaatcactggatatgagcctggctagtttggaacctcagaaaacaactgttaaaagaataacacagcaacaacgcctcaagatcaacagtgatctaccattcaggtcaaacaagaaaatatttgattctcaaatggcagcaatatcacaggaaaagtcaagcgatagctccaattcatctatagtagaatcatatgtaagcagactgcgttctctgagtgaagatgtaaacgataaactgtcaggaccccaacagaaccctttgttcaaatgggtaaaggaatcaactgggtcatctcaaacctcagagcaaaagcatttcgagttaccagggcaaatgaaaagtactgcacagtcttcaaaactgacaccatcttcaccaccatcattcagttacacacgtatgggtgcacaagatagtatcaacccatccagcgttccatccttcggaacaaaacatactgtgtctaagccaaatactctaaccttcaaaaccactataagccctaaaagtaatgccaacacagagccaaatatattaccttctataacagctccaaaaacttctctaagtccactgtctgtaaaaactgctggggagtctggagatttgcctacattaaccatgaagaacagacaggatggtcagtcaatgccatctttggggaacataaaaggaccgggtgcttctctgcagaacaagggtggcatatttagagatctcgacaaatcgtcttttaattctgaacattccaagcctgctgcattacatgagaagactgaccagctaagtggggttggcgatgctgtgcagaacactgtgaaagatatctccaaaatggcacctcaaccttctgcattcttgccagctcctgttactcagaccaattcatactccttaaggccgactgtttcttcttcagccacatcaggtgcgaaaacttcggatgttttatctagttcaatgcagaaagtttctccaatagtacctgggggtactgtgtctagctcagtccctactcctgctaaggattcatcaactggattgagtcaaaatgcttccaaacctgaaacgctaatatcaaaggtaactagtaccatagtttctgcaagttcgacttctgtcatatcagtcactgaaagcaaaccttcagtgcctccaacaactggcgccagcttgccttctactcatgtctctgctcctcaaacagcaccaacaacatcggaatcagttttcacttccacaggaaaaaatgtaggaccaaacactgacaccatctcaaccgatgaagatgacatggaagaggaggcaccttctgcaagtgccgaactaaacttgggagcccttggtggattcggccttgggtcccagccttcttcaagtcctcaaaagtctaatccttttggtgcctcctttggtacatctggcaataaaagttcaggcacaccatttactttgacaaccagtccaggacagcttttccggccagcgtcgctaagcattccttcagctcagccagcccaaccatctcaatcaactagttctagttctttttctaattcgttctcaagtgggcttactggatttggacagcctgcacaaattggatctggccagcagtcagcttttgggaagcctgcacagattggagctggtcagcatgcaggatttgggcagactgcccaaattcgacctggttttggccagcctgcccaaattcaatctggttttggccagtcagcacaaatcggaactgggcaacagtcaggatttgggaagcctgcacaaattggggctgtccagtcaggatttgggcagcctgcacagtttgctgctcaacagacacttggatcagtgctgggttcttttggacaacctccccagttaggaggcataggttctggaggatttggtggattttcaagtgcttctacatctgctggttttagttctttatcttcaggtggtggttttgctgctgctgctactggtggaggttttgctgctcttgcttccaaaagtggaggttttgttggtgcagcttcatctggtggtggttttggaggtgcctcccagggaggtggctttggcagtggtggtggtggattcggatcctttggtggtaatcaaggagctgggttctcggcatttggagcaagtggggctggaagaccggcagctgatttcttgacgcagatgagaaggtaggctccaggcaaatccccagacaggtttacgcattagctatagcatacacatgaggcgagttacttttatgttccactcttaagcgttgtttcggcacaggagctgtagcataaacatgaccgcagt

SEQ ID NO: 34870 - DNA, 1639 bp, Zea mays
  Clone ID: UC-ZMFLMO17333H01_FLI
ctcttctcctccctcctgccgggtccttaataaagagcagcagcgcaagaggttggtagagcgagcgagaagaaggcaatggcggcggagagcttcctgttcacctcggagtccgtgaacgaggggcacccagacaagctgtgcgaccaggtgtcggacgcggtgctggacgcctgcctggcgcaggaccccgacagcaaggtggcctgcgagacctgcaccaagacgaacatggtgatggtgttcggcgagatcaccaccaaggcgagcgtggactacgagaagatcgtgcgcgacacctgccgcgagatcgggttcacctccgacgacgtggggctcgacgccgaccgctgcaaggtgctggtgaacatcgagcagcagtcccccgacatcgcgcagggcgtgcacgggcacttcacgaagcggcccgaggagatcggcgccggcgaccagggccacatgttcgggtacgccaccgacgagacccccgagctgatgccgctgagccacgtgctggccaccaagctcggcgcgcgcctgacggaggtccgcaaggacggcacctgcgcctggctcaggcccgacggcaagacccaggtgacggtggagtacgtgaacgagggcggcgccatggtgcccgtccgcgtgcacaccgtgctcatctccacccagcacgacgagaccgtcaccaacgacgagatcgccgccgacctcaaggagcacgtcatcaagcccgtcatcccggagaggtacctggacgagaagaccatcttccacctcaacccgtcggggcgcttcgtcatcggcgggccccacggggacgccggcctcaccggccgcaagatcatcatcgacacctacggcggctggggagcccacggcgggggcgccttctccggcaaggaccccaccaaggtggaccgcagcggggcctacgtcgccaggcaggccgccaagagcatcgtggccagcggcctcgcccgccgctgcctcgtgcaggtgtcctacgccatcggcgtgccggagcccctgtccgtgttcgtcgactcctacggcaccgggaccatccccgacaaggagatcctaaagatcgtcaaggagaacttcgacttcaggccagggatggtcaccatcaacctcgacctcaagaagggcggcaacaggttcatcaagaccgccgcatacggccactttggccgtgacgacgccgacttcacctgggaggtggtcaagcccctaaagaaggcatccgcttaagaatgtattgggaagttcactggacatgaggttcatcttcgtctggctctgctgatacctgcaaggattgctgctgctgctgccgcccctggatgtgtgtttgatcagtgactggctgctctgctccatagaagatgaatgaagagagagatggtgaagaaggctttggcaaatggcaattgccgcagcaagccatgtcggcgccactgaccggcttagtgattggtataatttggtgtggcagcagccaggattaatgcgctggtcttttatctttactactagtttggtctcgtccggtatcttatttttctttccccttttcgagtctgtactgaaactgctgagagatttgcagttttgatctatcatatcctttggt

SEQ ID NO: 34871 - DNA, 1388 bp, Zea mays
  Clone ID: UC-ZMFLMO17333H09_FLI
ctcagctggcatcgccatcgacggcgtgccgccatagacggcctgacaccccccccgctcccgcccccgcccccgccctattaatcccttcatcatcccaattcccacaaacctcgcgcgcggcggagggagaaggaaggatggcgtcggagccggtggcgcgggcagtggcggaggaggtggcgcgctggggcgcgatgcgccagaccggggtcagcctgcgctacatgatggagttcggggcgcgccccacggagcggaccctccttctcgccgcgcagttcctgcacaaggagctccccatccgcatcgcgcgacgggcgctcgacctcgactcgctccccttcggcctctccaccaagcccgccatcctcaaggtgaaagattggtatgtggagtcattccgtgaaatccggtcctttccagaggtgaggaaccagaaagatgagctcgccttcacccagatgatcaaaatgatcagggtacgacacaccaatgtggtgcctgcgattgcattgggtgtgcagcagctgaagaaggacttgggcggtccaaaggcgttcccccctggaatccatgagatccatcagtttcttgaccgcttctacatgtcaaggattgggatccggatgctgatagggcagcacgtcgctttgcatgaccctgatccagagcctggtgtgatagggcttataaacacaaaaatgtcacccatgacagttgctcgaattgctagtgaagatgcacgtgctatttgcatgcgagagtatggatcatctcctgatgtcgacatatatggtgatccaggttttacatttccatatgttacaccacatctacatctcatgattttcgagctggtgaagaactcccttcgcgcggtacaggaacggtatatggattctgataagcttgcacctccagttcgaatcatagttgctgatggagcagaggatgtaactattaagattagtgatgaaggtggtggaataccaaggagtgggctctcaagaatttttacgtatctctatagtacagcagaaaaccctcctgatctggatggacataatgaaggagtaactatggctggatatggttatgggatccctattagtcgcctttatgctcgatatttcggtggggacttgcagatcatctctatggaaggatatggaactgatgcttacctccacctttcacgcctgggagattcggaggaacccttgccgtaatttattcaaaagaaacattcctgtaattaggatattgcttctgtgctggtatgcaagtatagttctgaaggccagccacctgttcagctgttggtgtccctacttgttgtctttattgttcattcatcatctcaatggaatgtgatcgtaattcat

SEQ ID NO: 34872 - DNA, 926 bp, Zea mays
  Clone ID: UC-ZMFLMO17334A01_FLI
ctctcatctcccccgtcctctttgctgcaacacctcctacccacccgacagaaatatcctaagcgccgacccgaatacccgattcgctcctcgtccggtcgattcctgctcctaatcgctcgaatcgagtccttgccccgtgttccgtgccacaatctgggcgcttggctcccgcgagccggggttcttgggcctgggcggaggccatggacaagccggtggcgccgggcattatcaaggaggagctcctggagcagcagccgccgacgcaggacggtgtgggtggcggcggggatgcgccgcgcccgatggaggggctgcacgaggtgggtcccccgcctttcctcaccaagacgttcgaccttgtggaggacccggccaccgacgccgtcctctcctggagccgcgccggcaacagcttcatcgtctgggacccgcacgtcttcgccgacgggctgctcccgcgcctcttcaagcacagtaacttctccagcttcgtgcgccagctcaacacctatggcttcagaaaggttgatcctgacaggtgggagtttgcaaatgaaggtttcctcagaggtcaaaggcacctgctgaagatgataaagagaaggaagccaccatcagctgtggcaccattgcgacagcaacgtgcccctgcttcttgcctggaggttggtgagtttggatttgaggaggagattgataggctgaagcgtgacaagaacattttaatcacagaagtagtaaaactaaggcaggagcagcaaagtactaaagatcatgtgagagccatggaggaaaggctacgagtggctgaacagaagcaggtacagatgatggggttcttggcaagagcaatgcggaacccagagttcttccagcagttggcccagcagcaagacaagaggaaggagctcgaggatacc

SEQ ID NO: 34873 - DNA, 669 bp, Zea mays
  Clone ID: UC-ZMFLMO17334A08_FLI
caaggaagagccatggcgagcgagcacgcggcggggggcgaggctaagcatgaccagaagcagagcctgatggacaaggcgaaggggttcgttgtggagaagatcgcgcacatccccaagcccgaggcgacgctggacggcgtgacgttcaagggcctgagccgggagtgcatcacgctgcacagcagcgtgaacgtgtccaacccctacgaccaccgcctccccatctgcgaggtgacctacacgctccggtgcgccggcaaggaggtggcgtccggcaccatgccggaccccggctggatcgccgccagcggctccaccgcgctggagatccccgccaaggtgccctacgacttcctcgtctccctcgtcagggacgtcggccgggactgggacatcgactacgagctccaggtcgggctcaccgtcgacctccccatcgtcggcaacttcaccatcccgctctccacctccggcgagttcaagctccccaccctcaaggacttgttctgatctagtagtagctcgcttgccttgtgttctgtgcgggcgcgcaccagcgatctgtacgacgaccttttgcaaataaacgacgcagctcctctgttctatatatctaaggggatggatggtttaatttgactgcaaataaagagctggatttcattc

SEQ ID NO: 34874 - DNA, 1494 bp, Zea mays
  Clone ID: UC-ZMFLMO17334D11_FLI
gtgcatctttagaagaggagaaagagtcacttaaagctaaaatatcgaagctgcaaagcaacctaagaatgggccttgaaattgaacaacatttgcaaagaaatgcacgaatattagagaaaagacaggcactgtatgatggattcctgagaaatggattgtccgaacttcaaaagttctacacatgtcaaaaggctgaaattatgaaaatattggaagaagaatcgttgcggttgatgaaagttgttgcagagattcaggataaactaactgaaatttgtatcaacactgaagttagtgaccaccctgccgatgagattcaatgttgtgacagcagttgtaaagatgtgcatgttactaaagatatcagtcctagcacatgtcgtaagagtgattatcctgctgatcttaactccgtgtcgtttgatgaatctaaagcacttgcacaagccttacaggagaagatggaagcacttatgctcttctcacaggaacaagaaagatacctattagagaaacagagagacctgattgttatcgaggaactccagaagaacttatctcaagttaaagatgaaaaggtgaaggtcctgatggaattaacaaaactaaaagaacaatatttgctattgaagggctctgctgtcaaggaaggtcatgatactggtgattcatctaaactcattcctgggcatgaccaacaagggatgctgaagactatgctgaagaggacatctttaagacactggatgaggaaagaaagtaatactattggacatgggagctctgatggaaatgatcatacagtttgcaaagaacattcagtggatgttgcaagattaagagttgaaaatgctatgcttcttgaaggtgttggtactgttgagcatctcacttcttcagtgcatagactgcatattgtgcttttgaaggcttatgatgatatcaagtcagctgatcctttggagagtacctttgaagcgctcaacagtcttataactgaagcaaaccttatgaagacagctcttaatgtggttcttcctgtaagctggtccggggattcatcagatgcaattaaatatgaagctatgtgcgatccatctgattcacctaaatcgaagtctgggaaagtagacccgctctcttctgcaggcatggagatggtggagctactaatattggctgctgagattctcaaggagagctttctggtgaagaaataaggcctccatgtaaggacgagtatggctctccttgtttgtttagaagcatgcaatttaatccttaatttttttgggtgtatatacttaaactgattgctaaaagtgcactactagattatttcggatgtagagaaagagccgaatgtgcactgtaatttacggttcgctgctattgatgtgtcttgtgttggtagactaaaggatttaagagccatgtgtacaaaattcagtttacaagcaaagatcaaaggtggatggatgtttgatatgc

SEQ ID NO: 34875 - DNA, 1105 bp, Zea mays
  Clone ID: UC-ZMFLMO17334E01_FLI
gcgtacaacaccgtcttcctcggcgagttcatgcagcccgattgggacatgttccatagcttgcatccggcggcagagtaccacggcgcggcgagggccatcggtggctgcccgatatacgtcagcgacaagccggggaaccacaacttcgagctgctcaggaagctcgtgctccccgacggctccgtgctacgcgcgcagcttcccggccggcccacacgcgactgcctcttctccgacccggcgcgcgacggcgagagtttgctcaagatttggaacctgaacaagtgcggtggcgtggtgggtgtgttcaactgccagggagccgggtggtgccgcgtgaccaagcggacgcgcgtgcacgacgcgtcgccgggcacgctgaccggcaccgtgcgtgccgacgacgtcgacgccatagcgcgcgtcgctggtgacggcggcgggtgggacggcgagaccgtggtgtatgcgcaccgcacgcgggagctagtgcgactgccccggggcgtcgcgctgcctgtgacgctaggcccgctccagtatgaggtgttccatgtgtgcccgctccgcgccgtcgtgccggggttctcgttcgcgcccgtcgggctgctcgatatgttcaacgctgggggcgccgttgaggagtgcgacgtgatcagcaatgtcggcggcaaggccatggctctcagggttcgcgggtgcggtcggttcggcgcttactgctcgcgggagccggcgaggtgtctattggactcggcggaagtggagttcagctacgatgccgacaccggcctcgtgtccgtcgacctgcccgtgccggagcaggagctatatcggtggacgctggagattatggtctaggccgtgacgctgtgcgctgacgccattctgagccggacgacattgtcatttgctatgtgcacgagagatagatgtattgtggtgttgttgtataattggtatggagagagtatgcttttgttatgtctgtatctgcataccctgcgtgctttgaatgttatataatacttgatagataataaaggatggtgttcctgaatgttatataatacttgataataaaggatggtgctcttttaat

SEQ ID NO: 34876 - DNA, 1843 bp, Zea mays
  Clone ID: UC-ZMFLMO17334G01_FLI
gacgtacgagctctccggggtgagcacgccgggcaacgtgccggggagctacagggagcctgccatcggctggatgaccggattcctcctcgccgtcagcttcgtggggctcctcaccttgcttccactcagaaaggtgctcgtcatcgactacaaactcacttatccaagtgggactgccaccgcggttctcataaacgggttccacacacctcaaggagataagaatgcaaaaattcaggtccgtggattcctcaagtacttcgggatcagcttcctgtggagcttcttccagtggttctacaccgccggcgaccactgcggattcgcccagttccctactttcgggctccaggcttttaaccagacgttttccttcgacttcagcctgacgtacgttggtgctgggatgatctgctcgcacctcgtcaacctctcgttgctgttcggtgccgtcgtttcctggggcgtcatgtggccactcatcggcaagcagaagggcaactggtatccggcagacgcatctcagaatagcatgacaggcatctacgggtacaaggccttcctttgcattgcccttctcgtgggagacggcctctacaacttcgtcaaagtcatagctatcactgtcaagaacatacgcgagagatcacgtcgcaagaacctgaacagagtggcggacgcggacacgatggcgctggacgacatgcagcgcgacgaggtgttcaacagggacaacatcccgacgtggctgtcctacgcggggtacgccgcgctgagcctgatcgcggtgatcgccatcccgatcatgttccgggaggtgaggtggtactacgtggtggtggcgtacgcgctggcgccggcgctggggttctgcaacgcgtacgggaccgggctgacggacatgaacatggggtacaactacgggaagatcgcgctgttcgtgctggcggcgtgggcggggaaggacagcggcgtggtggccgggctggtggggtgcgggctggtgaagcagctggtgctcgtgtcggccgacctgatgcacgacttcaagacggggcacctgacgctgacgtcgccgcggtcgatgctggtggggcaggccgtgggcacgctgatggggtgcgtcctggcgccgctcaccttcatgctcttctacagggcgttcgacgtgggcgagccggacgggtactggaaggccccctacgcgctcatctaccgcaacatggccatcctcggcgtggagggcttctcggcgctgcccaggcactgcctgcagctgtgcgcggggttcttcgcgttcgcggtgctggcgaacctggcgcgggacctgctgccgcgccggctcgctcggctcgtgccgctgcccatggccatggccgtgccgttcctcgtgggcgccagcttcgccgtggacatgtgcgtggggagcctcgtggtgttcgcgtggcacaagctcgacggcaagaaggccgcgctgctggtgccggccgtcgcctcggggctcatctgcggcgacgggatctggacgttcccgtcgtcgctgctcgcgctggccaaggtcaagccgcccatctgcatgaagttcacgccagggagctagagagcacggtgacgatgcgtacagaacagagggcatcgttcgtcgtttgtggggtggaatccgtgtagtagaattacataccaatcaggcctgttctaatgtccatatgagcttaatgtacggtgtatatatatgtaaaaatggaaatctgaaggatgacaggatgaattgcctgttgtctagtagcacgcatattattattattatagcagagcactaataaaactctttatcttacac

SEQ ID NO: 34877 - DNA, 1562 bp, Zea mays
  Clone ID: UC-ZMFLMO17334H10_FLI
acgtgttcaagtcgagcggcggcgcctgcgcggcgttcctgtccaactaccacaccagcgccgcggcgcgggtggtgttcaacgggcggcgctacgacctcccggcctggtccatcagcgtgctgcccgactgcaaggccgccgtgttcaacacggcgacggtgagcgagccgtcggcgccggcgcggatgagccccgcgggcggcttctcgtggcagtcgtacagcgaggccaccaactcgctggacggccgcgccttcaccaaggacgggctggtggagcagctcagcatgacgtgggacaagtcggactacctgtggtacaccacctacgtgaacatcaactcgaacgagcagttcttgaagtccgggcagtggccgcagctgaccatctactctgccggccactccctgcaggtgttcgtcaacggccagtcctacggcgccgtgtatggcggctacgacagccccaagctgacatacagcggctacgtgaagatgtggcaggggagcaacaagatctccatcctcagcgcagcagtcggcctccctaaccagggcacccactacgagacgtggaacgtcggagtgctcggtccggtcacgctgtccggcctcaacgaggggaagcgggacctcagcgaccagaagtggacctaccagatcggcctccacggcgagtcgctgggcgtgcagtccgtcgccggtagctcgtccgtcgagtggggcagcgcggcagggaagcaacccttgacatggcacaaggcctacttcagcgcgccgtccggcgacgcgccggtggccctggacatgggcagcatgggcaagggccaggcgtgggtgaacggccgccacatcgggcggtactggtcgtacaaggcctcctccagcggctgcggcggctgcagctacgcggggacgtacagcgagaccaagtgccagaccggctgcggcgacgtctcccagaggtactaccacgtcccgcgctcctggctcaaccccagcggcaacctgctggtgatgctcgaggagttcggcggcgacctgtccggcgtgaagctggtgaccaggacggcgtgaccaggaatggagaggggagggcatgccgcacgcacacaggatgtgaataatttgctgggaagagaagcgagctgagggcagggcgcgcgcgcgcgcagacacgacacgacacgacaccgattctttcttcctcgtgaagtatctatagatacggcgtacatacggacacaatttgtgcccactatacgtacgtacaaaaaagattagtactagagtttaccgtagatctgttcttggagttggccgacgccggcacggctgcaggaactgcggctcacggccggctggtaatggtactagtagcgtggtttttgctctgcactccgcatgaatctcacggcgcacgcaggcttaattttcttagcgcaaatttgcgaaactgagttgtaaatgaggttatttattcctacgattaagtatgatacaagacgaataattattatgtgagttctttttacggtggttggtgaagccttttctctt

SEQ ID NO: 34878 - DNA, 986 bp, Zea mays
  Clone ID: UC-ZMFLMO17335A04_FLI
gcaaaatagctgtggcctgtagcttctttcattgtttcaaagcattacaacataagcagcaaaaccagaaacagtcctcataagcaccacttattagggcagtacaacacaaacgataagcgcggtgcagatcaagaaagaaccacaacatgtagaagccatataaaagcatgattaagcacagcagaccaccaaaagctcgggactacgatcccaagacggaccgcgacggcacggaggccgtcgagcgggagtgcgaggtcggcccggccgccgccgccggcgggatgtcgctgcacgccgacctgctcggcgaccccgtcgcgcgcatccgccactcgccgcactacctcatgctggtagctgagacgtccgggccggacggccggatcgtcgccctcgtccggggaaccgtcaagtctgtcgcctccggcaagagccgccctggcgcgcccgccttcgccagagtcggctacattcttggcctccgcgtcgcgccttcccacaggcggatgggcatcgcgcggcagctggtgcatcggctggagcagtggttcgagctgatgggcgccgagtacgcgtacatggccaccgacaggtccaacgaggcgtcgctgcggctcttcaccggccgctgcggctactccaagttccggacgccgtcgctgctggtgcacccggtgcactcgcaccgcctcagggcgccgcgccgcgccacggtggtccgcctcggcgcccgcgacgccgagcggctgtaccgcagccggctcgcgcacgtcgagttcttccccgccgacatcggcgccgtcctgggcaacgcgctctcccgcggcacgttcctggccaccgtgggcggctacgagtggggcggcgtcgaccgcttcctggcgtgcccgccggcgtcgtgggccgtggccagcgcgtgggactgcggcggcgtgttccggctccaggtgcgcggcgcgtcgcgcctgcgccgcgccgcc

SEQ ID NO: 34879 - DNA, 1313 bp, Zea mays
  Clone ID: UC-ZMFLMO17335A07_FLI
aaatgggtgttgtgtcatgttgcagctcgcttatcaggaagcgagtcaaaagctgttcaggagcttgatgcagctacttccaaagaagatggaccagtagcatcatcccttaatcgaaccaagcgttggcttctctctcactcccaacatctcaacttcttctctatcttgattcttgcttcggttggtctcctgtcttccatcctctgttaccaagttcttcagtgtggatattttacacctgtaatttatgatatttggctttgtgtcttcacaattgatcttttttgcacctttggatcatgtgcaagctttagctccacatttaaaagctgtctagataaaatgacaccaacaaataagcgtatggaacattccctatacatcagttgccataagtttctctaaaggatttttattctatttttaaaaataattgcctaattttaatgctcttattaggttccaaatccactctttgaccttgctggtattatgtgtgggcaatttggtgtgcctttctgggagttcttgtttgctactttgattgggaaagccatcatcaagactcatattcagacactatttatcgtgtccctgtgcaacaatcagctcttgtatcttattgaaaaggagttaatctggatatttggtcacgttcctgggttttctgccacccttccgtctgtgattgccagactccatgctgccaaggacaagtatctatcaccaccagccccagtctcaccgtcatcacaaatgggggagaaacagtggaatttctcttttacatctgtctggaactctatagtgtggcttgtgcttttgaacttcttcattaagatagtcacgtcaacagcacaggattatctcaaaaagcagcaggatacggagatggaacttatttcggattccccgatccaggaccattctaaaactaactagtggcgcagctagtggtgtttatacacagctgctagcagcaaagattctcctctgtagcttaagctcctgcagatgatttcaagttccaacaattagtattagtagttattcatctgcgcagtggacaaaaacatggacacatggtcttggttaacttgtcagttgacgaccttttgtcattgagcctgtacctgtactggcagctcctggtggagtcattctgtttatttttcggacatctacacggataaacagtaggaattgtttatggagcacggttggctttgtgagatgtatcattcatacatgttcctatgtattctgggaacttgaaatgcaatagaaacctgggaggatttaacaaggat

SEQ ID NO: 34880 - DNA, 731 bp, Zea mays
  Clone ID: UC-ZMFLMO17335B05_FLI
tacagttactgcttcacacttcggctctacaacggtgattggcactcagatcctttgggtgcttgcactgtcgccctgtcgatgtcgaaagtcatgggccaggatgctaaacctgagactgtacctgaagcactcgcagcctgcatcgaggagacatgctcaccagcttacaggcatactggtggtttcaggtttgctattggactcgtggacgatatcatcgccattctctccttgggacagaacgcacttatttgtgccttatgcgacttccatcgactcattgaagttggtaagagcatgctcaaggtggagaaagtgggcaagacggagagggcacagaactctccgaagcttcgtagtgcagctaggaagctattcttcatgacttgttgggtccatgagcagccagatgaggcgtggccatctttagctcacatcgtccaggtgcagaaagcatctatggaggagttggagaccgggaattggaaggcggatagaaagagcaaaccacaatccgcggttcttatcgaggagctgtaggcatatggatgtaccactggaaattggatcgcgaggctatgtacccttgtgtatcgctcaggatgaatccaacgagagaccgtccttgtaatgcagttagttgcttctgtgtacacttttttttgaaaaaaattgtatttgtatacgagtttgaaatcctagttgaagcgatcctgctttactttgct

SEQ ID NO: 34881 - DNA, 3148 bp, Zea mays
  Clone ID: UC-ZMFLMO17335E03_FLI
ggttgatgaagaacttaaaaaaacttgaaacagcttattttctaacaaggtccaagttggcgaagcaagttggcaaccagataaatagttgtaatcgagttgttaagaggactactggttcagctgttgggacagaagcaagttcaatagatgatttttctttggaaaggcaatatggtagaaggcaaagaggttgggtgaactcttttcttgagggattgtgcaagtacttgtcattcagtaagttgaaagttcgggcagaattgaagcattgtgattcactgaactcatcaaacttagtatgctccgtagggtttgaccgagatagagagttttttgcaactgctggtgtaaataagaagataaaagtgtttgagtataatatgattgtaaatgaacaccgtgatattcactatcctgtggtagagatgtctaatagatcaaaactgagttgtatttcctggaacagttatatgaagagccatatagcatctagtgattttgagggtatagtgcaggtttgggatgttactaggagtcaagtttttgttgagatgagggagcatgagcgacgtgtgtggtcggtggacttctcaattgtggacccaacaaaattggtcagtgggagtgatgatggatctgtgaagctgtgggatatgaatcaggcaattttattcttgcacctactgctgggagtattggcactattaaaacaagggcaaatgtgtgttctgtgcaatttcaacctgatactgctcgctccattgccatcggctctgcagaccacaaaatttactgctatgatctacgtcacatacgagctccttattgtacactagttgggcacacaaagactgtaagctatgttaagtatctggatgcatcgacaatagtatctgcatctactgacaactcattgaagctttgggacttatcgatgagtccaggaaggataattgacagtccagttcaaacatttaaggggcatacaaatacaaaggttggataaaacttccacatgtacttgttctcttttcataatattcgtctacaagtggttagtgtctggttttatcttttgtaagtgtaactagtagaatgtctgatgaaaagaatatggtagtttaattttgaaagttgtactgttgcaatgaaacactagggtacggttggttacttcacttgctttgctcaccttgtctcgtccagcaaggtgagctttgccagcatgggcgagccaatcttgctctcctccaccaacaagcaaaaatcttgccagcacaagccccaaagcgaactcaccaaggaaacaaacgctagttctatcttgatttatgtctgagcaaggaaatgaagtctggctggagaaccaaacacactctactctaatactgtatatgtatggattatcctactgtgacaattatcggtgctatcctttatacaactatagtgccttttacaactgtatctgatcgatttgtgaggttatgaacaaatcatcaacattggtgatccagatgttcttttcctttttttctcatcaacatcagtgtgcaaaggaagtgttttaaatcccactgcaccacttattttttagatatttagttgcttgacaaccataaattggttcacttggtgtgtttcctgcgatcctatagcatatttacatcatggtttgtagttcgttcagtcaattgatttcatgaaatattttagtgtctcagttgttcatagttgaagggtaggcttggtgcagtggtgagagttgtctcactgagccaccacgtcgcaaattcaaagcatttgcgggggaaggcttgtctcgttttatgtgggagcctccgacactgagtctgtccttcattttatgtgggagcctccggcactgagcctgcccttttattagttgagttcataattaactctcacgaaggacacggctagggctttttttaggtgagttcataaacccttttatcagtttagttcataattaactcccacaaacgacagggctgtggcttttttagttgagttcataattatctctcacagaagttgagttcataaacccttttatcagtttagttcataattaactcccacaaactacgtggctgggtttttgtagttgagttcataatttactctcacaaaggacatgtttgagacagtgatgagaaacctttccactggaaaaaagttcataattaactctcacaaaagataggtttaggacaattgtgagaagcctttccactgagccaaagcttctgggttcaactaggtccaccctttttttcgttgagttcataattaactctcacgaagaacaggcctgggcagtggtgagaagtctttccacggagccaaaggtcctgggttagatgtagcttctaagaaaaaatgcacgggtaagagttgcctcggttattccttcattttccatcatgtgggagccatcaacactgggtcttttccataattagtctcacgtgtatacagtggttacccttcagctgttactttctgcgctgaaaggcacacgttttcattgagtggctgatttacttatttggtaaacatcttccagaacttcgttggcctttccatatctgatggttacattgctactggctctgaaacaaatgaggtttttgtgtaccacaaagaatttcccatgccagtgttggcctataaattcagcgtgacggaccctatatcagggcaggagattgatgaccagtcacagttcatttcatgcgtctgttggagagggcagtcttcaaccctactttctgcaaactccagcggcaacattaagatcttagaaatggactgaggattggagttaggcatctgctgagtctcagctataaatggactgacttcttaccaagttttgtgcgtgtgtggcttcaaaatttgtggcgacggagttgccaacggtgcgtggtgcagagttgggagaggtaggagtagctgtaacaggtttagcatggtttgatatgattaaattagcgtggtagcaaaagtagcataaataggaaacaaaattgaggtgtggggtagtactgcaaggaaaggttttgtacatcattggttcgaggtatacttgtacagccaatcaatccagtttttactt

SEQ ID NO: 34882 - DNA, 1125 bp, Zea mays
  Clone ID: UC-ZMFLMO17335F04_FLI
gatgattctctcataaacatgcagatagagggtggtgccgaaggcgtaatagttggaggaacaacaggagagggtcacctcatgagctgggacgaacatatcatgctcattgggcacacagtgaactgctttggctctagaatcaaagtgataggcaacacaggaagcaactcaaccagagaagccgtccacgcaacagaacagggatttgctgttggcatgcatgcggctctccacatcaatccttactacgggaagacctcagctgaaggaatgatctctcatttcgaggctgtcctcccgatgggtccgaccatcatctacaacgtgccatccaggagcgcccaggacatcccccctgaagttattctagcgatttctggctacacaaacatggcgggtgtcaaggaatgtgttgggcacgagagggttaagcactacgctgacaaaggcataacaatttggagcggtaacgacgacgagtgccacgattctaagtggaaacatggcgctactggggtcatttccgttaccagcaaccttgttcccgggctcatgcacagcctcatgtacaaaggcgagaacgccacgctgaacgagaagctgtcgcccctgatgaaatggctgttctgccagccaaatcctattgccctcaacactgctctggctcagctcggcgtggcaaggcctgtcttcagactgccgtacgttccgctccctcttgaaaagagggccgagttcgtccggattgttgagtcaattggacgggaaaatttcgtggggcagaaggaggcccaggttctagatgatgacgatttcgtgttgatcagtaggtactaggaaaatgagtttgctagtctatgtatcttggcgaataaactagtagtttgtaccttgcgttcagacttcgttctgttgttcatcagtcgttggtttcgtctatctatttattaattgcctactttggccgcattgtataatgtatatgtatcgcgtttatagttttttacgtgaattgacctaggtacaaggaaaaaatgatcacttcttttttggctatccctgatgcatgacagaacctggtgacaattatatataaaaaagagtgtacaagtttagcaacgt

SEQ ID NO: 34883 - DNA, 1058 bp, Zea mays
  Clone ID: UC-ZMFLMO17335F08_FLI
cagggggccatcgaatgcattttactgctttgcacatgactacagtgctcatttcttctgtgtggcttcttttctatggacaaccaccatatcattcactctgcatcgcacagttgtaaaacacaaaactgatgttgaagaatttggatctattttccacttatatgtgtggggaacttcactatctaccactgtattacgttcgataggaagtgactacggaagaccaggcacctggtgctggattcagcagggaagcatggcaaaggtcctacatttaataaccttttatcttccactttggggtgccattttgtacaatgggtttacatactatgaagtaaaccgcatgctgaataatgcaacgcagatggctgctggcataagtgatcaatcaaatcagtctgacattagggcaggcaggaaggcatttaaccgatggggttattaccctctaattctaatcggttcatgggcttttgcaactatcaatcgtctttatgactttgccaatccagggcacaggatagtctggctctcctttcttgatgttgggttcgctggacttatgggcctattcaattccattgcttatgggctaaactcttctgtgcgccgagctatttcagagagaatcgacacgttcctacctgagagaataaaaaggagcctccctgctttgtcaaggctgaggagtcaacaagaaaatgaactcacttctcttatcgttgagggtaactgatatgtaatggattttccatgcacacgaagctttttttgtttatctgttcgttcttcaatctccaacaagggaatgcaacatcactgtaggagcagtgggttagtaacacgtcgaattggttccgctgtgtccattgttgatcgtcttaacacgagacctggggtttggggttcaccgctccggccggagtacataggagggctagagtaggaacagtcggtagatagactgatgttcatctgtagctaggtaagcagagtctgtttgttcagatgtacgagtataaccacctctgtacaatgcacattctagcgcc

SEQ ID NO: 34884 - DNA, 1498 bp, Zea mays
  Clone ID: UC-ZMFLMO17335H08_FLI
gttatcccagagaatactgccctcccatgtgtggtctattgccatggaaataggtctatccggcggggattatgtcagtttgggttggcatgagaaagaagacctcaaatgtgcggtgtcatgtcttcgggacaataaacaagtttccactataggcctttgggggcgatcaatgggtgccgttacatgcctactctatggagcagaggacccttctattggtggcatgatattggatagtgccttcactaacctgtatgacttgatgatggaacttgttgacgtttacaaaattcgagttcctaaattcacggttaagatggctgtacagtacatgcggcgaatcattcagaaaagagctaagtttgacataatggatctaaatgttttaaggttggctcccaagatgtttatccctgtactatttggacatggtctgaatgatatgtttattcagcctcaccattgtgatcgtattcaccaggcatatgggggggataaaaatataattaaatttgatggtgatcataattctccaagacctcaatcatattatgattcagtttctatattcttctacaaatctttgcatcctcctctgctgcctgcagcacgatcaaagcttcatatgggagcatttaaagttggtaacataaccaatgagaatttcttctttgaaatcatcaatggtctacggccagcaaacactgcaggttgcagttcatcaaccgatgcacctaacatcccacatgatggcacatctgtaattgaattgttgtctgatagcatgaaccaactgtccattaagaatgagaatcacttgctgcaggactttcttttagatgaaaaccacagcctgccagagattgatagtgatagtgttggatcacgattgcaggataaaagaagtaggcgcaatgaggagtcattttcattcacaagctctaacagagaaagttggggcagatgttcatctttaggagcagccagtgatgaatcattctcaggcgataataatgataagcagaatttgacagtcaaggctttggctacgcctgtaagacaaaaccagaggcaaagccagaggaaaccgattgagaaagctaagcagaagaagattcaagccctatggaagaagattaagcgcgaaaaggtggagatgggggacagcctatcttcgcgtttgaagatgtgcctagggcaatctccgcagcacaagaggaatagatcgtctggaaccattacaacttcatagctctgacaactctactgaaccactgattgtccaccatagattctcccttattctgacctactcattgccacgttgtaacctatataccctaggtgaatatatgctacatgaccgcattgtagcatgccaggatgttcgaaagctgagaaagcacttgtatcatctcttgtaattgcctgaaacaagtgtaattgccatctctggctcgttgtcgcatgcaatttcctttcccctcttgcatcc

SEQ ID NO: 34885 - DNA, 1967 bp, Zea mays
  Clone ID: UC-ZMFLMO17336B10_FLI
tgcttcctctgttcctaccctttcccctcctccccctcccgttttcctttccctttttcctccacacaagcaaggcgctcaacctgccgcccgggaaaaaccctagaccggcgatgtccgtccccggcgcccccgcgggcggcggttcccgcagcttcgacttcggcgccgacgacgtgctctgctcctacgatgacttcgccgcctcgtccgagcccaagcgccccgatccggccgacagtgtgcccgattttcatgatagcagattggggaggccatttgtgaaaccttatgaacaagaaagttatgggaaagaggatgtgctttctgctgttgagaaatgcatgaaaaagtatgctgataatttgctacgatctcttgagggaatcactagtcggctttcgcaactggagatttattgctataagcttgagagatccataggtgaacttcgaagtgatgtgcttcgtgatgagactgaccataggttgaagtctcttgagaaacatctaaatgaagtacacaggtctatccaaattcttagggacaaacaggagttagctgaagctcagaaggaattggccaaatttcagcttacacaagatacatctaaaaagaaggaagatgtaccaacatttattcctgagcaaaagaagcctgaagaaaaccctgacacatcaaaccagcaactggctcttgttttgcctcatcaggtgaacctgccatcacttgcccctagagcttctgaatcagtccaacagtacaagaatcaacctgtgcaaccatcagacccaacccctcctgtgccacagcaggaccgctatgttcttagccaagccatcgtctactacccacagcgccaagctccaggtatccaggacacacaagggcaaaaattgcaaccagaagtgcaatacttaccagcaagacccccagcacaagatgttccggtccatgctccatcccaaccacctcaggctggaaaccaaacacagccacagccttaccctccttaccagcagcagtggcaccagcaatcctcccagccagctcctgcaccggtggcccagacacagcagactttctcacagacatttcctccacccgcacagcagcctcagttatcaaacgtgcagcagtttccaccgcaaccagtacagcagccccaatccaatgctcaacagtatcctccaccagtgcaaccacagcaatctagcccacagcttcctcaggcaatgcaaccacaacatcctcctatgcaaactcagatgagacctcaaaccccaccaaactacccgcattatccaccccaccagccattgaaccccacccctgaaactcttcctggcaatgtggctatgcaaggatcatacaacacttctgttccatcaggtgccaaccgtcctgaactaccatattcgtatggaggagctggcatcccactgtctcagccactgccacagcacaacatgcaaaggcaccagctaccaccttcaagtcagggctcctttgggccaccacctccaagcaaagggtcctatgctggctctccacagtatgcaccacagggcaatccgcaaggctacagcacaggttacgcttacccaccaaacggccctccagcagtccagccgcaacagatgccccctggcggagttggcatgagtcatccgggttcgcatatgatgcgtggccatccctacggagaaatgatggagaaggcgatcaccatgggataccctagggaccaagtgctgaacgtcacccaaaggatggccgagagtggccagtcaatggatttcaacaccttgctcgacaagctgaacgaagcagggtcgggagctccaccaccacgcgcgtggtgattggatccagtttgggcgccgtgcttggtgtcggttatgtgacttacgactgttatcatgcagctaaataaataagatttgggttgatgccgtgtacttctt

SEQ ID NO: 34886 - DNA, 654 bp, Zea mays; identical to SEQ ID NO: 31474
  Clone ID: UC-ZMFLMO17336B11_FLI

SEQ ID NO: 34887 - DNA, 1744 bp, Zea mays
  Clone ID: UC-ZMFLMO17336E02_FLI
gcgcaaatgaaagcgctcccctcgattgggcggcacgtaacccatcaccaccaccaccaacccggacccgtcaagcgctgcgtcgtcccgtgcaaagaccgcgcattccgtgcgtgccgtgtccacgcgcgcgcgcgcggtggcgttaagttgtcgagcgccagaggagcgccactagtcgtcgatcgatttgacccaggcgaggaggcgtaggcgcgtaggggagtgagtctagctagctactggtgttgggtccattattcgctagcttccgacgatggaggtgaagaaggaggccacgaaggcgacgctgccgccggggttcaggttccggccgacggacgaggagctgatcgtgcactacctgcggcggcgcgcgctggcctcgccgctgccggccgccgtcgacatcccggacgtccgcatcctggcgcacgacccgtccgacctgctgcccccaggtgagtgagtgagcgagtgagtcggcactcgagggatccatcccatctccatctcagactggggctgattggttttgttgctggattggggggcggtggtgccgtggtggtggcagggttcggcgagcaggagcgctacttcttcacgtgcaaggaggccaagtacgtgaagggccggcgcgcgaaccgcgccacgggggccgggtactggaaggcgacgggcaaggagaagccggtggccgtggcggtccaccggggcgtgcagggccagagccagggccaggccgtgctggtgggcatgaagcgctcgctggtgttctaccgcgggaagccgccgacggggagcaagacggagtgggtgatgcacgagtaccggctggcgggcgccgggctcgcgccgtgccgccgccgccacgccgacgccgatgccgacgccgacgccgtggcgcgggcgccggccgagggctgggtgctgtgccgcgtgttccggaagaagggctccgccgccgccgccgccgttgcgaggcggcccggcgaccgcagcgacggcgagggcgacgagagcgcgggcggcggcggcgggcgcgggttcatcgacttcttcgcgcgcgcggacgccgccgggcgaaggcgccgcgcgccgtcgcccgccgtgtcgagccggtggcttgcggacgcgtcgccccagccggagcaggaggccaccagcagaggcccgtgacgagtcaagggccggccggctggctggcgtgaagcgatcaagcaaggtaaggtagagagagagagggaagcttttgctgcattggcagtggccaatgagggtccagtacagtaggtgcaggtaggagcaaagtgaattcgttttagcaacgcgagagagagagaggcccgatagtcagtcagtcagtcaaccagtgcagtatcagttgttgagcgtagatggtgaaactaatgtagcagctcagttgtactcctcccgaccacctgatgaatcctacacaattgtagagtggctgcagcaaaatcacggccatggcaccggagctcctccaaggaacgcaagtccaccagctgctgctgctgctggccatggcggtcgcgcggattgctagtgctaatgttccacaggctgttgattgctgagaagcaagtagcggtggtggtggcgggcagcagacggaagatggcgggtgtctgatactggtggtggtggtagtagtcgtgcgtaatctgttgcctggacttggacttggtttctttaatgcaattatgatgatgaagtg

SEQ ID NO: 34888 - DNA, 541 bp, Zea mays
  Clone ID: UC-ZMFLMO17336E09_FLI
atgacgctcgcggcctcgctttgcacgaggacgtcgtggcactctcgacctgagatgtcactggtcctgaaacttctccagggggacgacgagacgatgggctgggcgaggtcggccagcttcgacgggtcagacgaggaggccatcgcggcgggacctgacctgaacatgcagtcgcacctgagcctcgcgctcctcggggtggatgcggacgacacgctgtcgcgctgcagcagcacggagcgcacctcggccgacggctactggagccggtcgtccagtttcgactagcggtagctgcatgatggaactgatgcaacagagtagagtagtgtggttacgtacagcaggcaggcaggcgattggtatgcttgatgagatgattgttcatatcaggattcaggtggttggaatgtggacagcagctgatttagtttagatggcagatttagcagtgttgctttgctgatttggctaggagtatagatctgaatctgaccttacgatgcaattggtttcgtatttgtattgtttttttttc

SEQ ID NO: 34889 - DNA, 1176 bp, Zea mays
  Clone ID: UC-ZMFLMO17336F10_FLI
ggcgattgggtttcgggaagagggcaccggtaatgtcaacgacgacggaggcggcaaagagcggctcagccgcaccggtgcggtgccagcggatcggctgcgacgccgtattcaccgacgatgacaaccgcgagggctcctgccaataccacccctccgcacctatgtttcatgacggcatgaaagaatggagctgctgcaagcaaagaagccatgatttcagcttatttttgcagatacctggatgcacaacaggaaagcatacaaccgaaaaaccaatcacaaaagctgtttcatctaaccgtacaaaggcaacaccgatccagtcctctaagcagggtgtgggagttgatgtgtgtgcaaggtgtcgtcaaggtttcttttgctccgatcatggatcacagcccaagccgcaaaagccagctgctaccgacgattcaaacaaggaacctgttgagaaatccgctgttccaccgcccaagaaaaggatcgatgtaaatgagctgaggacatgtaaaaataaaggatgtggtaaatcctacaaggagaaggataaccatgattctgcatgtgactaccatccaggtcctgccgttttccatgacaggatgagagggtggaaatgctgtgatgttcatgtcaaggagtttgacgagtttatggagatacctccgtgcacaaagggttggcataatgctgatgcggtgtgaattcacgccatgcttaaggctgttttcatgttgtatcgtcacctgccatgtaaacaccatttctgcagtttattgaggatttcatttggaagtgtgacaagagctttgaggatgggctgcctaagctttgcgcatggtggttgtctggaaatcttacgtgattctccttgcacatttggtgtctggattcaaattggggttttgtctgtttgaagccgaaggatgtcaatattttaaccctgtcaaagtcagaggagttagcgcatgctgtggagcagtagaggtgccgtgtgtgtgttccatggctgctggagaagtcctgtccgtgtactggtttgctcggtttgagcaggcaaaagcctggaccatgcatcactagtttgttctaccgctccccactccccagaccataaagttgttgcccatctacaatataatgaaaacgtagctgcactcttgggaagag

SEQ ID NO: 34890 - DNA, 3352 bp, Zea mays
  Clone ID: UC-ZMFLMO17336G01_FLI
gaacagttacccatagttcttcaggtcctgcttagtcaatcacacagatttagagcacttgttctgctcggaagatttcttgacatggggccgtgggcagttgatttggccctgtctgtcggaatatttccttatgtactcaaactgcttcaaacaagtgcaatggagttgcgtcaaattcttgtgtttatatggacaaaaattctctctcttgataagtcgtgccaggttgatttggttaaagatggaggacacacatattttgttaggtttcttgacagtttggatgcttacccagaacagcgtgcaatggctgcttttgttttagcagtcattgtggatgggcataggacaggccaagaggcttgtatgaatgcagggcttatagatgtttgcttgagacacctgcaacctgagaatcctcatgattcacagacagaacctttacttctacagtggctttgtttatgccttgggaaactctgggaagatttccctgatgttcagctgcttactttacaaacaaatacgccagaaattgtactatgcttattgtcggagcctcaacctgaggtcagagctgctgctgtttttgcacttgggactctcctggatactacatcatcaaatggcgctgatgatgattctgactatgatgaaaaggtgaaagctgaaataaatgtagttcgaagccttctgcagatatcttcagatgccagtccccttgttcgatctgaggttgctatagcgcttactcgctttgcattgggtcataacaaacatctcaaatctgttgcggctgagtattggaaacctcaatccaattcattgctgaagtcactgccatcattggcaaatataaataacccaaacaatgtttacagtcccaacaatattctacaaggcagcattggtcctgtgctgagggttggcagtgatagcagtgctgctggtcgtgatggaagaatgtctacaagtagcccaattgcaacaagtagcatcatgcatggctctccccagtcagacgattcttcccaactctctgattctggcttattactgagagagaatgctagtaatggtggtcccggctacactaggtccaggcctgttgataatgtcatttattctcaatttatatcaactatgtgttcttttgctaaagatccttacccaagaattgcaactattggtcggagagcactgtcccttataggtgttgaacaagtagtcatgaaaaatactagatttaatagtggaggtgcacatcggggagagacatctgcttcaaactttggaatggcacgctcttcatcctggcttgatatgaattctggaaacaacttgataaaatttaggacccctcctgttagccctcctcagcatgattttcttccaggattacgccgagtgtgttctatggagtttggacaacatcctataagttcacctgatggcttagctgttccccttttaagctccgctgcagctaccagtaatgctgaactaagtatactccctcaatcaacaatttataactggagttgtggtcacttctctaggcctcttttaattggctctgatgataacgaagaggcaaatgctagaagggaagagagagaacgacttgcactagattatatcgctaagtgccagcgctcctgtatgtggacgtacattagtctacattacattcttcttgttggtttccttgattatttatctgttattttttggttgttcacccttggaatagcagcttgcaagatgacaaaccaaattgctagttgggatacgaggtttgagttgggaacaaaaacagctttattgttgccattttctccgatcgttgttgcagctgatgaaaatgagcaaataagagtgtggaactacgacgatgcgctgccagtgaactcttatcaaaaccataatttgtcagacagagggctatccaaacttttgctgattaatgagcttgatgagagcttgcttttagctgcctcaagtgatggaaatgtacgtgtatggaaaaattttactcaaaagggaggacaaaaacttgtaacggctttctcatccgttcagggacatcgaactgctggtcgcagtattgtgattgactggcagcagcaatctggttatctttatgcatctggtgacatgtcttccatcttgctatgggatcttgacaaggaacaacaactcagcactattcagtcatctggtgatagtgccatttcttcactgtctgcatctcaggtctgctctggacattttgctgctggttttgctgctggttctgtcaggatatatgacatacgctctcctgatagggttgtctatacggccaggccacacgcaccaagaacagaaaaggttgtaggcatagggtttcaacctgggtttgatccttacaagattgtaagcgcatctcaagctggagacattcagtttcttgatgttagaaggtcagcagaaccctacctgactattgaggcacacaggggttcacttacagcattggcggttcaccggcatgccccagttgttgctagtggctcagccaagcagatgattaaagtgtttagtcttgaaggagagcagttgacaataattcgctaccagccatcttttatgggccaaagaataggcactgtgaactgcctttcttttcacccatacaaatcactcctatctgctggtgctggtgataatgctcttgtctctatctacgccgaggaaaattacaagtaaggtgaggcctacatctcatgacaatgcagccacaaggcaaccggcaggcctggtgttttttggccaagtgatgctcccccgcagcatggtccagctacaagatccaagatggtgtgaagaggctcccggtgcgtattgcctgttgttggacgacgtgtgcaatttgtaagatagagccaagattcgttagccgcctccttgcagaaggtttgtggaacccctaccctgatcatgtcattgaacttggaggctccccccaaataattaatcatacctaggttaaccaaaatgtaaatagacaccgcgtttcgggttgtcggtggtcagcattcctccttttgaagatgcttgtgatgatatgagaaatcaggtttggtaggggctgctgcctgggcaagtggggtttgtgcatatgggcccaggtagtatggttgcacatgtctgctcacagatgctgttgaatggaaggaatgttgtctagtcgcttgcattgtaaccattggagattgtccatttgtatgtatggatcttgtctgtacatctgtaatccgtgcgatgatgtgttttatggaacagtccaaggcttcaggtcttgtgg

SEQ ID NO: 34891 - DNA, 2237 bp, Zea mays
  Clone ID: UC-ZMFLMO17336G12_FLI
cgacgtggtctccgcgccgccgcacccccatcacagccaaccagcacctccgatccatcctccaaaccctattaccaccgctcccgccgcccccgactcgcgctcggatggcagggcaaccccgcgagcgtggtagccgctcgtcccggaagggccggtccgcccgcgcggggcttgcacaggcgcccccgccggcctccgatcccgatctgaccgtcggagaggatgccgcgccgtggctccgcgccacggcggacgagcttgaggagcgcctgctgaagaggctggatgaggcgtacgcggcggccctggcccgcctcgccgacctcggccacggcgaggaggcatccctcgaggccgttctccactcgggccactgttacggcaagctcaacgatcccgtttccaacatcgtggccaacgcccgcgcctacctctccgatcctggccacgccagcgcggccggcggcttcgccgacctccgacgcctcgaggaatactccctcgcggggcttgtctgcctcctccagagcagccgccctaccctcacccgcgccgaggccttgtggtgccttctctccagtgacctccgtattgaagaggcgatcgccataagcagctctttcaatggtgaaccctcatctattgctgagagtgaggagcacctcccagccgtggcagagaccgcacagcgtggatacatccactatcataacaccacagccacagctgctcaggaccccactctttttgacccagaagccttcatgagacttgcgatatgccagggtcccgctgcagccaccatctcctgcctgaaggccgccgggtggtcacgatctagtggcgccgcaccagaagggcagcccagggaatcgtttaccaagaagctctccactgaggaactcatcgagtctgttgttgcggagcttgaggcactggacattgacaagaaggatccaccagatgcgaaccctgacccaaagaaccagatggcgcgtgaactcattaagcagacaagagagatggagacgcagcttaaggagcgaaaggaatgggcacagggaaaggcgatacaggctgctcgcaagcttggtgctgatcttactgagctgcgtgtgctgcggatggaacatgatgagaaccagcggcgtaagaaggaaaaacaggtgatggaggatgacacaatgaagcgccttgctcatctggagaatgagctgaagaaaaagagtgggcagcttgacaggagtaatgcaacagttcagaggctggaaatggagaatgcagagatacgtgctgagatggaagctgcaaaactgagtgcatcagagactgaaaaacaatgccagggtctcttaaggaaagagaagaaggatagcaaaaggcttgaagtctgggagcgccagaaagcgaagctgaaggaggacattgctgaatgcaagacaaatattacacaagctgaaagggagcttgctgaggtcaacaaggcaataaaaaatatggagaagaagatgcgagaagacacaagggtcaaagaagaaaacatggtgcttttggaagatgagcgcaggaagaaggaagctgcaaaagcagacaatgaccgccgacttgaagagcttcgtcgcaagaaagaagtcgaatccgagtgctacaaggatgacctacacaggctccaggatgaactcagccgcctgcagaagtcagcaggtgcaactcaaacagctgtcccatcagccaactttcctggcacagctaaccgaagcgcggcgcaggcagccaagcagcaggccatcctgcggccacaacctgcatctaaccggtcgctgccaccaccagcccagaagccaagccgccgccgggactgtgttgcctgcaagaaggcggcggcgtgtgtgatcctactccagtgtgcccaccaggtcctctgtgttggctgcaataagctgcatgaagataaaggcatcactcgctgcccctgctgcagcgctgaagtcgaagagagaatcagggttttcggagcgagctccaactgaggcaccaggtcggggtgaactgcaacttgtggttgagttttcctttttcttttacctccgttaatgtgaagaaagggttatagccttataggtgtcgcctgagcggttatactttgctacagcatccatgcatgattgcttagctgaattgcgacttatcttgggtattatatgagtataatcgagacctttctggagacaggc

SEQ ID NO: 34892 - DNA, 619 bp, Zea mays
  Clone ID: UC-ZMFLMO17336H11_FLI
gctggaccccttgttccggcaagttggggcccctattgcgctgaagaggccagctctcagcgctgaaccatcagttcaagtacgcaagctgaaaccaaacgacctgttcctgatatttgcttcagatggcctttgggagcacctcagcgacgatgctgcggtgcagattgtcttcaagaatccgagaactgggatagccagcagactggtgaaggctgccttgaaggaagcgaccaggaagagggaggtcaggtaccgtgatctgaggacgatcgagagaggggtgaggcggcatttccacgacgacatcagcgtcgtcgtggtctacctcgatggccaccgcgagcgccgccacaccagggtcgttgactcgagcagcaactgcaccagtgcgcccgtcgacatccactcctccaactcccgctagtttccggagccccttgcaacgcgagctgaactctgggtgggaggtgaggtgggtgcagccgtagccatcggaatcggaacaagtcgatatgtacataggtaggagtgggtgcgtggcatcttgatgccggagaagatcatttggtctcgaaactacttagcacaagtggttaatgactgcatttttcttgtt

SEQ ID NO: 34893 - DNA, 943 bp, Zea mays
  Clone ID: UC-ZMFLMO17337D05_FLI
caagccgaagacaacgcacgatgagtagctcctgcccggccatcgtcttccccatgctatgctccacgcgctgttgtcccccagctccacgccgatgctcgcccagaacactctctgtcctcgtcatctacagtactcgggttctatcgacgtcttcgatctcttgctctggtctcccttcctcaacgcttgcgaggaattcggtaaaatgggcgaaccaatgagcgtcgttaatttttttggtttccgagtcaaattactagttgtgctgatggatgtttttgcgtgtgagattggagaagggagatccccaaaattttatggatgaagaagaaaatgaagtcgaagagtgacgcttgcaagatgcttgacgaaaggcgtgaaccgtagattgatcactgttcctcaattgccgagttaaattttattgaggtgagtgattcgctgctcctgcataatagatcgaagcatggaatggtttagtatattaggtgtgataattttattgctatggttaggatgtgttgtgactgtattagatgtttgctgatgtatcatatatgcaatgtatgtttgaggaaagactcgaactagaacccactatcgatgtcgcagtttcgagtgaatttagtattagtgcgctgttgggggccttcgtcttccgaaggtcctcaaaaacatgattaacaatgtttcccaagtatgatatatgtacagaaactttcggactcggaatgaagctgtacacaatatgaaaagcatggtcgggacgaaggttgaaccagttctgaagctacgcgcaaggaagcttcggctcagcagcagaaaaaggaacattaatgtccttaagtcaatagtaaacataaaggacattaatgtaattttacataggctgcgccctgtgcctataaatagatgaacagtacccccgtactgttcacgc

SEQ ID NO: 34894 - DNA, 898 bp, Zea mays
  Clone ID: UC-ZMFLMO17339B08_FLI
gttgatattgatgtctttctcgatgcgaaaagagtaattgattctcttcagaataatgaagtttctcctgctttagcttggtgtgcagaaaacaagtctcggctaaagaaatcgaagagtaagcttgagtttttactgaggcttcaagagtttgtggagtttgtcaaggttaagaatttcattcaggctatagcatatgctcgaaaacaccttgctccctggggctctgtacacatgaaagaattgcagcgtgtcacagcaacattggtttttagaagcaatactaattgtactccatacaagatattgtttgagcaagaccgctgggactatcttgttgacattttcaagcaagatttttgcaagttatatggcatgacactagagccgctgctgaacatatatctgcaagcaggcctgacagctctcaagaccccgttctgctctgagggtagctgtcccaaagaagaccccttgtctctggagggcttcaggaaactagccgagcctctgcccttctctaaacagcaccactcgaagcttgtttgttacatcaccaaggagctcatggacactgagaacccgcctcaggttctgccgaacggctatgtctacagtgagaaggcgcttcaagagatgtccaagaaaaatgacggcaagattacatgccccaggacaggagatgtttatgacgtttcagagtgtgtcagggctttcatctcctaatcatgaaatactctgatttggtgtggctttgggaatctgagtgaatgtacatagagtggtcagcgcattgtgcgccatgtcgagttgattgaactaacctgcaatgttgaactggctggatgttggattgtgcgcatcgttgcaaccgtgaaactgacgtttttcatgctcc

SEQ ID NO: 34895 - DNA, 1641 bp, Zea mays
  Clone ID: UC-ZMFLMO17339C03_FLI
caccaggacgccctcttcctcaccagggactcgacgtggtcggcgatgaggagcacggtggttccgctctaccagccagcgcggcttgccgggctcattccggtgatgcagtcgtacgtcgacacactggcggcgaacatcgccgcctgcccggaccaggactgcgtccccttctgccagctctcgctccggatggccatcgacatcatcggcaggacggccttcggcatcgagttcggcctgtccaagaacgccgcaggcacaggcagcagcggcagcgagtccccaggcggcggcgagggcgagggcgagggcgacgtcagggagttcctcagggagtacaagcggtccatggagttcgtcaagatggacctgacgagctctctgtccaccatcctcggcctcttcctcccgtgcgtccagacgccgtgcaagcgcctgctgcggcgggtgcccggcacggcggactacaagatggaccagaacgagcgccgcctctgctcccgcatcgacgccatcatagccggccgccggcgggaccgggccacgcgccggcgttgcggccccggcgccgcccccgccccgctcgacttcatcgcggcgctgctggatgcgatggagagcggcggcggtgcaggtgccaacaaggacttcgcgctggcggacaggcacgtgcgcgcgctggcgtacgagcacctcatcgccggcaccaagaccacggcgttcacgctgtcgtcagtggtgtacctggtctcgtgccacccgctcgtggaggccaagctgctgcgggaggtggacggcttcgcgccgcgccgcgggcgcgggcgcgcgccggacgccgacgagctccagagcgggttcccctacctcgaccaggtcatcaaggaggccatgcggttccacgtcgtctcgccgctcatcgccaggcagacctccgagcgcgtgaagatcggcggctacgtcctcccaagggcgcgtacgtgtggctggcgccgggtgtgctggcccgggacgcggcgcagttcccggacccggaggagttccggccggagcggttcgcgccggaggcggaggaggagcgggcgcgccacccgtacgcgcacatccccttcggcgtcgggcccagggcgtgcatcgggcacaagttcgcgctgcaacaggtgaagcttgccgtggtggagctctaccgccggtacgtgttccgacactcgccgtccatggagtcgcccatccagttcgactttgacctcgtccttgccttccgccacggcgtcaagctcagggccatcaggaggggctgaggctgcctagcttggggtcacgtgtgtgtggaactgcatccgtgacgtgatggtgccacagcgtgtcttcttgtgtgtaatatagcactaataagcatatattgagtatgtatatatagaaatagatggtgaagaagattgcacgtattggacagctggcaaatgtgttgcagatactccctctgtttcgttttagttgtcgctggatagtgcaaaattaaactatccagcgacaactaaaaaaacgaagggagtacaacttcagtagaagaacgtacgcgtgtgttgtcctggactaaacatgaatctgacagatttctcgaggttttgcacaatcttt

SEQ ID NO: 34896 - DNA, 1429 bp, Zea mays
  Clone ID: UC-ZMFLMO17339C08_FLI
gtcgatcgtctcctacggcgagcggagcgaggaggaggcgcggcggatgtacgccgagtggatggcggcgcacggccggacctacaacgccgtcggcgaggaggagcgcaggttcgaggtgttcagggacaacctccgctacgtcgacgcccacaacgccgccgccgacgcgggcgtccactccttccgcctcgggctcaaccgcttcgccgacctcaccaacgacgagtaccgcgccacctacctcggcgtcaggagcaggccgcagagggagaggaggctcggtgacaggtacctggccggcgacaacgaggacctgccggagtccgtcgactggcgggccaagggcgccgtcgcggagatcaaggaccagggcagctgcgggagttgctgggctttctcaacaatagcggctgtggaaggcatcaaccagattgttactggcgacatgatctccttgtctgagcaggagcttgttgactgtgacacttcatacaaccaggggtgcaatggaggtctgatggactatgcgtttgagttcatcatcaacaatggcggaatcgacaccgaggaggattacccttacaagggcacggacggacggtgtgatgtcaacaggaaaaacgccaaggttgttactatcgacagctatgaagatgtaccagcgaacagtgagaaaagtctgcagaaggcagttgcgaaccagcccatcagtgttgcaattgaggctggtggcagagcatttcagctctacaactcgggtatcttcacaggaacctgtggaacagcgttggaccatggtgtcacggccgtcggctacggcacagagaacggcaaggactactggatcgtgaagaactcttggggcagcagctggggcgagtccggctacgtcaggatggagcgcaacatcaaggcgtccagcggcaagtgtggtatcgccgttgagccgtcgtaccctctgaagaagggcgccaaccccccgaaccctgggccgaccccgccttcccccaccccgccgcccaccgtctgcgacaactactactcgtgccccgacagcaccacctgctgctgcatctatgagtacggcaagtactgcttcgcctggggctgctgcccgctcgagggcgccacctgctgcgacgaccactacagctgctgcccccatgactaccccgtctgcaacgtcaagcagggaacctgcctcatgggcaaggacagcccactgtcactgtcagtgaaggctacgaagcgcaccctggccaagccgcactgggctttctctggcaacacagctgctgatggcatgaagagcagcgcatgagaaaaacgcagcatggcattaggccgtcaacagccagcatgattagagcccccctgcatgcagaatgatcacccggtcccgtagttcacgacgaaagcatggctg

SEQ ID NO: 34897 - DNA, 2703 bp, Zea mays
  Clone ID: UC-ZMFLMO17339D09_FLI
ggatttccacccgagggtttcgtctcgctctcgctctctccgctctactgcctccacagattggcgcgaccgacccgtcatcgaggaccttcttccgcccgagaggccggggctcctcccgcggaaattcactctcgttcagaggcggcgctgtcctcttcatcgccgcccccgcgctctgcttgtactggagtggcgcggggtggagatccacccgggcgtggatcgattcctcttcgtttcttcgttcggtggcgcggaataccaatctatagaagtgcacgaggagtttttatatccccgatttttagggggttcaactgaactcccatgccccacgctaagtccgcccctggtggtggtggactgaattggtggacactgttgattttgtcgtgggcatggagcgaagtgagccctcgttgaagccagaatggctgctgcggcccacagtacctgccacgacccataagccggtgacttcgccccgtgcagatgatcacggcaggggtgcttcatcaagaaaccgttcatcgggacgagatcgtgatcggagctcccaactgtcctcgtctcggaggggttcaagctctagtggttcaaggaggaatgatcgcgatggtacagggaaatcaagaggctatggtaattttggaaagcacagcaaggataggatacaagaaaaggacttggattttcgtgaacgggagagtaggttggttcaaccagatgatcctttacgtgacggctttgagtcctttagctcatgcagatctgaaaaggacaggcttaaccgtactcgttcaaaggtggccataccaaatcgggcaggagtaagtttagacaatggtaatgtatctaaaaaagataatggtgtcatctcctttgagcgggaatttccacaccttggttctgaggacaaaaatggaaagcaagacataggtcgagttccgtctcctggaattagcacgccaattcagaacataccattggtagtatctgatggctggaattcagtgcttgcagaagtacctgccttagtagatccaaacattaactctgtttcctcttcctcatcacccgctggttctagtaaaccgattgaagtgtccaactctgggagtgcgttaagcatggctgaaacagtgatgcagtcaccgttaaatatttgtaccacacctcagttatcaattgatgctcagaagattgaagaaagaactatgaggcagtgcattttaagacctctaacaccatcgtcaaacaaaatatctgcatctatttccttggataagttattaaaatccaaaggtgcaagagctggagagtctaatggacctatcaaggttgctccacagctgtcaatacagccatctagcaactctgttcgcactccagtcaaaactgagctcgtaaagcaatctcaatcaggcagccttcaagtccttagccgtgagcagaatggtactgtaaatactgctgccaaagacatcaccagcaacaatcctgtgagccctgttttgggtcgatcttcttcaatggaacctatgagaaagtctattgtcaacccaaagcttaaggttggtactaatggccgttctttgcatcctctgcaaggttcatttgcagacagaaaagcaagtgcaaaagacaagtacaaattttttgagttgttgcgaagtaagtctgtaaatggttcaagcgctgctattgagtctccatctagcctgactgatgatcagcagaactctaatcttgatttgcctttcaagtttattgaaaatgggaacagttcctgtgaagaagcaaattcttgtgagggatcacagcgacacttgtcggacaatgaggaaattattccaccttcagaatctcatgacgttttagatgagggatctctggggattcaagttgacgacaagggttccagctcttcaccagtacttggcacacaagatatatcttccaagaagccccaggaagacaatgttgatattgttgtatctgtttatgtaaatgatggttctgtgatgcccaattctgttgacaatgaagcaagattgctgttggaggaagccaatcctgctcaagtgttacagcacattgatgcaagggaggagaatccctgtcctgctcaagagttcgagtccataggggcaggtggggaggaagagttgaacctcctgagatctatgggctgggatgagaatgaagaggttcagcctcttcagcaggaggagattgctgattgtgtaaggcagaacgtcaggctgcagcagaagcttcaggaatgcaggggctgatcgccgaatcaatggagcaacgtcactgtgcgtcaccatgctgagaagatgtgggccgcgtggagggagctgggttttggacttttggtaccttccgggcaaccgatcagataatgattgtctctagcttagcaaatggagagttttgtttttgttaatgcttgttcagcattgtgggggaaggtttcctggtagagctgacaattttcccccattgagaagaggttttagggtttctcttcctcattttcccagaaggaatacaccaaatggaagtcttgtctggtgttggaggcacataggtgtgcgttgctctcaaagaagaataggttgtctcttacttttcgccgctatgttttcttttttggaaaaaagggaaaaaagaatgatccagcttaacatg

SEQ ID NO: 34898 - DNA, 1779 bp, Zea mays
  Clone ID: UC-ZMFLMO17339G03_FLI
tcgcttccctccccgctacacggacacggccgctcagcgctcaccaccgcttccatgctcctcgcctcgtctcccgctcgcgagacgtagctccagatcctctcccccacccacggcagcaccgcattaccctcagatccacccccgcgagcctcatttcagatccacccatgcgcctcccggtccttttcgccctgcagctggtcgccttggcggcggcagcttcggcggccgaggccgcggcgacgttctcctcgaggatggtgcaccgtctgtccgacgaggcccggctggaagcgggcccgcgcatggggttgtggccgcagcgcggaagcgggggctactaccgcgcgctgctgaggagcgatctccagcggcagaagcggcggctcgcgggcaagaaccagctcctctcgctctcaaagggcggcagcaccttctcccccggcaacgacttaggctggttatactacgcttgggtggatgttgggacgcctactacctcctttttggttgcattggatactggaagtgacctgttctgggtaccctgtgactgtattcagtgtgcccctttgtctagctaccgtggaaatctggatagagatcttggaatatacaagcctgccgaatcaacaacaagtcggcatcttccttgcagccacgagctatgtcaaccgggttcaggctgcacaaacccaaagcaaccttgcacatacaatattgactacttttcagaaaatactaccagctctggtttgctaattgaggattccctacacttgaactccagggagggccatgcaccagtaaatgcttcagttattattggctgtggtcgaaagcaaagtggtgactatctggatggcattgcaccggatggactccttggccttggaatggcagacatttcagttcccagtttccttgcaagagctggactagttcggaattccttctcgatgtgcttcaaggaagatagttctgggagaattttctttggagatcaaggagtgtcctctcaacaatccacaccgtttgttcctctgtatggcaaacttcaaacttatgctgttaatgtcgacaaatcttgtattggacataaatgtcttgagggttctagcttccaggctttagtcgatagtggaacatcatttacttctcttcctcctgatgtttacaaggctttcacaacggagtttgacaaacaaattaatgcttcaagggtgccttacgaagacagtacctggaaatattgttacagtgctagtcctcttgagatgcctgatgtgccaaccataatcctggcattcgctgcaaacaagagcttccaggctgttaatcctatcttgccatttaatgacgaacagggagcgcttgccaggttctgcttagctgtactgccatcaacggaacctattggaattattggccagaatttcctggttggataccacgttgtcttcgacagagagagcatgaagttgggctggtaccgctctgaatgtcgcgacgttgacaacagcacgaccgtgccgctgggcccatcgcagcacggcagttcagaggacccgttgccgtcgaacgagcagcagacttccccgcccgtgacgcctgcaacgacaggcacggctcctccctccagtgcaacgacgaaccgacagatgctctttgctagctcttacccgttgctgtttctgacaatgtccactgtgttcttcatctcatgagcaactgataatctgatatgctggtaatcgatagccctctgtatattgt

SEQ ID NO: 34899 - DNA, 1654 bp, Zea mays
  Clone ID: UC-ZMFLMO17339H07_FLI
gcatgtcatgttcatcccaagcgctggcatgggccacctcatcccattcttccgcttcatcgcggctctcgctgggcagagcgtcgacatctctgtggtgactgtccttcctaccgtttctgccgccgaggaggactacttcaccagcctcttcgctgccctcccccgtgtccgccgcgtcgacctccacctcctgccgttcgacgcgtccaagctcccaagcaacgaccgcgacccgttcgttctccggtgggaggccctgcgccgctcagcgcacctcctgggcccgcttattgccggcgccgccccacgcgtctcggccgtcattacagacgtgaccctgacctcccacgtcatccccatcgccaaggagctcggcgtccagtgccacgtcctcttcccctccaacgccaccatgctctcgctccttgcttacacccctttacacctcgacaagaaggccgagcaggggagtgacatcggggacgtcgacatccccggtgtgtgtcgcataccgcaatcttgtctcccgcaggcgctgcttcacctcgacaaactcttcaccaagcagttcatcgacaacggccgcgagatcatcaacgctgacggctttctggtgaacacgttcgacgccttggagccggtggcgctcgctgccctgagagatggcaaggtcgtcccggggttcccaccggtgtacgccattggcccactcatgtcgcagcaacactcagttgacgaaggtgggaaggaagaaggatcgggctcccccgttgcctggcttgacgagcagccagcgcggtctgtggtgtacgtcgcgttcggcaaccgctgcgccgtgagccatgaccagatcagggagatcgccgccgggctcgaggcgagcaactgtcggttcctttgggtgctcaaaaccacaacggtggatagggacgacagcgccgtgctgacggaattgctcggcgaggagttcctggagcgagtgcagggtcgcggcctcgtgaccaaggcgtgggtggaccaggaggccctgctgaagcacccggccatggggctgtttctaagccacagcgggtggaactcggtgaccgaggcggctgccgccagcgtgccgctgctggcgtggccccgcggcggcgaccaccgcgtgaacgccatggtaacggtgagcggtggggttggggtgtggatggagcactggagctgggacggggaggactggctggtgaccggggtggagatcgcgaagaaagtaaaagaggtcatgtccgacgaagcggtcagggcaaggacgacgaggaccgccgaggaagcggccaaggcagttgcagagggtggcaccagctaccggagcatggaggagtttatttccagcgtcaaagcaaccgtggcgtcttgattgcgtcgtggggctcctgatttccacaagtttgtgtcccctactcccctaccctaccttccactgatggggagtccggagttgtgacgtcgttgtcgtgtggctggttgcagtgtcaaccaaaacagttctcacacacgtgagttgttgggaggtaggtagcatgtactatcacgtacctaccccatcaagaatagtgcgtcatctgtcatcttgtgatgtcatcttgtaatgaaataaaaacagttgcatttt

SEQ ID NO: 34900 - DNA, 695 bp, Zea mays
  Clone ID: UC-ZMFLMO17340B06_FLI
gccatacacgagggttcgtcaaaggcagggaagctgcgtccctgggatggccctttcctttgccacagttgccaggaaaagaaagaggcgatggaggggaagcgtcactcgcgagactcctcgtcaagaaatagcgggtcaagtgaatagtgactaaagccaggagtcatcttgaggcgaccacctagcggtgtgacgagctaactcttgttgcagttgtcattgtagcagcacttcctctatacatggattaccattggacatagacagatgttggaacttggatggtgccatgcgtacatatgttggagctaatgcggtaatggaccgtcggccaaattcaatcgcctctaggtaccacaccggcgacggcgtcttcggcaaggcttgtagcagtaactcatgcaggtagtgatgacaagggactgttagcgaagaatgtcgacagtggccaatggtcatgtaaattgttcatcgtatagagaggtgcaagtgacaaatagccacggttttgtaattctgagctaggattagctattgagaccctgtaattcgtctgggcagacctcaaactagaggtcaacaacgtagcctggcctattgtagaatgtatcttgctctacagtcttcatgattcaacgctgtaattaggctgttgccagtgcttctctgtcatgttagctatcgactccact

SEQ ID NO: 34901 - DNA, 594 bp, Zea mays
  Clone ID: UC-ZMFLMO17340C08_FLI
gcattatggtggtcgagattatttctacggcagctctacaaccaagaaagcgacagaatcctccactgactacaaaggggacaagaaagatccagtcgcagattctcatggcgactggtggcaaggctcattttattactaagagaacctggtggcctctccttggagaacaaggaacagaaggagggcagtgaagctcggtttccttgattgctagcagtattatcttgtgtcatagtggacccgctttcgtccagcggtggtgccaatatttagaagcatcacctggcctgggcagatgtagtgtgcgtcttatagtctctgctttagatgtgcaatgtaacgaagctttagcacagtatgaactagaccgcataaaagaatccatgtccattccgccagtaatacgagcgggttggtatctgactccttagagtcaaaagtctgtacaattgtatcgtcgctccaaagcaaaaaaaaacaataataatgtgctggagaagcggcgatgacttcacattgtacacctttaccagctggaatttgacagaagtttggaaactgttcttgtcaattgcattttacagtgttatc

SEQ ID NO: 34902 - DNA, 1317 bp, Zea mays
  Clone ID: UC-ZMFLMO17340C10_FLI
gttttttttctctcgtaggacatggatgggcgtgaggttttcgtgaagctagcgtccgacgtcatttccaacaggaaaaacgtgaacctggcccacataacgcccacgaaggaccacatcttcgagaccccgcacaaggtctacgtcggcaacctcgcgtggtctgttcagccgcaagacctgagagagctctttacccagtgcggaaccgttgttagcacgaggctgctgacggaccgcaaagggggcaggaaccgagtctatgggttcctctcgttttcttccgcccaagagcttgaggaagcgttaaagctcgacagaacggtatggttcaattcaagtttgaagtttcctgttccagtagcttgtttttttgtttttcacagatttgatcagctctggttactgctgttaattagtctcgcatgatggcgttgttatcaatgatagaggagaacttaaagcatgtttgttgtataaattgtcataccttatctaacttttctgtctaagatcaattcggacgactaatcttagataaagtatgacacagttagtcacgaaccaaacagacccttggatttcggttgacttgtactggctcctttaaaattcttgcgtaatccgcgacccgaatggcgcagttctgagaactccagccgccctaccactattcttctagataaagtttggatgactttgcccaccggacaagaagagtaatgactgtttgtggtaatttatagtaataaagagagttagtcatgtttagtagccccaggtgcccaatttaactccctgatccgaccacctgctgctagtagcccagtatggttctctacttgtgtggcttgtcaagttgtcctcctacccaatgatattgctcagcaccttggcttacatcacttctttgcttctgcaacaggtcttcttcggacgggatatcgtagtgaaggaagcccatgtagagcgccagacgcgctgagccgctgagtgttacccttgagaactgcactttttttgtctgcctcgttgactgactaagctcatgctccaggcacaagctacacagctgacgaagaagcaattgagcggttcatcgcgaaagagttaaaaaaaaaacggtagtgtaaattagtaccattgctgcaactttgtcagcgccgccgtggatgctggtgtgagaaattctaggacgaactgagaactggtattgtagtggtaatacatgttgttttagcttcttataataccctccatacagtaatagtgctccttcaccacacgtttctaatgtctcgaattttgtctagaaag

SEQ ID NO: 34903 - DNA, 663 bp, Zea mays
  Clone ID: UC-ZMFLMO17340D01_FLI
ggaagatgacattgttggagagaccaacgatgtgcagaaactgaaggaggagcttaagtatgagaggcagaggacgaaggatgcgcgcgaggacctggagaaggacaggcgtgctgcagaggctgcaatgaatgaggtcacgaccaagaataagatcctggaaggagagaacgggcggctattgatgcaggtagagcatttgaaggaaaatatgaagatgaagcggatgggtataattcagatacttgagagtcgtgatcatgaattctggaatgcaaatctggaagccccagttcctgtctgagtctgaccgatccgtgtcgaaaacaagcaaggatgacagagataagaagtagctagcccttggtcattgctagttgaatagaacagcaaggaatgccctgtgctggagaagtcattgcttgcttgagctcgtcgtcctctgatcagctttcagcagccaaacagggaatgcccaagttttgaagactcggatgttcctctactatggaaagctcttcaggagaaatatctaaaatctgtctataaatataacatttcttgtaagctatctaggtacttatctaatatgagcaacacctgtacttgatcgctctaccttacaaatgctcatcatcgctattatctatggcctattgatct

SEQ ID NO: 34904 - DNA, 2092 bp, Zea mays
  Clone ID: UC-ZMFLMO17340D09_FLI
aagcaagcatcccagcttccaaaggggagacaacccgagaagcgcttccccatctccccccaacagaaactgcgtacgatctcgtaaattgcctgggagttaccaacgccgcaaaggtttttactcccttgcctggcgaaaccgcacgcgcgggcgggcaaccaggagagagagagagatagagagagagagagagagagcagggtatccctctgtttctccagcagccatgacgtcgtgctcgggaaacgccacggtggcatgccgggatgacgcgcagccgcacggggacgcgccctgcgtcatcgtctaccccttactcgccaagactggggaggtccacatcccggtggccggagacgaggcgccggccgtgcccgtgctcacgagcaagtcgcccgggcggcttgccaccgcggtgaaggaggccttgtccgtctccctgggagcggcgttcccgatgacgccgttggtgtcgtccagcgacgcgcatgcagaggcgcggtcgattctcggcctcgcgctcccgatgattctgacgggcctcctgctctacctccgctccatgatttcaatgctcttcctcggccgtctcggcggtctggccctcgctggcgggtcgctggccatcggctttgccaacatcacggggtattccgtgctctccggcctcgccatgggcatggagcccatatgcggccaggcattcggcgcgggcaacttctcgctcctcggaatcaccatgcagaggacggtgctgctgctcatcgcggcggccgtccccatcggtggcctgtggatgcacatgcggcctctcctcctcctctgcggccaggacgccggcatcgcggcggtcgccgagacctacattctggcctcgctcccggacctcgtcctccaggccttcatccaccctgtgcggatatacctccgggcgcagtccatcaacctgccgctcacggtctgcgccgcgctggccattgtcatccacctccccatcaactacgtcctcgtcaccgtcctcggcctcggcatcagaggggtggcattcgcctccgtgctggcgaacctgaaccttctcctcttcctcgtcgcctacatcctcttcaagagcgtgcacaagcgcaccggcggtttcttgctctcccgcgagagcttccgcggctggggcgagctcgtaagcctcgcgctgccgagctgcgtcagcgtctgcctcgagtggtggtggtacgagatcatgatcctgctgtgcggcctgctgctgaacccgcaggccacggtggcgtccatgggcatcctgatccagaccacgtcgctcatctacatcttcccatcctccctgagcttcggcgtgtccacccgcgtcagcaacgagctgggcgcgaaccggcccgaggaggcgagccgcgccgccgcggtggggctcatgctgggcttcgccttcggcggcctggcctcggcgttcgcgttcctggtgcggaacgtgtgggcgagcatgttcacggccgacccggcgatcatcgcgctcaccgcgtcggtgctgcccatccttgggctgtgcgagctgggcaactgcccgcagacgacgggctgcggcgtgctgcgcggcagcgccaggcccaaggacgcagccagcatcaacctccggtccttctacctcgtggggacgccggtggcgctcgtcctagccttctggctccactacgacttcaagggcctgtggttggggctcctggcggcgcaggccacctgcatggtgcgcatgctgctggtcatcgggcgcacggactgggcgtgcgaggccaagcgctcgaggcagctcaccggcggcctcgtggccgaggacagcgacgacaaggctggcggagacgagaagtcgcgcttgcttggcgacacggacatcgagcaagcgaatgctcactctgatcggtgttgatagctacagcgagagcccgcatgtgtgctctaatctactcttttccccctttcctatttccctcattttctgtggcgggggaggaggaatcagaggctgacagagtgacagttttgttcaccatttggtaattagcatgtaaagattttgctggtt

SEQ ID NO: 34905 - DNA, 1793 bp, Zea mays
  Clone ID: UC-ZMFLMO17340D11_FLI
gttgagccacatacccttgaatcctgcgcatcagttagatcattgggaagtgttattctcactggtaattgcaagttattgtaattcttgcaagtcgccgcggaagatatctggacaaatgatagtagatttatattgtgatattgggattatagaagacatcaacttgtcataattgttatgtgatgttgttcatggtcttcatcaatttgattttcaacaatcaacattatgagtttggtatcatcttaatgggtatgtcagtggtttcataccatactttggtatctacccatggcattaatttttggctctactttgttgtggctaatgatattatcctggagacccttctacttattgtgcattgaattatcttgtagctcaaaggctgtggtaaggttacaggcttatgggtgacctatctctattagttcatattgacacattttttgttcagtttcatttatccttttcttgtataaatttttctctatcctgacttctagggagaagagattatagaggtggtgactttagagataggtttgataggaggcgctcacctcataggaggcattcccctgatggagattccaggggccatcgctcccttcgtgaccgacggccaaattcccaagaaagggaatctagctattcacggtctcccagtaggaagagtgaaatgaggcatgagaagaagcctgatgatggagaaactaactcatctaggagtctcagtgtctctgacaataatgatgatagaaaaaaggagacactgttaagtggtgatgataaagaggatcacgaaatacagctcaaacaaataagacaggacatggaacttttgcgtgatgataaatctctcttggagataattttggatgagaagaatgctgaagtgcgcaagatttctagcagattaaatgatcttgatctgcagctaaggaaggagaaagaggaatgccacaggatgacctcaaaaattaaaaagttccttaaagcccatgctcgctttttgaaagcacaggaagaattgaaaaggtcacaagctcgttttgagagactcggtgatttacttgcttcagatattctgaagcgtggtgctaatgaagaagtttctagtatcaatgttgatgaagatccaaatgttccttatgaaaggagcccaaatgctgctatagctaagaagagatcaataccatactcaacaagtgaagaagcgaaagccgtgaagaaaagaagagagcgggactctgacacaactaggccagataaatataggtttgaaggtactattgcaggatttgaaaaactaagcaagggaaccgagccaacaaaatctttatatttgaagaagaaactgtgggaagatgaaaaggataagataggcaactttgtctcctcagccaacaccgacaaggtcaaagaatctccggtcaaacatgttttgccctccactggtatggctgctcatgctttggacgatctgtttgaagctgttgaactggaggatagacgtgacacatcaatagaaaatgatgctgatgacgaaactaggtcgcctgttatgcccccacaaccaccaccggtggttaatacttacgagcagtacgaggctgatgatgaggaagtcgacgtggaataagtagaatgccgagatggtactggaatatgagctatagctctcgcgcctgtgtaaagcattatgtaatatgtatttgatgctggagtttaccttgcataaaaagaatcgtcattaatgatccttggtggatgcggtttaagcactc

SEQ ID NO: 34906 - DNA, 1026 bp, Zea mays
  Clone ID: UC-ZMFLMO17340E04_FLI
ctcctaaataataggctagataacttctaacagaaaggagtaatcccttcctacataataggctagatatcttttattgccttaatcctagcggctaattggtttgggcagccgcctcctgtgctgcatgctcggctgccctgcgtatgtcgcgggcgcgacgtcgcctggagtaggggatgccgtacatgacacataatctcttcactctctgttctgcacttgcttcatattgatattcttcttgtgtatgggttttttccatttaacttgcaatgcggaccagtacaaatctctattttctgaccacctaattatttatttctattaactggtgctgtcttttgttcaggaaatatcgaagttcagatatgagctatgcccaagatacatgaaagagcgcaaattctggcgggtatattttttgctagtaaacagctatatagccccgttcgagaagaaatccttggaggagctgaaagtgaaagcagaggaagagaaaagggattcccagaagcaagcatcccaggcatctacaactttcgaacccaaagacacaaaagcgccaatcaagacctcttcaacaaatccagaacatgatctggatgtatttcttctgggagatctgggtagcgacgatgagggacctgttgttgatgatgatggcctagatgaggacttcgataagattgatgtgaccacgggattggaaagtgatgacgatgacaaaaaaatagcaacagggaaagcagaagatgcgaagtagtagcctatggttttacgattcgacagatgaccacaatgatagcgaactttagtattccaagatggtattgtatattagttgatcgcatgtcatcaattcatttgttatctcccagaaaagggatgttaaacacttgttttttttttacaactttcgatttttaactaaactcacacatcttatcgatgtttgtgactcctcttttcttattaggagttttctgcatatgtactagtctatctattgaattgaacttcagt

SEQ ID NO: 34907 - DNA, 2575 bp, Zea mays
  Clone ID: UC-ZMFLMO17340G06_FLI
aagtaccaccaaatacaaacccctatcaatgccactgagcacaaagggcccagaatggctgggtccaaccttacaagcaatgcaagccaacataggatgccagacaaccttagttctattgacagtgcttatggcgtatgttgtatggtactttgttttttgtggttggcagatcctgtctgcatgcatctatcatctatgtttgttccctttcttaaattatgccacaataatacaatataagctatgcaatttatttattactcaatttactgtgctgtttattatctctttcagtcgattcctgcagtgtagagggccatttgctcgaaggagacaccccctagttaatgctgcagtggtttcagagattcaaagatgcataaacaatggcattgagttccgtggcgatttattaaatttcagaaaagatggatcgccactgatgaacaggttgcatctgacccctatatatggagatgatgaaaccataacccattatatgggcatccagttcttcactgatgctaatgttgatttgggaccattgccctgtccaatgacaaaggaaccagtgaggtcaacacggtttgctccagataactcatttcgacccatttctgtggggccagagcacagcaatttctgccggaaatattctagcctcttccagttaacggatgaagtgctttgccaaagtatactgtcaaggttgtcaccaagagatatagcatctgtgagctccgtgtgcaggtgtttgtatcatttgacaagaaatgaagatctctggagaatggtttgccagaatgcttggggtagtgaaactactcgagctcttgagacggtgcccgctgcaagaaggttgggctggggacgtctggcaagagaactgaccaccctggaagctgttgcctggaggaaattgacagttgggggtgcagtggagccatctcgatgcaatttcagtgcctgtgccgtagggaaccgtgttgttctatttggtggggaaggtgttaacatgcagccgatgaatgacacgtttgtattggatttaaacgctagcagtccagagtggaggcatataaatgtgggcgcagctcctccaggtcgctggggccatactctgtcatgcttaaatggctcttggttggttgtttttggtggatgtggaaggcagggtctgcttaacgatgtattcatgttggatttggatgcaaaacaaccaacctggcgtgagatacctggagttgcacccccagttccacgttcatggcacagctcctgcactttggatgggacaaagttagtagtttctggtggctgtgccgattcaggtgtacttctcagtgacacatatcttcttgatgtaaccatggataggccagtttggagagaggttcctgcatcctggaaaccgccttctaggctggggcactcaatgtctgtctatgatggtaggaagatcctgatgtttggtggtcttgctaagagcggccctctgcggttcaggtctagtgatgtgtacacgatggacttaagtgaagaagaaccttgctggcgatgcctcactggtagtggaatgcctggggctggaaatccagctggcgcaggtccacctcctcgcctcgatcatgttgctgtgagcctgccaggtggaagaattttgatatttggtggctcagtggcaggtcttcactcagcatcacagctttatctgttggatccaactgaagaaaagccgacctggagaattttgaatgttccagggcaccctccccgattcgcctggggccacagcacctgtgttgttggaggaacaaaagcgatagtgcttggtggacaaactggggaagagtggatgcttacagaaatacatgagctctctttggcaaacaactcagtctgagttcatggtggacaaaccggggaagagtggatgcttacagaaatacatgagctctctttggcaagcaactcagtctgagttcatggtggccaaaccggggaagagtggatgcttacagaaatacatgagctctctttggcaagcaactcagtctgagttcagcaatggttcttagtcatgctcctaatcaggaatggttcttagtcatgctcctaatcaggaatggttcttagtcatgctccttgcaaactaattgcggcttcttatgcgacctgaagcttgattgccttcaccttcagagtatcatctggcagctacatggctttacttggaagatgaaatggttttcactggtttgctcgctttatgtaggcagagggtagtgatatgttcatttttattgccgtttgcttggccttctttttaccagataattacaattcataaactactattgtggaatgagtaccagattttatatgtattcttagatgtttctgacttgcaatatgttaggaaaacaaaggactaccttgtacatagtttaagcttttgttgtacggtacatggagaccttgatgctgctgtcttgcggcacaggcgcacaactgctgagatggcgtgatgtaaggtgatcaccgatcgaccatgtttttgtgcagaacttgt

SEQ ID NO: 34908 - DNA, 1705 bp, Zea mays
  Clone ID: UC-ZMFLMO17340G08_FLI
ctcgacctcccaagatggcatcgcctccacccccgcagtcgtagctgccgctgcattcgaatcgcagccgccacggatctagtggcccgacgtggaaggcagaactccctgaccttttctctccaccctaagcttctgcacgcgcgcaccgcccctcaccgtcggcctcttctcctcttcatccgccacaggatctcgcctcgccgaggccatgtaccgtgccgccggggaccacatccgctccctcaaggtgaatagacaaaaattcgggtgagacaaattttcctggtgttgtacgaggagagggcagccagcggccaccgggagttcgggtcctaggagccaccgacttcagtcgcctgctcaaggacggcgagggcggtgcctacctgacaagcccgcgcggcggcatggtagttgccatcaagaaactcaatcccaatgacataaggttcgaatgctccattccttagacaatgccaacgtcctgaaattttactcctggtggtccttttgtgctttcccttgcacacaaacacaaagtgaactttcttttgtgatcagggcactcttcttgttatggatcagataggatacaatgctggtcgcacaccattcacagacatctcaaacaccatcattacaggtaatcaaaatgaatcgaactcgcttggaccaattgtcgatgctaaggaacgtaagaggcaaagggatagggaacgatatgctgcgatgactgttgaagaaaagaatgagaaaaataggaagcgtcgtgaagcacgtcaacgaaataaaggactatcgatagagccactctcatccagagaaggcgttaatacggaccagacatgtgaggtggttagctttccagatgactgtagcaccattgatttcacaaatttgtcaacataagacattgcagatggagacgaacaagtaaatctggatccagatgatgacaacgattggttgcataggaacgagacattccaggcaaacaacattgtcacaagtaaagaccttctaacaccaggcacttcctattccaacaattgatgtcattgaaggagctgcccttggtggtgggctagaactgggagacaatctaacctcttcaaaatccaacaaaaaggttgcaaagtagacatcccctatttctatagttcatgcttcatggatatgatggtcacacttcatggtctccggtgctgagggaacagtgatagattgatatgaggtttgcaggtcagagccttgcttcctagctgtagctagaatgcatagcgttatgcttttatcagctttgcttggcctctacatcacacaagttgtctgccttgagggcattcattcatgtggccaagtgttggtttgtgatctcccttgctggtgaattcctggagaccctccgccacagaagaagaagtccctatctaaagcttatcgtatatacaaaattaaagtacttctgatttattaaagtataattatttgctcgtgcaaagacaatttggtcatttgttctctctcttaagcttagttcttgttaacaattaggccttatggatgaagcattgccaatctacccgtcaaatgagtcttctctttgttttcatgatacaagagttcagttagacatgtcaatctgcaagtactgaggcaatgatatggttcaataaattgaggacctgcgcaaacaacactc

SEQ ID NO: 34909 - DNA, 1652 bp, Zea mays
  Clone ID: UC-ZMFLMO17340H04_FLI
tcccctcctgcacgcaacctcatctcgtcctccagatcctggatggccgtcctccttgataccttgcctcgcgagtgctctcgagctaggactgggagaaaacaacaaacccgcgttggatcctgtatcggttagtccttgccttcaaggttcatgttgttttgttttggtggtcgagcatcgcatgttctgcttctggttccagatctggagaaatttctaagtcgtcgtcgtcgtcgtcgttcggttcggagcggatctgaggcgacgatggctggaggcggcgggatctcttggtctgcagtcctgcttcacctcgatggatgatgtctctgcgctgataattattggatcaatttcgataattattagtagatctatgagatatgccgcctggaagaggcgaggtaagctgcagcatgtaaaagtctgcgtgcgtcgacagcaaaaaagagaaaaaaagatgtgacatcctagaggaggcctttgccatgatgggtgcgctcgcatggcaggccaggtattaataaaaagatgattattgtgtgccgggggaggagatcgcacgggggttgatgtttttggccccggggtctcctccctcatcttgttccgtgttcctgtatccgttgtttccgcgcctgttggtccgctgcgcacgccggatttttgcatcgagcacggagatctacaacaaaaacatggagctacgacgcgactcccaaggtacaatcggtaattatgttcaaacaatttttaagtcgttctgcgctccttctattacgagcaacgttttatattctgtgcttgtataatgaatcgaagaaatcctgacaccaatcgaactgaagatcctgaaacgcacgttaataccgttgacgtccgcttcacccagctcgattttcagtcttgtaatactaatcgctccatgagtctgaagtgtgcaaaaatttaggtcgcagctacacaaatttacatgctggttctgttcaacccgtgaatctcctattttggaaaggtcacagcgtttttatttcattctatattatatttcagtctggactaatgttgagatctccatatgtatctacgtctaagcatttttcatttgtatttaccatgttggtcaattgggatatttgtttcttgtatgttagcatgtttgaaccatagcaattggtggacgtgtgtagagaagattgcaaaactgcagtatgatggattccactattcatcaaccgagatcatggcgcgcttcaatcgtggctacgctgatggggaattgatccgttatggctcgtggctgtggagatgtggaactcattggttatagtgtgcttcaatcatgggtcatggcgatgctgatggaactgatttgttaccaaggtttaagttttcgctaccgttggacggcctgactggtactttgccctgttgactgtttgagaacgtactgcccaggtttacttaatacttgctgctttttgacggtactgtacatattgttcgacaatttatttcttggcagttcaattcgtccatttagaatttctaggggcacgagagcatgtgttaccctggagatcaatttcatgctgctttttgtaattgatcatgctgctttttgttacaaagttccctattctattttc

SEQ ID NO: 34910 - DNA, 1640 bp, Zea mays
  Clone ID: UC-ZMFLMO17340H09_FLI
gggcgcctctgcgcggtcttcttccccgtcatcgccatcgccgaggccgttttcttcgccttcaccgactgtctcgcggacctctgcactgactccggctcctcgcactcgcgccgcttcggcgcgggcgcgtcctcctccgccgccaggaacagtcggagcaaccattgccagccccaccacagacctttcctacgccgcgccgctgcgggtggatggacctcccccaacctccgccagctcgcacgcctcgccgacgagtcccgatgctgtaaaaaaatcgatccaagcctactccaccttttgctcttccttggtttctccgcctccatctcgcaattccgtttcatctgactctgtttcgattgaactgaattggactaaatgaagtctcggtgaacgaggtggaggcgctctttgagctctacaagaagatcagctgctccatcatcgacgacggcctcatccacaaggaagaacttcagctggcactgttcaaaactccaagcggcgagaatctttttcttgatagagttttttatttgtttgatgagaagaaaaatggtgtgatcgagtttgatgagtttattcattccctaagtgtcttccaccccttggcaccaattgaagacaagatcgattgtatgtatgctaactgcagaaacggtggtcaatataataataatatgtaggtttttttatatttatatttgcagcatgcatttcgtgtgtttcagttgcatttaggttgtatgacttgagacaaactgggtttattgagcgtgaagaggttaagcaaatggtaattgctattttgatggaatctgatttaaaattatcagatgacttactcgaggccatcatagataagacatttgaagatgctgatgcggataaggatggaaaaataaataaagaggagtggaaggaatttgcgttacgccaccctaacctgttaaagaatatgacactgccttatctgaggttcacctccgatctcctgatctttatgaaaagtaggttagcctgatgtcctgtcaaacatattaatatgtgcagtctcttgcaaaaaaaggaactgcacagaaaaaaaaggggtgatgcgtaattacaaggcagaacttcaggagagcttactttgctgccttttgtttttttgttaacgcaataattgctgattccgtggtccttaaaaatccagggacatcacaaccgtcttccctagtttcgtcttcaacacggcggtggaagattagtcgctccaattgaaggcaataaagcagtactggggattgcttgaggtgcacaaggttcctgaaacctgacggctgttggtcgccttcaaccaccgagaatccgatgtgttctgagagcatcaaggcagccgccacctgaccatcactcctgctataaattataaggctcatccggggtggcagatcggcagcgggaacttacctgatataatttcttgctgccgtttttgcgcagcaatggattgagagttggtagctgtagatacatctagcttccattctgtacgtagggatccaggaactgtaaatacgttctatggaattgtatcggaaagttcctagtacgccagccagatctagaataagccagagcttgtttcttgc

SEQ ID NO: 34911 - DNA, 1484 bp, Zea mays
  Clone ID: UC-ZMFLMO17341B03_FLI
gacttcctaaaattttccttctcttctctgaccgactgatcttagcgatcttctccctcgaatctaagcgtagcggtagcgccgatcctgttcctgtgccgtgccggcttggattgaaaaataggagggagaagatcaacgccgccgcggtgcggcctgtggagtattaaacaaagatgcgcagagcccggctgcgccggcagctagcagccaacgcgaaacttcagcttccgctccgccgtccccctcccggacccaaacaaacaaaccatcgtcacccaatagccaccggccaactgtcaagcactccttcggtgcttccccatctgcgccccccgatccctccggacccgcgagcgaggccgtcgccggcgcgcgcgagatttgagctgaggccatggagtcaccgttccgggccgacgtggtcaaggacaaggcggcgctggtcaccggcgggggatccggcatctgctttgagatcgccgcccagctcgcgcgccacggcgcgcaggtcgccatcatgggccgccgccgggaggtcctcgacaaggccgtcgccgcgctccggtcccagggcctccgggctgttggtttcgatggagatgtccgcaaccaggaggacgcggccagagtgcttgctgcaacagttgcacattttggcaagctcgacattcttgtgaacggtgcagctggcaacttccttgcttccccggaggatttgacgcccaagggattcagaactgttcttgagatcgacactttgggtacatacacaatgtgctatgaagccctcaagtatctgaaaaagggtgggccaggaaaaggcccgtccactggtggactaatcattaacataagtgcaacactgcattacagtgcttcttggtaccaaatccatgtctctgctgctaaggctggggttgatagcatcacaagatcactggctctggagtggggaacagattatgacattagagtcaacgggattgcacctggaccaattcaagacaccccggggctgaggaagcttgcacctgaagaaatgagcaaggggcttcgagaaatgatgccattgttcaaatttggggagaagcgggacatagcaatggctgcgctctaccttgcttctgatgcaggcaaatatgtaaatgggacaacactggtggtcgatggaggtctttggttaagtcaccctcgccatattcccaaggaggaagttagggagctgtcgaaggtggttgagaagaaggttagggcctctggtgttggtgtaacatctagcaaattgtgatttgcatttgtgtgatctgtagcatcgatcaatatgttattacagaactttattgtctgtgtggctcttgcaatctaattagcgagtttgtttagttgagtaacttggcatatttacagtacatttctttcttctaagttccatttgagacagttttgattgatatgtgatgccagccaagatgtttgtcgcc

SEQ ID NO: 34912 - DNA, 1367 bp, Zea mays
  Clone ID: UC-ZMFLMO17341B08_FLI
ccgcatgcctccctgtgcggcggggaagcggagctccatctaccgcggggtcacccggcataggtggacaggtcgatatgaggctcacctttgggacaaaagcacgtggaatcagaatcagaacaaaaagggcaaacaggtatatctaggtgcatatgatgatgaagaggctgcagcaagggcctatgaccttgctgcattaaaatactggggagctggaacacaaataaatttcccagtatctgactatgcaagagaccttgaagagatgcagatgatatccaaggaggattatctcgtgtctcttaggagaaagagcagtgccttctacagggggttaccaaaatatcgtgggcttcttaggcaacttcataattccagatgggatacatctttgggactcggcaatgactacatgagccttagttgtggcaaggatatcatgttggatgggaaatttgcaggaagctttggtctagagaggaaaattgatcttacaaattacatccggtggtggctaccaaagaagacaaggcagtcagatacatctaaaacagaagaaattgctgatgaaattcgagctattgaaagttcaatgcaacagactgaaccctataagttgccttctcttggcttcagttctccatcaaagccctcttcaatgggcttatcagcatgcagcatattatctcagtctgatgcctttaaaagcttcttggagaagtctacaaaattatctgaagaatgtagtcttagcaaagaaattgttgaaggaaagactgttgcctcggtacctgctactggatatgatacaggggcaattaatattaacatgaatgagttgctagtacaaagatctacttactcaatggcccctgttatgcctacaccaatgaagagtacctggagccctgctgatccttccgtggatccacttttttggagcaactttgttttgccatcgagtcaacctgttacaatggcgacaataacaacaacaacgtttgcaaagaatgaggtaagttcaagtgatccattccagagccaagagtgactgcacgagcttactgaagcaggatattttagattgttaataaagctttggacatttcaatcgatgaacaacaggtcaaagacagcatcccgtgcgtcaactagattctttttgtcaagcttttgatgtcgcaacttgtgagcaatactccttgtttatccatacttcataggacatgaatagaaggtatgacaagtgcaagcatagttatgtaatatacagtggctagttgccagaaaatgagatttagttgtgtagagctgtttgtacatattgagatggttgtttcagttcaatctcaacaggtttgagg

SEQ ID NO: 34913 - DNA, 1367 bp, Zea mays
  Clone ID: UC-ZMFLMO17341C06_FLI
cacacaccgcgcagctagctgtcaccggagcaagaaggaagaaaaaccagcggcaccgatcgatcgacgacacgcgcgcgatcgaggtgaggagcgaaagaaaaggtggccttttcgaagccgccggacggagtgtagcgctagctagctccccaggccggagaggaggatggtgggacgaggagcggcgacggccctcgtgtgggcggcggtggtggcggtcgcgacggtggtgtcgcgggcgcagcagctgcaggtggggttctacgacacgctgtgcccggcggcggagatcatcgtgcaggaggaggtgagcaaggcggcgtccggcaaccccggcgtcgccgcgggcctcctgcgcctccacttccacgactgcttcgtcagggggtgcgacgcgtcggtgctgctggactcgtcggcgggcaaccaggcggagaaggacgcggcgcccaacgccagcctgcgcgggttcgaggtgatcgacagcgccaagacgcggctggagcaggcctgcttcggcgtcgtctcctgcgccgacgtcctcgccttcgccgcccgcgacgccctcgcgctggtcgggggcgacgcgtaccaggtgccggcggggcggagggacggcaacgtctcctcggcgcaggaggcgggcgcgaacctgccgccgccgacggcgagcgcgagccagctgacgcaggcgttcggcgccaaggggctgagccaggccgagatggtggcgctgtcgggggcgcacacggtgggcgcggcgcgctgcagctccttcgcgccccgcctctactcgtacgggcccagcggcgcggggcaggacccgtccatggaccccgcgtacctggcggcgctggcgcagcagtgcccgccgcaggggaccggcgccgccgacccgcccctgcccatggaccccgtcacgcccaccgccttcgacaccaactactacgccaacctggtcgccaggcgcggcctgctcgcctccgaccaggcgctgctcgccgacccggccaccgccgcgcaggtgctcgcctacaccaacagccccgccaccttccagaccgacttcgtcgccgccatcatcaagatgggtgccatacaggtgctcacaggcacagccggcaccgtccggaccaactgcagggtggctagctagctcatccatgatttacgtctacctgtagactcatgtgcttatataaaatcatacgacgaaactgtacgtacggcgtagagtggtgtggcgaggtccaatgattcagattgtacgtacgtgtccatcgatccaactgtagttgtgtacgcagtacagtacgtgctagctacggatcagttgcttatatatagcttgtgcgtttttttac

SEQ ID NO: 34914 - DNA, 851 bp, Zea mays
  Clone ID: UC-ZMFLMO17341D03_FLI
cgagaacacggcggggccggcgaagcaccaggccgtggcgctgcggtgcgactcggacctctccgtcttctaccgctgcgccttcgaggggtaccaggacacgctgtacgcgcactcgctgcgccagttctaccgcgactgccgcgtcgcgggcaccgtcgacttcgtcttcggcaacgccgccgccgtgttccaggactgcgcgctcctcgcacgccgcccgctgcccggccagaagaactccgtcaccgcgcagggccgcctcgacgccaacatgaccacgggcttcgccttccagttctgcaacgtctccgcccaccccgacctcctcctgcagcagcagcaggcccagtccagcaacagcaacgggaccgcgcccccggccacgcagacgtacctcggccggccctggaagccctactcccgggtggtgttcatgcagtcgtacatcggcgacgtggtgcgccccgagggctggctcgcgtgggacggggacttcgcgctcgacacgctctactacggggagtacgccaacaccggccccggcgccgccgtcgccgcgcgggtcaagtggcccggcttccacgtcatgaccagccccgccgaggccggcaacttcaccgtcgcgcagttcatcgagggcaacatgtggttgccgcccaccggcgtcaagtacaccgccggactcacgtcctgatcctctcttcaaacccttgatggatgtaggcttagtactatacgtagtgtttgcaaccgtatactcctagcactttatatatgcttgttggaacttgctctctgctgctaggagatccaacgggggagtagtgacgtaaacagggttctcgcgt

SEQ ID NO: 34915 - DNA, 645 bp, Zea mays
  Clone ID: UC-ZMFLMO17341E12_FLI
cctgcgaccgctgcgtgcgccagaccgacatcgtcgccgtcgacgtcgcgcaggtgggctcgtccaactggaagtccatgacgcgccacagcggcgggccggcgtggagcacgaggcaggcgccggcggggccgctccagctcagggtggtggtgacgggcggctacgacggcaagtgggtgtgggcggagcgcgaggtgctgccgcggcggcggcgcgccggcgaggtctacgacacgggcgtccagatcaccgacgtcgcccgggagggatgcgtcccctgcgacacgcgcgagtgggagtgatgcatcatgtggacgaaccacaccagtgacggcagaagcagaagcagaagcagaagcccaagcgctgaagcttcaactcaacttgaagagcctgcctgtagaattgctctagctagctcctccgtgccactgcccttttgggcttgcctcaaaggtcaccggagacgacgagggagacgactaattaacagacgctgacagagtgacgcgcgagaggagaggagagttccgaaccccccccctctccgctgtactgtacatgagctgctgacgtgtcggataagtagtagtagctagcgtcccggcgggtgctggaaagaataataataataatgtaacg

SEQ ID NO: 34916 - DNA, 962 bp, Zea mays
  Clone ID: UC-ZMFLMO17341F11_FLI
agccaggagaaggcgggcgcgcacacctgctgcttggtgaccacgttcgatggagctgcacaagtactggggcgtggggggccggcggtgcggcagctgcgagggggccccggcggcggtgcactgccgcacgtgcgttggtggatccttcctctgcacgacgtgcgacgcccggcccgcgcacgcgcgcctgggccacgagcgcgtgtggatgtgcgaggtctgcgagctggcccccgccgccgtcacgtgcaaggccgacgccgccgtgctctgcgccgcctgcgactccgacatccacgacgccaacccgctggcccggcgccacgcgcgggtccccgtcgcccccatcggctccgaggccgccgccgcggccgtggaggccatgctgttcggtaccggcgaggcggccgtttccgaggccgacgagcagcacgcggcggccgagcagcagcagcacgcgcacgcgctgaacctcaacgtggaggccaaggacatgaagctggactacctcttctctgaactggatccctacctcagcgtcgagatcccgcgcttccagcacgctgacagcgtcgtccccaacggcgccggcgctgccgtcgagctggacttcacgtgcggcatcggcgttaagcactcctcctacagctcctacacggccacctccctcgctcatagcggctcctcgtcggaggttggcgtggtgccagaggccttcggcggcagcggcggcgggagctttgagctcgacttcacaaggcccaagcctcaggcctacatgccatacaccgggactccccagagccacagcgtgccatccgtggacgtggaggtggtgccggagcggggagacttggctgcggtgaggccggtgccgctgatgggggagagcagggaggcgcgcctgatgcggtaccgtgagaaaaggaagaacaggcgcttcgagaagaccatccggt

SEQ ID NO: 34917 - DNA, 1985 bp, Zea mays
  Clone ID: UC-ZMFLMO17341G08_FLI
tgaatgtccgacctataccaacaccaaaaagcaagcttgcaattcagagagaactgttggctctgaagaagaaggcactagctttgaggagggaagggaaggtggatgagtctgaggaagagctgagaaagggtagtgttcttgaaaagcagcttgaagagcttgaaaattcttccaaaccacctgtagcaaaggaaactaggagctttccatctaatcccccgtacaaggttgaacccccaaatatcaatcttactgatgaggtatatgaacctgaggttacagacaaggatatgcaggatccagcattgctgtcggtgctgaaaaatatgggatgggaagatgctggttcagattctgtggaaacaactgacaaagcatcattttctgcacatgtagttcatcataaatcatcaaaaactaagggccagcttcagaaggaattgcttggtataaaaaggaaggctcttgccctcagaaggggagggaaaaacactgaagctgaggaggaacttgagaaggctaaggtgttggagcagcaacttgcagagatggaagaatcaaataacttgagtgctagtcaaggtgttactactgctggcggggacgaaatattgctagtgcatgcatctgaatctggtacgccagtggttactctgtgtggttctccaagtaaaccgcagattgagacaaccaatcctaatcaaggtgatgtgggagaagaaagtagagctggaaggtctccagccttgtcgcagccagcttttactgatccgttggggtctgaaaaagggtcacattcaccttctgtagtacatgatcgtaatgagcatcagaaaacacaaggagatgatactcttaaagatgagatattacttcataagagaaaagcagttgcctttaagagagaagggaagatggcagaagctagagaagaattgaaactggcaaaacaattagaaaagcaccttgaaggtgctcaacaagacaccatggatggtgtgggtgactccattactcctgctgtggaacagaacagtttggtccaacaacctgctagctccagcaatcacactgacgacataacttctccccctcctgcacaagcgagcaagcggactcaacctcagaaagcaatgtccagccgggaccgtctcaaaatccagcgtgaatccctggctcacaagcgcaatgccctcaagttgcggagagaaggaaagactgcagaagcagatgcagaatttgaactggccaaggagctagagagccaactggaagagtcagacaaccaaagctcgagctccgggggaaagtcaagtgaaccaaatgacgcaagcgtcgagaatctccttgatcctcagatcatgtctgccctaagatccattggttggagtgacatggatttatccatgcaatcctctagcgcacaacctctgaaacctgtgcagtcctcaagttctcaacctccgcaaaaagtggaagccaagtcatctgttgccgcgaccagcaaacctcagagcgagagaagtcaacttgaagaacagatcaaggcggagaaactgaaagcgcttaacttgaagcgggaagggaaacaagcagaggccctggaggcccttcgctcggcaaagcgactggagaagaagttgaactcagcttgagacaatcacaccctcccagattgctcttgttcttttgtcaattgttcgttttggttacctgacatcccaagcgttccagctagaacagagaatcatatcgagtcctatggccctgattggcacagcttgtgagctttgagcaccataaacttatgtcctgtttgtgttcgagctatgagcagtccctttcatgtatgtataaataaaatctgatggacggagattattttcacgaattcatgtatacacaatgttaggggaacgtcaattaagttggaatctgaacatttcatatgttagtcatttgataataatgttttccaagct

SEQ ID NO: 34918 - DNA, 1532 bp, Zea mays
  Clone ID: UC-ZMFLMO17341H02_FLI
cttcgagtcccgcgtcgagcgctacggctccaccgtggtgcgcatgaacgtcccgccgggccccttcatggcgcgcgacccgcgggtggtggcggtcctggacgccaagagcttccccgtcctcttcgacatggacaaggtggagaagagggacctgttcacgggcacctacatgccctccacctccctcaccggcggccaccgcgtctgcgcctacctcgacccctccgagcccacccacgccaaggtgaagcagctgctcttctccctcctgctctcccgcaaggacgacgtcatccccgtcttccgctccaacttctcctcgctgctcgccaccgtcgagtcggacctcgccgagggcggcaaggccgagttcaacaagctcaacgacgtcacctccttcgacttcatcggcgaggcctacttcggcgtgcgcccctcggcgacggacctcggcaagggcgggcccaccaaggcggccaagtggctcatctggcagctccacccgctcctcacgctcggcctccccatggtcctcgaggagccgctgctccacacgttccacctcccgcccttcttcgtcaagggcgactacggggcgctgtacaagtacttctccacggtggcgaagcaggcgctggacaccgccgagggcctgggcctgtcgcgcgaggaggcctgccacaacctcctcttcgccaccaccttcaacagctacggcggcctcaaggtgctgttcccgggcatcctggccaacgtcgccagcgccggcgagaagctccacgagcggctggtggctgagattcgaggcgccgtggccgaggccggcggcaaggtcaccctcgcggcggtggagaagatggagctggccaagtcggtcgtgtgggagtcgctgcgcctggacccgcccgtcaagttccagtacggccacgccaagaaagacctgcaggtccagagccacgacgccgtgttccaggtgaagaagggcgagatgctgttcggctaccagccgtgcgccaccaaggacccccgcgtgttcggcgccacggccaaggagttcgtgcccggccggttcctcggcgaggagggcagcaagctgctgcagtacgtctactggtccaacggccgcgagaccgagaaccccaccgtcgacaacaagcagtgccccggcaagaactttgtggtgctcgttggcaggctcttcctcgtcgagctcttcctccgttacgacaccttcaccgccgacatcggcaaggacctgctcggcagcagtgtcgtcttcaccagcgtcaccaaagctacctccggtccgggcagcgagtgaaccacccggcgtgtcgtcattggctgcggatggatatatgtttggacgtgagtacgtgacagggtcccatttcttagtttcgtccctttaataagatactaggtaagtgctcttgtattgcaacttatgtataaatatgtattatattgtacgagaaaatgttttgtaatctatttgttagcttagccctacataaattttagttagg

SEQ ID NO: 34919 - DNA, 1486 bp, Zea mays
  Clone ID: UC-ZMFLMO17341H04_FLI
agctcacgatctgcattttcctgtggtgctataaacaaagaatcagttgctctgatctgctcagcttctttgttcgaaagcatgacaacaggctgttactcgggtcttgaagtgatagaggagacttttccaatgacattttcagagagcaataatttggagtgtgaggatttgtgggtgtactacatcaaaatgcttcaaaaaaatcttaaccaattgaatctatcaagggtctggccaagcatatcacgcggagtgcacaaatatccctacaatccaaaatcatattcagcgatgttaaccctgagttatctttacagtgtatccaacaatctccgtctcacactcgacaaatgtagtcaaagggacccttctgtaatcaccttgctctttgctttgtcctttgaatggggtaaagctggatctgacaatagaatacacagcctgtttgagagagctctagctgatgataagttgcagaagtctgtcctattgtggcgctgttatctagcctatgaggcagaaatagcctgcaactcttctgcagcacggcgtgtgttcttcagagctatacatgcctgtccatggtctaaaagattatggcttgatggtttccaaaagttgggctctgttctgacattgaaggagttgtcagatctccaggaagtgatgcgtgacaaggaattaaacatccgcactgacatctatgagatactcctagaagaagaaacaaatacatgattctggtttgtgtgaagatcccgaaactgccccgcatgacatgctctgcagttataagtttccaaaggttcatgaaatattggttctgcattgctgttttgtggcctgtaagcatcgaactctgaagtctcaatcaggaacctgctatctatcatcaaataagatggatgggaagtacaatgggcatgccttggattgacaaccttgccaaatatgaccatgttttactatttttgttctttcaagatggaccttgttggctgccgttctgaatatctcacatgattcattatcggtatatagatagaagtggcttcagtgggcccttcaactgcacgataagatcaatgttaggaaggtctattacaaattcctgtacggaaatcatgccacgaacaaaaccgaaacatgaaaagcagcatatatttttgtttgactatcagtaaagcaactgcagccaggttaggggatcctgcagtgtgcttgagtgtccaaacaaaaaggcttcgaatgtatagcttcacctggcgttttgttgaaggtagaaggggacacgttcctgcaccctacactagcttgctgtactaaacatttactgtggtttgttttttaaaggtccccaaagttatggactttaagatgctggtatatactggctgggagcacagataagagaagtagcagcactgacatgacggcctcagtaagtaataatgttagttttcattcgctgaggatgggtatt

SEQ ID NO: 34920 - DNA, 2739 bp, Zea mays
  Clone ID: UC-ZMFLMO17341H06_FLI
ctctgctctgcgctccgcttcccaccgctcctccccctgccgtctctcctaccacaaagccgcggcccgtgggcgctgttcgcggcggcgacgggtctctcatctcctctaccctctctcgcgcgcaacggcctaaaaaaaccctagcgactcggtcggtgctcgacttggatcgtgccggggggcaggggcagctctcttctctcgtcgtcgtccaggacattgttgacaacttgatactggattttcttccttctcgaacctgtagacggctctgctttatttgattagagcttatatggtctgaatgctacaactgaaactttgcacctaaaacctgaggccaagttcactactttattatatccttccatacacagaaagtggagagacatggatcgtgatgacatagctggtttcgtcagtggaggttgctatgagtcctgaatttctaacccagtatatataacagagttatgatatccagaaggcagacaattgtttcttttcgttttcttgttggtttgcacttgatgtttcataattggaatggataaaactactcaaggccttgagtttggtggtggtatcaactctccgaagccatattgctattggagcacaactcaagacactactgtgcacaaagatagtacaccagaggcatattccaccttttctatttccaactcaaaagcgtcaaaaaggaagcaaggtgccatgtctggagcaaaaggtggaaaccctttactcactttgggtctaggctgctcaccaagttcatcttataacagcaagctaagttctggcactgcttgcataacatcatcatctttattaaaggagattgatgaagagtcttcaatagatcttggccttaaccttgggttgtatattggaaatgatattggacactgccaacagaaatcccatgctggttttgaaaatgtgctctcgacaaactctcctaaactggatcttcagttgagtttgtctaccagttcgcctgaatcagttgtcattgatacaaatagatcaccagatggcttggcgatgccgatggccaattcaccactcgccattgtagaagaaggatcagtaccgcatagttgggttttcgagcattcaattgtttcgtcatcacatgcttctaaggcaacgcatggctttccattatcaaagaaaaccaatggaggcaatgcctctgtgccttctcatgtcatgtcatcaactatgtttacaagtgtgaaaggtccagttgcctctgcttctgagacaactaactcccaacaacgcaacagtaacgctaaaagctgtcagtttccaggatgtgtgaaaggagcaagaggggcatcagggcgttgcatagcccatggcggcggtaggcgttgccagaaacctggttgtgagaagggcgctgaagggaggacaatctattgcaaggcccatggtggaggcaggagatgtcaatttctcgggtgtacaaagagtgctgaagggcgcacagaccactgcatagctcatggaggtggccgccgctgcagccatgaaggttgctcccgagctgctcgtgggaaatctggcctgtgtatcaagcatggtggtggcaaaaggtgtcagaaggagaactgtaccaaaagtgcagaaggccattctggattctgcattgcccatggtggtggaaggcggtgccagtttccagactgcacaaagggtgctcagggaagcacaaagttctgcaaggcacatggtggaggaaagcgctgcacattcgtcggatgcaccagaggggctgaaggtagcacttcattttgtaagggccatggtggaggcaagcgctgtgcctttcagggcggtggcgtctgcccaaagagcgtgcatggtggcactcagtattgtgttgcacatggtggtgggaaaaggtgtgctagctttggttgcactaagagtgctagagggcgcacagagtattgtgtgcgccatggaggtggcaagaggtgcaagttcgagagctgcaccaagagtgcgcaggggagcactgatttctgtaaggctcatgggggaggtacacgatgcctgtggggccaggcggacacaagctttggtgctggtgcacagcaatgcgataaatttgttcggagcaagaccggtctctgctcagctcatagtgctttgatccaggaccactgtgttcatggtggtggtacattaggttccgctatctaccagtctgtgcatgtcaaacctactgagatgatcaatggtgataaaactttactggatccgggtgtccctgttccaaacagtggtgttcatcctcctgtcctagctcagtctatgatcgatccgctgccagagggcagagttcatggtggtggcctgttggctttactttcgcggggcggaagcagaacaagcgctggtggctcagaattgtgcttcgggcaagatcgtgtggatctgaggctatcaggatctccatgaaactgatgactgcctgcagttttgatccaaattgtgttgctcatgctcgggttccataggatctacccggacgtgtactgtgaatctacccagacgtgtactatgaaaataagagggtagctcctagagcagatgtgttgttttattttagttaattgtttcagtgcatgtaatcacttactttaatgctcatgtttggacttgattaactctcagcaacttaaggttgaaatataatgtgcattttgctttttt

SEQ ID NO: 34921 - DNA, 1244 bp, Zea mays
  Clone ID: UC-ZMFLMO17342A09_FLI
acgacgtggtcggcctggtgctgcactcgtcgctcatggtgccctacttctcgtggaagtacagccaccggcgccaccactccaacacggggtccctggagcgcgacgaggtgttcgtgcccaagaagaaggaggcgctgccgtggtacaccccgtacgtgtacaacaacccggtcggccggctggtgcacatcgtggtgcagctcaccctcgggtggccgctgtacctggcgaccaacgcgtcggggcggccgtacccgcgcttcgcctgccacttcgacccctacggccccatctacaacgaccgggagcgcgcccagatcttcgtctcggacgccggcgtcgtggccgtggcgttcgggctgtacaagctggcggcggcgttcggggtctggtgggtggtgcgcgtgtacgccgtgccgctgctgatcgtgaacgcgtggctggtgctcatcacctacctgcagcacacccacccgtcgctcccccactacgactcgagcgagtgggactggctgcgcggcgcgctggccaccatggaccgcgactacggcatcctcaaccgcgtgttccacaacatcacggacacgcacgtcgcgcaccacctcttctccaccatgccgcactaccacgccatggaggccaccaaggcgatcaggcccatcctcggcgactactaccacttcgacccgacccctgttgccaaggcgacctggcgcgaggccagggagtgcatctacgtcgagcccgaggaccgcaagggcgtcttctggtacaacaagaagttctagccgccgccgctcgcagagctgagaggacgctaccataggaatgggagcaggaaccaggaggaggagacggtactcgccccaaagtctccgtctacctatctaatcgttagtcgtcagtcttttagacgggaagagagatcatttgggcacagagacgaaggcttactgcagtgccatcgctagagctgccatcaagtacaagtaggcaaattcgtcaacttagtgtgtcccatgttgtttttcttagtcgtcgctgctgtaggctttccggcggcggtcgtttgtgtggttggcatccgtggccatgcctgtgcgtgcgtggccgcgcttgtcgtgtgcgtctgtcgtcgcgttggcgtcgtctcttcgtgctccccgtgtgttgttgacttgttgtaaaacaagaagatgttttctggtgtctttggcggaataacagatcgtccgaacgac

SEQ ID NO: 34922 - DNA, 4498 bp, Zea mays
  Clone ID: UC-ZMFLMO17342B09_FLI
gcggcccgcgtcgcctccactcccaattagcttatcgtgttcgacgcgagcgaactcgctcagatcagagtgttccctgatccggtcccaatcttttattggattttgtgttttggtaggggatctagggtttgtcgtcgaattccgcctcgaattttagggtttgcttcggatcgattccgttccgtgggattcttgcttgcagcactccatggctgcggcgcggcacgggggttataggagcttcgacgtggccaggaggcgggagttcgacctggagcgttctaggaggagcaaggagtaccgctactcgagccgccaccgcgactcggatcgccaccgtgatggcagcaggggccgtgaagtgcccaacgggtacatccgccaccgctcgccgtatgcgccaccgaagagccgaccttcaaaaaggaaggacgataaggagcctggtgaggtctcaagcgatagcggctcggagtctggtgggcgcccaccagtgctgagggaggatgggggtcttggggtctgcagggatggaggtgcgttgccagcaagcaagaagaggaagcactcacctggattccacgatacgaatgtttcaaagctgcgggcaagagatgaggtgtggagcaggagaggacctgatgccatagctgtggagctccctcttccttcgccaccccctatgtctgcggttggtgggtgctcaccaatggatccagaagttttggtagttccaaatgatgctgaaaggatggacgcgattactgagggggaagaggattgtgcaacgagaaacatttttacttcaaggtgggcggatgctgctgaagaggaggaagtggtgattgtgcctaagaagaagaaaagtgtgccacctgctcatttgcctgaacagaaatccacaaagaaaatcatgggctcagagctgggagaagcgatgggcagtaaaacatcaagaagaagttcctcaagttcgtctaactcgatgggtagtgaaaactggaatatcgaggtagacgagggtgatggcattgattcttctgttggttgttcgctggatactcattccaggagcaatatgcgtaggtctggatcacctgaggttgtgcgaacaccacgtaggtgctttaacatgcttcagggctgtaggagtattgatgactttgagaggatcaacacaatcaatgagggtacatatggagtcgtatttagggtgagagacaagaaaactggtgagatagttgctttgaagaaggtcaaggtagataaggaaaatggacgggaagggtttccattgacttctctcagagaaatcaatatccttctatcctttgaccatccttcaattgtggatgtcaaggaagtagttgttggtggtcatgacgatgatacttttatggtgatggaatacatggagcatgaccttaagggtgtcatggaggcgatgaagcaaccatatagccaaagtgaggtcaaatgtttgatgcttcagctgctagagggcgtgaagtatcttcatgacaattgggtacttcacagggatctcaagacatcaaatctcctcttgaataaccgcggtgagttgaaaatatgtgactttggactctctcgtcaatatggcagcctgctaaagccttacacccaaccagttgtgactttgtggtacagggctccggaactactattaggagcaaaggagtattcgactgctatcgatatgtggtcattaggttgcataatggcagaactcttgtcaaaagagccactcttcactgggaagtctgagatagatcaacttgataagatatttagaatactcggcacacccaatgaggagcggtggcatggttgttccaaattgcctggcttcaaaggcaacttcgtaaagcgaccgtacaatagattaagggacaaatttccagctgtatccttcacgggaggcttgaccttgtcagaagctgggtttgacctgctaaataggttgttggcatatgaccctgagaagcgcatatctgctgctgatgccttgaaccatgagtggttccgtgaagttcctctgcccaagatgaaggaattcatgccaacttttcctgctctgaatgaacaggacaggaggatcaagagatacatgaagagccctgaccccttggtggagcaacagatgaaagaacaagggagcataggagatcatggcctttttgactgatctgaaagcagacaagtcttgctgcaaatgacagtttttgagtgagtaaacatgttgcaaggctaagagatcaaaggggaacagaaattttacttaagttccatgcagctagtgttcaaatggcagggttagctctctacgagaactgtcatattctaacctatcatcattataagttgcagatgtaatgcagttcgtctaaaaggtttggccttgcgtacaccaagtttcacctctgatacttgtaaagtattataaactgttgacttgtaatcagtaatcaatgagatattagtgacatcgtattttattttctcttttcaagtagtgcatcttcttttgatcttttgattgtctttgcaagagttgaatgaagtgaaggaaccggtgcatttttattttcacaaggaaatcgatactctcttaatgggaattgtaagcttaaagctgtggctgtatcaagagatgaagggttcgcggatgccagattacatacctaactgactttttctgtggtcggtcctccaaaggtctcatctgtaattgtgaatccaagtgagttgagctcagctcttttgaatactttggtaatccctgccctcttcatcttcccactccagttctgtttcatcagctcatcatgatttatttatcattcctgtgattcattgcacgatcattatcaatttgtttctttatttgcatggacattaactgttacaaaatgccgccttcgccctcctgtgcccaccatagttattgaggcaggtaaaagaataaggttaagaatatgttaaattactccttgtgctttggttagatgatattaccaaaaatatatgttgaggtgtaagacaattctgggtttaagtgtttattctcaaacggttgatcaatcatggttttccacttccaagcttgatcctaaccaatccttatgtgatttaattgtcatattttgccactccttcctatcataaaaacatgccgtttaggacaagatttgatcaaaccttaaaacttaaaagctacaaacatttataacttctaatttatttagtttatgattgctgtgtcttgctttgtcagctaccatttttttcatgccataaaatggtggaattgcctgtagagtaacataaatgctttctactaacctaagttgagatgtgtgccaatgtatcactgtatcaggtcccaattccacttgttataccatcttttttcttcactggggattgtttttgaataatctgctgataatactgctccgttcttttgagcttttataatctgccagaggtaactagttgactataaaatctgggaggatgctaccatgtgaattatgtctttctttttacctagttgggtaaaatgcgctaatggtttgctatgcctaaatatgaattcgagttgactatgttcctcattgcaatgtttgtggcacacaggtatagcacttctaattactcctgtgagatggctaatatttccgtgtttcttattgggttgatgtgttcatatgattttggtaagaacaacagtaaaatacaatgaatcctggaaagcaagttgtgctaagttatataattttagtaaaacgtattcatgtctttgatactgatgtaattctgaatttctgatgtgagattccaacttaagtacctaactgctttcccagttgcctgaacttgtagggtatttaccattcttatgtcacttctctgaacttgcatgatattcaccattcgtatgtcattatagcatcttactgccccttgcatttgtagttgcttggaattatgacgtctttagcacgatctgaagtagggagtatatgtaccacagaacgtctaggaattttgttgtggcagttcatctgagtatatccacttactcttaccatgtgcgattaaagtgcacttgagtttgtttacagcttgaaatgtccgcactggtagcagacatggcagattgttagggcacctatggagacgacgtcaaacacatttgaagttgggtgaacttgaatatcgacggagggcagctgataatttatgttggtcagtgaattgaataactatcttgacttatacctccgaactaggaaagcgcaattctagttctcctgagtgaaaccatctaaaggcagatcaaattcatggaaaaaatatcaatatttatgacatgtaacaggtatattatgagagtattttttaattaagaatctaatatttttattttgtattgtcaatattgatactttatataaatttggtcaaactt

SEQ ID NO: 34923 - DNA, 1338 bp, Zea mays
  Clone ID: UC-ZMFLMO17342B12_FLI
attgttttcctattgtgtgaccatgatacaaagtcataagcacccccttgctattaatatttttagtttgactggatggcttgtgctaacccactacaatggctcaatagtttttttgtattatgtacagtgacacgagatgccgccgaatgaaatatgatacatgccctagacttttttcaacaattatttttctcatgctttaatattttaaaatacggccctgaatatcttccttgtttggagtagttaatatttttggctagctttggatccttgaatgatgtctaagcttaggcatttcaaataattcattattctttttagatgctcaagacatttcccaatgcgacaaaatatctgaaaaagtaagttcgataaattttttggctatgtggataagctacaatgtactgacaatatttcattcttgttttaagcaattataagctttggtaaggttggtcctaggcacaaggaaaaagttgaacagagtgtcttgtccatctgctcatgggaagagtttctgcaactaataaggttctccctttctgaccaaatcacagatggaatgaataaatgcttagtcacaagaatattagtaatgtgttaaggcacattttccatttcaaatttatacatttctgggatatccttgcgagaaaaataccttgatatattaggttgaaaaataatattttctgttctaccaacagggaggtgaacataaatttgaacttccacccaaggaaaatgatggcatatgcatgataatgtacatcagtggaacaactggtgatcctaagggagttgtgatcttgaataagagcattgctaccattaattcaacagtagatgagttcctcaacaactcaaacgagtagtaggccattcatattttgactttcagtggatatgcttgcgacttcttcaggtgtgtggcctcgagctatggctgtggaattggtgcggtgtggtggagaagggccatttagtcttgatggcaagttgctggatgttaagctgccgccatcttcgtggagagaggaccaggatctagcaaaccaacttgattcttttcccaaatcattggttccacctctagaaggtagaaggggaagtttaaatgggacccaatatgaaaatgggcttttctccagctctcttccagatttttttgacaagaagagtgagctacttgtttcctacattttatttgaatgggtgtattttgtagtactaaacaatgagctacttgtttcacctgcacggtgcatgaacataaaaagaaagaaagcgtctaggagcatttgggaaaagaatcttgcttctttattc

SEQ ID NO: 34924 - DNA, 1670 bp, Zea mays
  Clone ID: UC-ZMFLMO17342C03_FLI
gggagtttctggttgaggttctaatgcttagtctgttgcaccatgacaatctagtaaacttaattggatactgcgctgatggagaccaacgtcttcttgtatacgagtttatgccattgggatcacttgaggatcatttgcatgatattccacctgataaggaacctctggactggaatacacgtatgaagattgctgctggtgccgccaagggcttagagtacttgcatgataaggcaagtcctcctgttatttacagggatttcaagtcctcaaacattctactcggtgaagggtttcatccgaagctatcagacttcggccttgccaaacttggccctgttggtgacaagactcacgtttcaacacgtgtcatgggaacttatggctactgtgctccagagtatgcaatgacagggcagcttacagctaaatctgatgtatatagttttggtgttgtgttccttgaactgattactggccgcaaagcaattgacaacacaaaaccccatggagagcaaaacctagttgcatgggctcgtcctctattcaaggaccgcagaaaattccctaaaatggctgatccgtcacttcagggctgtttccccatgaggggactgtatcaagctctagctgttgctgcaatgtgtttgcaagagcaggctgctacccgcccctttataggtgacgtggtcaccgctctttcatacctagcttctcacacatatgatccaaatgcgcctgctcaacataatcggagtaattcatctactccgagggttagccgaggtggtgggagcaatgaccaacgccgtctccgctcatcaaaccaccactctccagatttgagaagggaagtcaccacagcatcaagatacgacgatgaggttagcagggcaaactctggtactggttctggtcgccggtctggcttggatgatgcggatatgtcaggctcacaattgggtagccctgctcacactggaaggaagaggggatctcctaggacttctgaaagccagcatgctatagcagaggccaaaacatatggggaaaattcaagaggcagaaagtgaccaaactctcagagcagcattgaccgtatgagcagaatgctgaaccagatggttcatccattcatcattcatagaaaaaaaaatgataagttccttgctagcgccagacaggaacattgcatcagtccatctaggtcccttggtctttgtgaatagagctttcctcttttccctttacgggctattgccactgcttcttaacttctccatacaaatatcattgccaccacaaccaccatcagaactcccattcctgtcatctattcctcatgaatgcaatcatcatgcttacgagccttcgtcgtcacggtgtataacaacattcggttcacaatgtggaggtaaggcaaacatttgctttggggagcacaggatctcatccagttgggcatcttctgttgctgttgcatgctgggtgtcagcagtcacaccattgtcgaggggtgtgatgttctttttcttgaatggtttgtacctggggttacagcagttcacctgtgtttgatacatctgccttgtgacatttttgtgttgagttgtcggaacacatctattatcatctctaccataaaattgttgtggcccttgcatctt

SEQ ID NO: 34925 - DNA, 1329 bp, Zea mays
  Clone ID: UC-ZMFLMO17342C10_FLI
gcccaagtcgaccaccggcgcggaggcgtgggtgtggcacctggccaaggcctacgccaacgtgaacgactactgctggcaccagctcatcagccactggctcaacacccacgccgtgatggagccgttcgtgatcgccaccaaccggcagctcagcgtgacgcaccccgtgcacaagctcctcctgccgcactaccgtgacaccatgaacatcaactccaacgcgcgccagatgctcgtcaacgccggcggcatcttcgagaccaccgtcttcccgcgccagtacgcgttcgagatgtcctccgtcatctacaaggactggaacttcacagagcaggctctccctgacgacctaatcaagagaggcatggcggtcgcagacccgtcgagcccgtacaaggtacggctgctggtggaggactacccgtacgcgtcggacgggctggccatctggcacgccatcgagcagtgggtgacggagtacctcgccgtctactaccccaacgacggcgtgctgcgggcggacgtggagctgcaggcgtggtggaaggaggcgcgcgaggtcgggcacgccgacctcaaggacgcgccctggtggcccaagatgcagacggtggccgagctggtcaaggcctgcaccaccatcatctggatcgcgtcggcgctccacgcggccgtcaacttcgggcagtacccgtacgccgggtacctcccgaaccgcccgtccgtcagccggaagccgatgccggcgccgggcagcgacgagtacgcggagctggagcgcaagccggagaaggtgttcgtgcgcaccatcaccagccagttccaggccctcgtcggcatctcgctgctggagatcctgtccagccactcctccgacgaggtgtacctcggccagcgcgacaccaaggagtggacgtcggacgccaaggcgcaggaggcgttcaagcggttcggcgcgcggctgaccgagatcgagaaacgcgtcgtcaccatgaacgcggaccctcgcctcaagaaccgcaacggcccggccgagttcccctacacgctgctctaccccaacacctccgacacgaagggcgacgccgccggcatcaccgccaagggcattccaaacagcatctccatttgagttctgtctgtctgagctgaggacgtacggtcgtcgcactagttgtttgcgtttccccgttccgttccgtgaagtgtggttctcacttgcgcggtattgtgcaaatagccaagtactccttacagaagtcgctacgtgaggactgttgtaataaggctctattcagttcctcaataatgaagttacttgtgttc

SEQ ID NO: 34926 - DNA, 817 bp, Zea mays
  Clone ID: UC-ZMFLMO17342D02_FLI
ctgtcgttccccaaggccatgcggtggtgggagaaggggctgcaccccaacatgcgcgaggtcgagtccgcgcaggacctcgccgactcgctgctcagcgccggcgacaaactcgtggtcgtcgacttcttctccccaggctgcggcggctgccgcgccctccaccccaagatcgcccagttcgccgagaagaacccgggcgtgcagttcctgcaggtgaactacgagacgcacaagtccatgtgctacagcctccgcgtccacgtcctccctttcttcaggttctaccggggagccgagggccgggtcagcagcttcagctgcaccaacgcaacgatcaacaagttcaaggacgcgctcgccaagcacggggctgagaggtgcagcctcgggcctgcgcgggggctggacgagtcggagctcatggctttggctgagaacagggacctgcacttcacctacgacaagccgggcggcctcgtccccctcgcggaagccattgccaaggaggctgccgcgccgggaggcccgtggcttcctctgcctgcgtccctgctcggccagggatcggccgataactcattgctgccgtctggaagatagaccgtgctccgtgctcggttggtttcattcattggaggtggctcctccgtcttgtacagatttcattcgttcgtagtggtctgatgatgctggagtgacagaaatattcagacgcgggatgcgcagtgactatcgcgggatgcgcagtgactatcgcgtctgtattgttgcatctagacctttgctgaaacatgaaaaaatccattgcttggcg

SEQ ID NO: 34927 - DNA, 1746 bp, Zea mays
  Clone ID: UC-ZMFLMO17342D09_FLI
ccgcatctgatcctggcgatgatgagaacagtatagccatggagtttctggcttctttagatggggaagaaaatgatttcttcaaggatcgtcgagctaagaaattggaaaagaataaaatatgtgaagtagcagatgctaccagcaagacatcaagtcaaggtagcacaaagaatccagttgctcccaatcataaggatgaagttgaattgcttgctacagaggagctagaagaatttgatgatcaggaaaacaagtcatccatgatgttacaggaagaaactgaggagtcatgcaatagtcagttatcgggtataggaaacaagtcttcaactggtggatggtttgtttcagagggggaagctgtgcttcttgctcatggagatggcacatgctcctattatgacattgcaaaccatgagttcaaatctgagtacaagcctcccagcttggtatcaaataatacgtggggcgattgctggttgattcgtgccccaggcgtagatggatgttctggtagatttgttgttgctgcatcggctgggaatgcattggagcctgggttttgcagctgggattactataccagagaagtaaaatcatttcatgtcgaggaggaagcttctcaaacttttgctccaacatccagggctattcttggtgctctctctaatgtaggctcatcaagatccagctctgcgctgtcaaatacagagaggcagcaatggtggtataaaccatgcggacctctcctgctatctactgctagcaagcaaaagatggtcacagcttatgatatacgtgacggtgatgttgtgatgaaatgggaagttagcaatctagtaatgggaatggaatactccagcccactacaatggcgtagcagggggaaagtagtaattgctgggagtgaatcaatagggctgtgggatgtgaattcacttaacccacaacccttgttgtctgttgcttctggtaagaaagtgtactgccttcacgtgaataacactgatgctgaggtgggcggcggagtgcgtcaaagggttagttcatctgaggtggaaggaaatgatggtgttttcagcacacaggaaagtgtcaatgtatttgattttcgtgtacctgctggcattgggcttaaaatagcaagacatggcggcacagcaaactcaatcttttcacgtggggactcggtatttattggtagcacagaaggaaggctgcaaataaaaggagggtcaagatcacgagttcagcaatactcgttgagaaaggggaaacttgtcgccacctatgagttacccgaattcaacgctcatatccatcactctgcgataacccaagtatggggcgactcaaaccttgtcttggctgcatgtggtatggggctgttcgcctttgacacgtttaaggaagacacgcagccaacctacagctttgaccgtggaaacaccattgcagcgagagaagctattggccctgatgatctgtactgtcctacatttgactactcatcatcaagggttcttctcgtctcaagagaccgcccggcacattggaggtacttgtaggctgtagctagctatttcttgtttattttgtgtgcaacatgccatgtaatatatgcactttgtttatgcttcacatgtggtgtcatctgccgtgtcaaccatctcgcgctttcactgtaatattatctagtttttacccctgcaattataaattattttcagtcttctgtacttc

SEQ ID NO: 34928 - DNA, 1118 bp, Zea mays
  Clone ID: UC-ZMFLMO17342D11_FLI
gtctgagaaaaatttgcgaccattggaatggaaaaaacgacttagcattgcacttgatgttgcaagaggcgtcgagtaccttcacagccttgcccagcagacctttatccacagagacttgaagccatcaaacatacttcttggtgatgacatgaaggccaaggtggcggactttggattggtccggcttgcaccagctgatgggaagtgtgtctccgtagagacaagacttgctggcacttttggataccttgcaccagagtatgcagtcactggacgagtgaccacaaaagctgatgtcttcagctttggtgtcatcttgatggaactgattacaggacgcaaggcacttgatgagactcagcccgaggatagcatgcatttagttacatggttccggaggatgcagctcaacaaggaaacattccgcaaggcaatcgaccctgtcattgacctcgacgaggaaacatacgctagtgttagtaccgtctcagagcttgctggccactgctgcgctagggaagcacaccagaggcctgacatgggccatgctgtcaatgtgctctctaccctttcggaagtttggaaaccagccgatccggactcggatgacagctacggtatcgaccttaacatgtccctgcctcaggctctgaagagatggcaggcgttcgaggacagcagccactttgacggtgcgacctcgtcgtttgttgcgagcctggataacacgcagaccagcatccctacgaggcctcctgggttcgcggactccttcacctctgccgatggaagataaagacatttacgctgctagtaagggtgtgcaaaaaccttatgcttccgttgaaatagaagctcgggcgatccttgttcattcttttagtctcttcaccccacaccaatctttccatgtctctttattcgtctctgtactcttccgtgtagctgctctttggtcgtgtatgctgtgatcttgtcccgaaaattgcctggaagttcgaagactttgctaactggtttatgtcatttgctaagattaaagtagaaggatgctagagctgtatggttgtatcgggtactgacaatttgcaaaggaaggtgattctgtgttcgtc

SEQ ID NO: 34929 - DNA, 846 bp, Zea mays
  Clone ID: UC-ZMFLMO17342D12_FLI
tgccaaggaaatgacaaagctctctggcatctctgaaatcatccccgagatggagatctgcgattttgactttgaaccctgtggctactccatgaatgcgatccatggctctgcattctctacaatccatgtgacgcccgaggacggtttcagctatgccagttacgaggttatgggcttggatgccactgctctatcttatggtgaccttgtcaagagggtcctccggtgctttggcccctcggagttttccgttgccgtgaccatcttcggcgggcgtggccatgccgggacatggggaaaggcactaggtgcagaggtctatgactgcaacaacatggtggagcaggagctgcctggaggcgggctcctcgtataccagagcttctgcgctgctgaagacgctgttgctacctcgcccaaatctgttttccactgctttgacggcgagaacgtggagagtgctcctcctcctatgaagaaggactacaaactagctaatcttctctgctgggaggaggaagcggatgccatggaggagaaggcgggagtgcttgatgagtaagacgggcttctggtgtcgatttgcttctgagttgtttattttatatcgtcgcaatttcgtggttgtcgtttggttattctgtgaagcagccaagccaggctattgttatgaaaatttgtcgtctgtaagcatgtgaacttccgatgttgccacatgctggatcagtctgaataagtaagtatgcagctctaggtggtcagctgcgtctaccacaatgagcatgtacgtatggagaaatatctgtgaacccattttgtttatgaataagatttgtttttttt

SEQ ID NO: 34930 - DNA, 2394 bp, Zea mays
  Clone ID: UC-ZMFLMO17342G07_FLI
gtgaattgacacgattccctattgctgggtcagctgatgatgcacagaagctgatagatcttgctattggtattaatgaaactctgggtgagagtaagcttgaagaaattgacaagaagctcttgcagcatttcgcaagtggttccagggctgttttgaatcctatgtctgcaatgtttggtggtattgtaggtcaggaggttgttaaagcatgctcagggaaattccatccactttaccagttcttctacttcgattctgtggaatctctgccagttgaaccgttggagcctagtgatctgaagccagagaacagtagatatgatgcacaaattagtgtcttcggggctcagcttcaaaagaaactggagcagtcaaaaatcttcatggttggttctggggctcttggatgtgaattcttgaagaaccttgcgttaatgggtatttcttgcagtcaaaacgggaagctgactgtgacagatgatgatgttatagagaaaagcaatctcagtcgccagtttctcttccgtgactggaacattggacagcccaagtccacagttgctgcaactgctgctatgacaattaatcccgagcttcatgtggaggcccttcagaacagagcaagccctgatactgaaaatgtgtttaatgatgccttttgggagagcttagatgctgttgttaatgcattggacaatgtcacggcaaggatgtacattgactccagatgtgtatatttccagaagccacttcttgaatcaggtactctgggtgccaagtgcaacacacagatggtcattcctcacctaacagagaactatggggcatccagagatccaccagaaaagcaggcacctatgtgcactgtacattcgtttcctcacaacattgatcactgcctgacatgggctagatctgagtttgaaggtctacttgagaagactcccactgaagtaaacgctttcctgtcgaaccctggtggatatgcaacggcagcaagaactgctggtgatgcacaggctagggaccaacttgagcgagttattgaatgccttgagacagacaagtgtgagacattccaagattgcattacctgggcccggctgaagtttgaggattatttctccaaccgtgtaaagcagctgacattcacttttcctgaagatgcaatgactagctctggtgctcctttctggtccgctcctaagcggttcccgcgacctctggagttctcatcttctgactcaagtcatcttagcttcttgttggctgcttctatattaagggcagaaacatttggaatacccatacctgattgggcgaaaaacccaaagaaactagctgaagctgtggacaaggtcattgttccggatttccatccaaagcagggtgttaagatagagatagatgagaaggctactagcctatcctctgcatctgttgatgatgctgctgtcattgaagagcttattgcaaagctggaagcaatttctaaaacattgccaccaggattccatatgaaccctatacagtttgagaaggatgatgataccaatttccacatggacttgatcgctggctttgccaacatgcgggctaggaattacagcattcctgaagttgacaaattgaaggcaaagttcatagctggaagaatcatcccagccatcgccacctcaactgcaatggccaccggccttgtctgcctggagctttacaaagtccttgctggtgggcacaaggttgaagactaccggaacacatttgcgaacctggcgatccccctcttctccatggcggagcctgtgccacccaagaccatcaagcaccaagacatgtcctggaccgtgtgggaccgctggacggtaactggcaacatgacgctgagggagctcctggagtggctgaaggagaagggcttgaatgcgtacagcatatcatgcgggacctcgatgctgtacaactccatgttcccgagacacaaggagcggctggacaagaaggtggttgatgtggccagggaggtggccaagttggaggtgccttcctaccgccgccatctggacgttgttgtggcctgtgaggacgacgacgacaatgacgtcgacatcccgctcgtgtcaatttacttccggtaaagagggacacactgcccgtttatatacatgaatcttgtgcgatgtttgtcagaaggatcgtgtctataagttgcgcatgcaacctccaggactaggctttgcttaaacgcatgctgatggatttcccgagctgggtagagctggctgggaatcgtcgctgagatttgggttcaccgttatggaattcttggaatgacagttactgcaaggcactgttgctgccaagtgttgttgtctttgtacttgggatctt

SEQ ID NO: 34931 - DNA, 1233 bp, Zea mays
  Clone ID: UC-ZMFLMO17342H05_FLI
gtgctgcgcgccggccgccgcggagctggcccggctggagcacccggccaaggacggcggctcgctcagcctgctcgtcgtcggcgactggggccgaaagggcacgttcaaccagtccagggtcgcccatcagatgggcagggttggggagcagctcagcatcgacttcgtcatatccaccggcgacaacttctacgagaacggcctgacgggcacggatgacgaggcgttcgagcagtctttcaccgatatctacacggcgaagagcctgcagaagccgtggtacctggtgctgggaaaccatgactacaggggtgacgcgctcgcgcagctgagcccggtcctgcggaagatcgacagccggttcatttgcatcaaatcattcgtcgtcaacgcagaaatcgtggagttcttcttcgttgacaccaccccgtttcaactcaagtactggactcaccctaaggacgatcactacgactggagaggggtggcgcctcgggaaaactacataaacaatctgctcaaggatttggacggggccatgaagacatcgactgcggcgtggaaggttgccgtgggccaccataccatgaggagtgtcagtgatcatggtgacaccaaggagctactgcagctactgcttccagtcctccaggccaacggcgtcgatttctacatcaacgggcatgaccactgcctggaacacatcagcagcagagacagcccaatccagtacttcacaagcggaggcggttccaaggcatggagaggagtgcagaaccccaccgaagatgacctcaagttcttctacgacgggcaaggcttcatgtccctccagctagaccgtagccaagccaagttcaccttttacgatgtcgacgggaaggcgctgtacagttacacacggtcgagcctgatggaaacaggccaccacctccaagcctccggctacgtcaacgaggaatgaagcaggggcgagtcagcatgcagcgctggagaactgagatcgatgcagttcaagcgtacgtataaattctcgagtgcttgatgtggttcatctgtcaagggcaacaacagttaggtttatatgtgtgcccttgcatctctcgacatctgtcactgccgtccggtactatttggggtcatgccatcgattcgaaaacatgacatggtaggggcagccatgatgtagcaaaaaaaaaaaatagtgcaaatattcattatcgaggagtt

SEQ ID NO: 34932 - DNA, 769 bp, Zea mays
  Clone ID: UC-ZMFLMO17342H06_FLI
gtcataagccacagcagtttccatgtgaatggtgagcaggcagtaaaagaaactggatcagagagcattgatgttgacaaacgtcttaacatggtaagagaagagataggtgtaagaagcaccgagccaaacctcataccttctggacctatagattctgatacggtgaagccaaatgtagtagaagctaatattacctttcagaaaccatccagtacagatgccataaaactgccaaccataccggaaggaaattttagtactctggagaccaacaatgggtttaagcaggaagcagctccggctaaggaaatactagatgtgacatctttcaggcagcgagctgaggctctggaaggtctcttagaactttctgcagaattactggaacacagtaggctggaggagcttgcgattgttctaaagccatttgggaaggccaaggtgtcccctcgagagacagcaatatggttggctaaaagtttcaaaggcttgatgaacgacgaagcaagccgcagttcaacgtgagtacgcatagcttttgtgccaccctttttactttggttgatttctgcttgtgctctgaagatgctatggttgtcttgttcatatctggcttcttggtatcgtgtgttcgctgtttccatttcgatagttgttcattctttacagcacatgttgtaaatagcccagatttgtgaacagaaaataatacatgccagaaatggtgttaatttacatggttgaagtaacagagactaatttgatc

SEQ ID NO: 34933 - DNA, 951 bp, Zea mays
  Clone ID: UC-ZMFLMO17344A01_FLI
cagaagaaaatgcaacgggcagtgcaggccgtcaggtcacacggcaatgttcttaaatatgctgttctacaacacatcagcgctcccaagccagcaatgcttcctgctgccttttctcgtttcatgtcagtttcatctgctcgcctagaggatcgtggatttgaaactgccactgtagcagatgtcttgaagtctaaagggaagagtgctgatggatcttggctctggtgcaccacagaggatagcgtctatgacgctgtcaaatctatgactcagcacaacgtgggagctttggtggttgtcaaacctggacagaataaatcaatcgctggcattgtcactgagagagattatctccggaaaatcatagtgcagggaaggtcttccaagtcaactaaggttggcgacatcatgactgaagagaacaaactgatcacagtgaatcccgacaccaaggtcctgcaggcaatgcagctcatgacagaaaaccgcgtcagacacatcccggtgatcgacggcacggggatgctggggatggtctccatcggtgacgtcgtgcgcgcggtggtggccgagcacagggaggagctgaaccggctcaatgactacatccagggaggctactaggacggcgtgtgaagcgacgaccccctccgatcctgccagtcagtgaagtccgcctttgaaatccaataactcggaacaatgatgatgacgaaataggccgtgttttcttggacaatgatgttaagttcggcaatgttttcctttctcttttttcctactgcgtggtctatgtgtatattgccaaaggcatgcgtgagccatgcgccggccggtgctgtgctggggcgcagagaccatctgatggtggaaacaccggaaataagagcgtgccgctgtgtgtttcctttgaaggaatgaaaatggtgttcgtgttgtgcattgctt

SEQ ID NO: 34934 - DNA, 1608 bp, Zea mays
  Clone ID: UC-ZMFLMO17344C04_FLI
ggccagccgtcgcctcggcgtgcgccccgtcgtcggcatgcgcgccaagctgcgcaccaagcacgccggccacttcggctccacgtccggggagaagggcaagttcggcctcagcgccgcgcagatactgtccgtggtcaccaagctcaaggccattggtatgctcgactgcctccagctgctgcacttccacatcggctcccagatcccgaccaccgccctgctctccgacggcgtcggcgaggccgcgcagatctactgcgagctcgcccgcctcggcgcggacatgcgcgtcatcgacgtcggcggcggcctcggcattgactacgacgggacccactcggcgcagaccgacatgtcggtggcgtacagcctggaggagtacgcgggcgccgtggtggccgccgtgggccgcgtgtgtgaccgcaagggggtgcagcaccccatcatctgcagcgagagcgggcgcgcgctggtgtcgcaccactcggtcctggtgttcgaggccttctcggctacggcgccgggacgcctggacgcggccacggcctacctcctcgacgagctcacggacgactgccgcgccgactaccgcaacgtcatggccgccgccgtgcgcggcgactacgacacgtgcggcctgtacgccgaccagctgaagcggcggtccgcggagctgttcaaggagggggtccttggcctggagcacctcgccgcggtggacgccttctgcgagctcgtcgcccgcggcatgggcgcgcccgagccgccgcgcacctaccacatcaacctgtccgtgttcacctccctgccggacatgtgggccatcgggcagcagttccccatcatcccgatccagcggctgcaggagcgacccgccgtcgacggcgtgctctcggacctcacctgcgacagcgacggcaaggtgagcgagttcatcggcgggaggcacagcctgccgctgcacgagctgcccacccacgccacccgcggctactacctgggcatgttcctcgggggcgcctaccaggaggccctcggcgggctgcacaacctcttcggcgggcccagcgtggtgcgcgtgtcccagtgcgacgggccccactgcttcgccgtgacgcgcgccgccgcgggcccgtcctgcgccgacgtgctccgcgcgatgcagcacgagcccgaggtgatgtacgaggtgctgaagcagaggaccgacggcgccacggccgccgccctcgcccgggccttcggcgcaatgccgtacctggtgttcgaccccgaggccgccgtgatgtccggcggcgagagcagcgactcggagcggtcggccgccggcgccgccgaggaggaagacgatgaggagtgggagttcatgcgcgggctcaccgtctgatgacgtgcccgcccgcccgcccgcccgccccgggtgaaacaaggcgagtccgtcgccaggaagttgtcagtggccggccggcgttggtttacataataacccccaccgcccggtgttgtatcgtgtcgtggtcgtagtcgtcgggtgtctcgtcgtcgccggagttgtttggcgccacctttttattccgaacgcgtcagtgtccactgttcgccttt

SEQ ID NO: 34935 - DNA, 584 bp, Zea mays
  Clone ID: UC-ZMFLMO17344C11_FLI
gtttaaagaaaatgagggatcatccagtagcgctggggaatcatccagtatggacattgacaaagctgagtcttctctaccaaagaaacaattaactggcgtctatgatttggttgctgtcttgacacacaagggaagaagtgcagactctggccactatgttggctgggtaaagcaagatgacggaaaatggatcgagtttgatgatgacaatccaaacatccgcaaggaggaagacattttgaaactatctggtggaggtgactggcacatggcttatatctgcctatacaaagcccgcatggcggagttgaagagttaggccggagtggttctacatttctgtgccgcgaacgcaacactagtttttctgcccatgagtgatcatggtaattattttttcccgttcgtaaagtggttactgtcgaatttgcttcaatgcggttggccattattcactgggatatgtatttttaggatttcaaatctagtacattttgtgttgtcaaaatatagaacgaagaaattcagaggaaatcttctgccttgacagtggatctgattgatttgcaccaagtggtttc

SEQ ID NO: 34936 - DNA, 596 bp, Zea mays
  Clone ID: UC-ZMFLMO17344D04_FLI
gcctgttctcagatattttccgtgatccgcttagtgcgccgcacagcattggccgcctgctgaaccttgtggacgacttggcggtggcggcgccaggtcgtgcggtgcgccgtggctggaacgcgaaggaggacgaggaggcgctgcacctgagggtggacatgccaggcctggggaaggagcacgtcaaggtgtgggcggagcagaacagcctggtgatcaagggcgagggcgagaaggaggatagcgaggacgaggccgccccgcctccgagatacagcggtcgcatcgagctcgcgccagaggtttacaggatggacaagatcaaggcggagatgaagaacggcgtgctcaaggtggtcgtgccgaaggtgaaggagcagcagcgcaaggacgtgttccaagtcaacgtcgagtagatgtttccaaatagaagcaagtgccggtacgggatggaggattggaggggcactgccaaactaggattcctctctctcaatctgatctggattctggaatcagatttctcttctttcatttttctcgtctatcttctatcagtatgaaataagcaacgtcgcttcagttttcgtgtc

SEQ ID NO: 34937 - DNA, 1429 bp, Zea mays
  Clone ID: UC-ZMFLMO17344D11_FLI
gggcgtacgtacgtgaacacacatcgatcgatctccatatatctgtctagttagctagctagctagtagacatatggtgggctcgcagtacgacgacgacgatgacaatgttgttggtcgccggcagacgaggtggtacgcggtgaccggcggccgggggttcatggcgaggcacctggtggcggccttgctccgctccggtgagtggcgtgtccgggtcactgacctcgcccctactctagccctcggccctggagagacggatgggattctgagcgacgctctccgtgatggccgtgctgtctatgcctcggttgatgtctgcaaccttgaccagcttgccaaagcctttgaaggggtagacgttgttttccacacagctgctgcggatcctagcaagaacaacctgcaacttcactacaaggttaacgtggagggaacgaagaatgtaattgacgcttgcaagatatgcaaggtgaagaggctgatccacaccagtactagtgctgttgtgtttgacggcgttcatggactttttgacgcggatgagtcattgccatacccagataagtttcctgatgcatatgcacaaacaaaggcagaagcagagaagttagtcatcaaggccaatggcattaatggccttctaacttgttgcatacgtcctggtagtatgtttggcccaggtgacattatgatgccaactttggatcgttatggatggtcaaatgttactattggtgaagggaagaactatgatgattttgtgtatgttgaaaatgttgtccatggtcatctttgtgctgataagactctttctactattgagggtgcaagaaccagtggaggaaaagcatactttataactaatatggagccaatgaatatgtgggacttcttatatcttgttcaagaagaacttggatacaaaagaatattcaagataagggtacctataattgttatcaagccagcaagctatttgatagagtgggcatatagggctgttttctctcattttggaacttgccagcctcaaatactaacaccggcgaggattagatatgtaacgctcaatagaacatttagttgcaataaagctgttgaagaacttggctacaaacctattgtgacactacaggatggtttgaagaaagcggtgaaattgtatattcaactgagggataaagatttacctaaaatatagtgaagttgtgatgtaaaacaactctaccaaaatatcataagccaaagccagaggtgatcgatgatgtcccatcaataaaaatcgggtttgtgttttttattataataaaaaaagctatgtaaaggactacgaaatattgttgtaatgctctaatggtcaggcatgtatttatgttatctgggacgtagacgatattatatttgcttttatgttcctctcatc

SEQ ID NO: 34938 - DNA, 2867 bp, Zea mays
  Clone ID: UC-ZMFLMO17344F09_FLI
cctccccaccgctcctgcgcgttgtttctcgtcgccggcgtccgtcccccggcgtccggcaaccggcaaccggcgacgacgatggaggcggcgctgggggcgctgtgccgcgccggaggctggtcgtacgctgccgtctggcgcttccacccccaagaccctcgattgctcacattgggggactgctactgtgaagatgaggcaaaagcaatggttcaggagatgcttaatcttgttgaagttgttggagaaggcatcctaggacaagctctagtaagcggagagtgtcaatggatttacgacgatacttgccacgcgttgaatcagacaagccatgctgataacggagacttacatctgggttatacttggtggcagcatcagtttctcagtgggataaagactattgcactgttacctcttcagttgcatggactggtgcaatttggttccacacggaaggtccccaggagctcagtttttttgaatcaggtccgagatatatttgatcggatgaagaatgcttcaagcgatggtccaatggagtatacccagaataactctcttgcatgcggtcagcaacctatccttacttcatcgagacctgtcaatgacatgctcgtacatagcaaggtcaacccattgcaaactgagaaacttttggaggatattgagagaacagaatctataaggagttcgatctgttctccaagcaattcacagagatctttaaatgatctaacctcccatggtactggtaacagcagcatggatactaatatattagccatgcctgttaactccaagtctatatatgatctcaaacgatttgataacgtcacagagttgtttcatcgaagttctaatgacagaattggttttcaagtcaactctagtaaagagcctggttctaccattgctggtgtaatgtcaggatacaaaagtttgaacaatattcatatgacagaaaatgattcatgtgatcaaaacatagaatataccccgtacctttacactaccaccaactcttcaaattctggccttgatgaactttcttattctggcgttgctttgtcgtcatcgtttacagcagtatcagggaaagttaaagattgcctgcaaactgagagtgacaagtttctatgtaaatctgtatcattcggcagcaacccttgtgcttctaaattccaagaaaatcgcctatcaccataccatgccctcatgcacgaacaatccctgatacctgaccctggagaatctgtgaggctcctctcacaagaagaatccttcattgttcaaggtgactcaagtcaattcaaggatactgccgactttacaagccagggtaacagtacatttcctgaattacctaacagatcacctgaagaagctactgctgaaactctagaaaacaacatgaaggactgtagtggaaacaacagtctgctggaaactatgatgcttgatcttagcactaacagctttgtgcaagattggtgggacaacagtgttctactggcagaaaaccttccaaattcaagcgaaaaggacccagagcctgctatggaattggccaataggcattcattgccaactggggagagaggctcgcctttcatacctgtcatcgaacaaatgctaggtgatgttgcacatccacctacacctaccgggcatagttcacttgaggctgaagctactgctttagctggccgtatttcagattatcagctgccccagtttgctttccgagactgcctaacagtagacaacgcacaaatcccagcattggcctgcagtaattatacatgcagaagtagaagtgcacaaaatggttcttcagaggtgccatcagcaaacgtatctgtggacgacacctgcagtttgaacacagcaaactccaatggcagtcagtcgagcaatcctgagggaacgaaggttgctaagagaagagctagagctggggagagtacccgacctagaccaaaagaccgacaactgatacaagatcgcgttaaagaattacgagagattgtccctaatggtgcaaagtgcagcattgatgctttgttggagcgaacaattaagcacatgctgtttctacaaagtgtaaacaaatatgcagagaaaattaagcaagctgatgaaccaaagataatcgacaaagggagcggtgttatcttgaaagacaacccagttgctggcacaaatggtggtgccacgtgggcctacgaggttgctggccaaactatggtttgcccaataatcattgaggatctttcaccacctggtcagatgcttgttgagatgctttgcgaggaacaagggctctttctggagatagctgacaacatacgtggaattggtctgacggtcttgaaaggacggatggagctctgtgatggcaagatatggtcgcggtttcttgtcgaggcaaacagagaggtcacaaggatggatatatttctgtcgcttgttcagttactggaacagaacagccttgttcgatctactgaccagatggccaaggtcatgaataatggggttccatcctttgcaaaccaccaacggtctccgctgctagttccagtgggcattcctgagagactacagtgacatgcagatgcttcaactagatagagttaggtaccacgactgttaacatatctggtagccggaactccatgcattagactgagcctagtgataacatctgaatgaagatagtctcactgctgctaaagatgactgtatcaagaacatgcatgactggtgcagacatgagcctctagcgcagaaattatgaactttccctgattattagtggtgtgatcagtgaaatggcattatctcctgcttagttggtt

SEQ ID NO: 34939 - DNA, 1656 bp, Zea mays
  Clone ID: UC-ZMFLMO17344G01_FLI
acaagctcactcccggccatcaggcgcacaccgctctcccgccgccgtcctgcgtcggagcgatatccctacatccccacctcatttgcacccggattggcttcttcttctactactactggaactctctttgcgatcccaaaatcgcaaaataaaggtaaatcaaaaggaaccgacttaggagctggaatgacatctaggagctttacgaaggaagagatctctaaacataacacaaggaaggactgttggatcgtcatcaaggacaaggtctatgatgtcactccttatgtagaggagcatccaggcggagatgccattctaaataatgctggtggtgattccacagagggcttttttgggtctgtaacttatattgcttcctatacctcataacatgctctgtcattgcctgattagttcagcacttcagtgcctttcttggaattgtctcttcagaaattagaaaatcatgctttttgatcattaaaaatttacatagtatgccttttcatattgagattattcatctccgatattttaaacaatattcgatgaagacttagcatcattttagatattctgtaaaaaagcattcgaaaggaaatgaaaaaaaaagactgacagtattgctataatgataggcaaaaatggtcagtttttttagttccggtgctgcctatccaggtattgctactgctaatactttctacagaaatactatacacaaccaataatttcatagaagttgctagatgctattgtaatgcttgtcttattattgttggttttgtttgttgtagggagttcatgttaaattacactagactgataaattagcttaaacacgtttccattttgagctgaagttccagtgtgtccaaaactacaaattcaagagttccttatttagctcactttgttatcgacacacatagtaccactcgttgcaagatagctatgtcatgcaatcatggtattgatggagcatgtctttcttactctgccttctcctggactggaaatgtgtcacaatacacctttgctactgccactttcatgcttcttgcatgaacggactcaatctctggttagtttctgttttccttgctcagctccatgacattcttttatatggacccacaggccacagcacggcactagggtcttcgatatcatcgaggatttctgcatcggtcagttgaaggcatagggtagcttgtattgaattcgtggaattttccggaaatcaagttttgagaagctacatgttatccaacattttaagcattgcaaccttcaagcatttgagatgccagtgtaattgttccacaattgtcatcggggctgctaggagctgtgatgtagcacttcgtttttattctgctgttgtgtgactgtgtctttacatttctgttgttggacaagactccaaaacgcttgtaattgttctggctaagggcccgttcggttattcaggaatctactccagaaaggatttcagctggaataattgtataatttgtataacaattagtaacctggaatagttcctagtcttgttccagcctaaccgaacggggcttaaatcagaatctgtttcacacgatcatttctcgagtgatgttacattgaagatgtcccgagtttgatttt

SEQ ID NO: 34940 - DNA, 1323 bp, Zea mays
  Clone ID: UC-ZMFLMO17344G10_FLI
cgaaatctctccccaaactacccctcgccagcgcccggcgatgtgcccaacgaagcccgatcgccctggccaggccgccgccggctccggcgagaagagctggcgggaggaggccgtggccgcctgctcgctgcggctggtcgacctggaccgtggcaccaacggctgggcctcgccgccgggggacctcttccacctgcgcgcgcgcggctacttctccagcggcggcgggaagcgcggcaaggcgccgtccgccgcggactggctgctccgccccgccggcgtcgactggctacgctcccacgcgcgcctcgaccacgtgctcgcccgcgacgacaaccgcgtcgccgccgccttccgccgcgcgcgcctcaggaaggaccccagcgcgcacttcctcctcgccgtcaatctccaggtgccgggccggccggacgcgtacagcgccgtgttctacttcgcggcggaggcacccatcccgccggactcgctgctcggccgcttcatccacggcgacgacgcgtaccgcaacgcgcgtttcaagatagccaaccgcatcgtcaagggtccctggatcgtccgcgccaccgtcggcaactacgcggcctgcctgctcggccgcgcgctcacgtgccgctaccacaagggcgacgactacctcgagatcgacgtcgacatcggcagctcagcgatcgccagcgccatcctgcatctcgcgctcggcgccgtcacgtcgtcgaccatcgacatggggttcctcgtcgagtcccagtccgaggaggagctgcccgagaggctattcggcgccgtgcgcatcgcgcagatggagatgagcgcggccaagtacgtggagctgccccctgatgaggccatgcctgagacggccggcagggccggggccgggttcagggtaagctcggcgaaggtggtcaatcatagccgccaacaagaccacgccggcggcaaggtcggcaggtcgatgagttgcccggagcgagagagcggaggaaaataggcgcaaagtatgcgggtgcactgcagaaagaaaccatccatcgatggcagagcgatggcgagaaccggaagacgaaggccgggtaacccccaacacataaaatgctgaagctggcgccatgaccacgacctcgaccacgaatggcgccccctccccttctttcataaatttctgacttcatttggttgtgatgatgagagcttaaaaacctgatggatgcgaaatcaattcatagcagcagattaatctatctatctatctatggccgagttccatgacataattatgatgatgcccggcttgtcttc

SEQ ID NO: 34941 - DNA, 1513 bp, Zea mays
  Clone ID: UC-ZMFLMO17346A09_FLI
ctacaaaccaaacagcaagagcggaagaagaaacgaaaaaggttcactggaatcgaccaagaaatccgccttgccatctccgtttcgtatatgccctgagaatttccaaacgaaatttccgagcttttccctcgccgcgcgaccttcgatctcgcttgaaagagatggcccagatcacgggaccggtgtgaggactgagacgccgacctccgacctcaccgaggcattcgattcgtcgcaatcctcgccctcactcgcgtgttcaggtttgtcgggctgccccgggataggaatgcttctgtcgacatgctaagccgcggagccgtgcggttgctgctgtatcgtctccggcctccgcctctgcgtttgagttggaatccgagcggtgctatgcctccgccaccgccatccgccgccgccaaccgctcctgcctctgcaggttcgcctactcgaccgcgcgcgtcgagaggggcaggaccctgccgggcaaggcggtatttcttgatctgggagccgggaggaggttcacgccgagcggcgcgcttagcttgaggggttgcttgggttggcgggatggtggcggcgacggcgagctcaggaggagggtggacggggaggcggcggggatgaaggcgcaggtgctcaccacgcagcggcagctgatgcgcgatccggaggtgctgccgctcgaggaggccgccacaggcaagagcatgaacgtgaatggtgcctgtcggcgagggaagccgctagggtttccggagcaggcagcggctaagatggtggttgctgttgatgtagatgaagttcttggtagcttccttgcggctctgaacaagtttattgctgatcgttattcttggaatcactcagtatcagaataccatgtatacgagttctttaagatatggaactgttctcgagaaagagctaattttcttgtccacgagttcttcacaacccattacttccaagatggcattcatcctattccgggggctcgagatgctctccaaactctttcttctttctgtagtttgtctgtagtaacatctcggcaggatgtaattaagaatcacacattggaatggattgagaagtattatccaggcttatttgagcagatccattttgggaatcatttcgctttggaaggtcaatcaaggccaaaatcagagatttgcaggtctttcggcgctcaggttctaattgatgacaaccccagatatgctctagagtgtgctaatgacggcatgagggtccttctgttcgattacgaaagctcgtatccttggtgcaaaactggagccgatgaactccatccgctggtgacaaaggttcacaactgggaagaagtcgaggagaaacttctctcttgggtagtacctgatagctgacactcttctgtcttgtgagaagcactgcttgagaccagcaaatgattccttttgcctggtttctaaaggaacctgatagggtgaaagactgcaatgttcctagagcttgattttc

SEQ ID NO: 34942 - DNA, 912 bp, Zea mays
  Clone ID: UC-ZMFLMO17351E12_FLI
tgagtttaaatcaatcgagaagtttaagatattcaacactaacaacttgtgggtgaaccttaaagctgtcaagagactagtagaggctgaggcacttaagatggaaattattccaaaccccaaggaagttgatggtgtgaaagtccttcaacttgaaactgcagctggtgcagctattcgtttctttgacaaagcgattggaattaatgttccccgctcaagatttctcccggtgaaggctacatctgatttattgcttgtgcagtctgatctttacaccttggttgatggctttgtcatccgcaatccatccagagcgaatccagctaacccttcgattgagcttggacctgagttcaagaaggttgccaatttccttgctcggttcaagtccatccccagcatcgtcgagcttgacagcttgaaggtttctggtgatgtctggtttggttctggaattacgctcaagggcaaggtgacaatcaccgccaagtctggagtgaagttggaggttccagatggagctgtatttgaaaacaaggatgtcaatggccctgaggatctttaagctatgcttgccgtcaccagtttttcccaaggatttgtcaataggagcagccaacccaaatcactcccactgagctctaccttttgtaattctcgtgccattccgctcccgctgtgagggtcctgtgagcccgctagagaatatgactgtaatcttctttggtgcgtctgcccttctgtttttgtgcgccagggacgtatattttgctgaaatgatactaccatagctttgcgtgccggaggtgctatgtggtgtttctgtgtgataggacgggatgagatgagaccctcaaattaggttgtttggttctgggtcaaagattgagacaagaatatcctagtatt

SEQ ID NO: 34943 - DNA, 853 bp, Zea mays
  Clone ID: UC-ZMFLMO17352F06_FLI
cggccacctcgcctactcccacaccaaccaggcgctcctccgccccaggtcgttcgcggccaaggacgaggtgttctgcctgttcgagggggtgctggacaacctgggtcgtctgagccagcagcacgggctgtcaagcaagggcgccaacgaggtgctcctcgtcatcgaggcctacaagacgctgcgcgaccgcgcgccctacccggccagcttcatgctcgcccagctcaccggctcctacgccttcgtcctcttcgacaagtccaccaactccctgctagtcgcatctgaccccgagggcagggtgccgctcttctgggggatcaccgccgacggctgcgtcgccttctccgacgacatcgacattctcaaaggctcatgcggcaagtcgctcgcgccgttcccgcaaggctgcttctactccaacgccctcggagggctcaagtgctacgagaaccccaagcacaaggtcaccgctgtccccgccgacgaagaagagatctgcggtgccactttcaaggtggtggaagggtctactgtcctgacggcgctgcactgatctatcatcatcaggcggaggcgatgcgatgatgatgcagaactttgtacatgcgttggtggatggtggtgtaacatagtggctgccaacaagtcatgctcatgcaaaccgatgaatctatctctgtatcatcgatctcggttgcttgctagtccagactccagacatggctatatatatatagctggtgctaataaataggagtataatcgtcatatcgatcggttgcgtgtggaatgccaatcatgtgtgtaatctgttggcaaataacaaacctctgttcctccctgc

SEQ ID NO: 34944 - DNA, 1296 bp, Zea mays
  Clone ID: UC-ZMFLMO17353F01_FLI
cacgaaggcacgaacggtagaacccgaccgagcgcggcagcgcaaacctccgatccctgctgcgagcaagggatggcggcggcatgggcagtgctggcggcggtcctcgtcgcggcgcaggtggcgtctgcggcgccggtcacggcgccagcgttcctctgggcgcctaagaactacggattccgctctgatgatgctaaggaggtagtccattatcaaacaatctcaccaaagaacttagctaaatctgttcttgaggaaggtggctggtcaacctttatgtgttcaagggaggatactgagaagcatgttgatgttgccattgtttttattggctcaaagctacaatcatcagacatatcgaaagataagcaagttgatccagctttagcagatacattgaagctctccttcacagaatcagagttttctatggcattcccctacgtttccacatcagacgatgagaaactggaggagtcattgctatcaggcttcactgagaactgtaaaagtggttttggaagaaaccgtatcacctacacagacacgtgcgccgtgagtggccaagatctgaagacgtatcacaacatggatgctatcaatgacttggtagtgtcaggaagaaccaacccgagtggacagactgatgtaatcgtcttctgcagcggcgggttcgagaagttaggcaccacggaatcggaaggggagctgctttcccagcttgtcgacttgctgaagctgtctggggctagacacacgattctctacgcttcccagccatctggttatctactggagaacccttccggctcgccagtggctaggcaccttgcggagaggactaacggtacaaaaactggcctactgagcaaatgtgacggagagtgcctagtcaaatcaactcttcttgaaggaacctttgtcggaatagtgctccttatcatcttgatatcagggctcatgtgtatgatgggaatcgatactccctccaagtttgaagctccccaggagtcttgatctcccttcgaagcagaacccttgttttgttggtctgcactgtggatagatattattcagtttccccctttgaaagcgcctttcgtataattattattatttttttactgagccatctgttatttacgatgtgctcaaacttttgacaccaaacgaatgcatgtgtgtgaggcttgtgctgtgaccagacatagcattgcctccaggtgttttctgtgaataacctggaatttcaggtgggtactgtgcatcaaaaaaagatgaaatcttgctgtt

SEQ ID NO: 34945 - DNA, 528 bp, Zea mays
  Clone ID: UC-ZMFLMO17354B05_FLI
gcggaagagctcggggcggctagcaagctgagcccgcaggccaagcggaaggtggtgaccaggctggcgtccctgctgccgctcgcaagctgatcaacatcgaaccaagaggagggactctctccgtccggctccaaaaagttttcccttttcccctccagaagatttctatttcccccgcgttcgtcgatccgtctgagggccggctccaggtgttttagcggttttccggcgcctcggagcagagagtgaaaaaagagagagagagaaacgcctccctttttccgtcgaatttttttcctttgttttgttcctgcgaaagaacaaaattttcagttgtccgcggccgggggaacgggaggaatctgggcagatttgggttccctgtcctctgttcttgggagggagggagagaaactgtgaatcatcactactgctatgatctataaaagcggttgagtactgtatcgtgttcatcaggtcatgtgaggcctgtgacttcaattgaaagtaccataattactctgc

SEQ ID NO: 34946 - DNA, 1386 bp, Zea mays
  Clone ID: UC-ZMFLMO17354G10_FLI
tgctgttcgccccctccaccccacgttttggtggatcagtggaccagaacgcagtccttgaatttattgatgctgggcatgacatgatcctggcggcagattcctctgcctctgatcttattcgtggcattgcgacagagtgtggggttgattttgatgaggatccagaggcaatggttattgaccacattaactatgccactatggatgttgaaggcgatcacaccttgattgttggtgatgatcttattcagtcagatgtcatactggggtctaaaaagatcgaggctcctgtattatttcgtggaattggacacacggctaatctatcaaacagtttggttatgaaagtcctatctgcctctccatcagcatactcagctaacccaaagactaagttatcgttgcctccatcgcttactgggtcagctatatcattggtttcggttatgcaggcaagaaataatgctcgggtgctgctatctggatcacttgatcttttttagcaaccggttcctgaagtctggtgttcaaaaggctggtagcaaaacgagatacgagagagttggaaatgagcaattcgtgacagagacaagcaaatgggtcttccatgagagggggcaccttaaggctgttaatgttaagcaccacaaggttggggagaccaatgaaccaggcatgtaccgcattaacgatgacctggaatactctgttgagatctatgaatggtctggaacaagctggaagccatatgttgctgatgatgtgcaactccagtttttcatgatgagtccttatgttctgaaaactatgtcgaatgacaacaagggtttgtactcaacatccttcaaagttcctgatgtctacggagttttccagttcaaagttgagtaccagaggctgggatatactggtttgtcttttacaaagcagattccagtgcgcccttacaggcataacgagtatgagaggttcataacatcagcgtacccatactacactgcctcattttcaacgatgtgtgctttcttcatattctcgcttgtgtacctgtaccacaaataaaggactcacgggagcgcacaagtttctggaggctgctgatgcgacctagatctgtggccaagtgttacccggtgcaattttatggaatcatatatttgtagtaggccaacttagctagaattagacgaccgtgaccgcaatcatgggaaatttactcgtgctagtaggatgttcgatctgccccacatttttttttgttcggatccttctgatcagcacttgtgaaaacgtttacagtctgtagcattgaaaggatgacgaagcatgtagtgattttgaaactactgctcttgctcagttcggatttgttgcccggaattt

SEQ ID NO: 34947 - DNA, 1111 bp, Zea mays
  Clone ID: UC-ZMFLMO17355F05_FLI
gcgagagggcagggccgcggcgttgcgtcagatggggaagtacatgcgcaagtgcaggggggccgcaggcgcggaggtcgccgccgtcgaggttacgcaggtcgtcggcgtccgcacgaggtccaggtccgcggcggcgaccggcggtgtcgcgaaggtcgtcgccccgaggaggaagagggcgccggcgggggagcctgctgcctccgtgggcgctggtggggacggcggaagctgctacatccacctgcgtagccgcatgctgttcatggcaccgcctcagccgcagccgccgtcggttccgaccccggcggaggctgctgatggcgctgcaggacagcagggcgcggcgctcgcggccgggctctcgcgttgctccagcacggcgtcgtcggtgcacgtggggggtcagcgcgggagccacacctgccgctccgacgacgctgcagaggctggcggggatcacgtcctggtggatgtctcggcggcgagcaactccgggagcggcccagaccgcgagaggcgagagacgacgccatcgagccgggcgcacggcgagctcagcgatctggagtcggatctggcggggcacaagactggcccgtcgctaccggcggcaacgccggctgcggagctgatcgtgccgccagcacacgagatccaggagttcttcgccgccgccgaggcggcccaggccaagcgctttgcttccaagtacaacttcgacttcgtccgtggcgtgcccctcgacgccggcggccggttcgagtgggcgccggtggtcagcatctgaagcgagcgtgcgtccggtgcaaggtgaagctagaaagagaaaagatgccccccccaacaaacataacggagaagagaaaaaccaaacaattaagcagctttatatagcctaagctaaccaccaccattcatctcgtccaaatgccttgcttttctctggagctagcaggagcgtagttattatttagtactactttacttattcagaggttatcttgaccccgatagatcaatccgcttactgtgtaatttgtctcatgcatcttagatggagtttaatcgtcttaatttattactgtacagcagcttgctggcttgc

SEQ ID NO: 34948 - DNA, 740 bp, Zea mays
  Clone ID: UC-ZMFLMO17356A12_FLI
aaaaccctaggccctagccaccgcccaccgtcgcctcagcaaatcctcctcccgtttcaccatgccgccctgctgctcccccaccacctccgccgtcaccgctgcggcggcatctcccggcgcctcgcgcagcgggggcctcctgcgccgctcgcgcccagcccccgccgccgtggtgagctccttacccccacgccctgttcttatttgctctgttcgtgcccgggccatgcggcaataatcactcgccgccctgccatccggaccgaccggtgattttacggcgacggcgcgttcggagctcgggaattgatattacggcgatggtcggcgttcggagctcgtttttctttaaatacttttttcgcaagcgcgggtttaaagctttagttttggatcttggacactagagagtacccatcttgtatctgcacacaaaggaagtaagttgggaagttgtgctactaaaagggcgtttttcaggactccttcaatttgtggctcctttaaaacgtctctgtgatgacccaaggtggcggtgcttaggcgcaggtatgaagtattagtggatctttcgagtattagggtttgggccatattagggccgtattaatcttctatgggctgtaataagtgattagccaaggcattagccattctgttagttggatctcagatgtataaatactgtaactgtttgttgagatggaaatatgaaatgaaataggaacagacacctg

SEQ ID NO: 34949 - DNA, 403 bp, Zea mays
  Clone ID: UC-ZMFLMO17357D07_FLI
ctgtccagcgctgcaatgggcctccgacatcaaaatggagcaacggccggtgtgcacgcaccggcatatttcaagggatttccactcagtcaacagagggcaggatttccttcagccagcatgccgcaaactgggtaccatcctcatccagaagaattatttgttgcgtcacacttcagatatcctagagggagtgctggtttccgccgataagacagtctggttggcgcctgctgcattttggtaactgcgttggtggtaagacatgcggtcttcggcttattttcattgatgccatttcgttgccatgactcatgagcaaggagtatttgggtcttacctaatgtgcagagaggccagaactttgtttcatcttgagataaaagcttccttcgtatataag

SEQ ID NO: 34950 - DNA, 1823 bp, Zea mays
  Clone ID: UC-ZMFLMO17360A02_FLI
ccagatttggtggaattcgttaggggtggaatcggctccagcacttgttttcttgaaggggccaggcacaacgccttttgtacaccatggaatttttagcaagtcagagttcatagagatgatggaggagcacaagcaccatggtattgttgaacagtttctgaaccaattgcactgaattgtcaagctgtgtaatattgtttaggttgcagtttccttaaatgaaacaaaacatttctttatcaccacattcactcctttactgttcttgacttcttgttaagaactgcgacagctaagaagtgacacatctttggaactgggttgtgatgctagaggtcattcacgtgctggcaatgatgcagcaatttggtattgtgtaattgttgctggtcgtccaggtgcagaattaagcaagaagagacaaattttgcggaaggctcaagacaaattgttagatgatgttgacagaagtgctgggaacgttgacaattcagtagagacatcaagtgctgcaactgccttcaaagatgataggttaacctttgtttggttagatggagaagtacaaaaggtagactgctttataatttcaaacttcactatttatctcttattatctagtcatcttcgggattggatattatccagtttggaatgttatttcttgttagttggcaggtgtagattgatttgttaggaccagctctattgctcttattatatttgtaaatacgaataacatcataagcatatattttcacagcaaatttgtgccttctaccttgccactgattatactggagcctgtggccctagagactttggagatgacaatgataaacctgaaatttttattgttcgattccaaagaaatgcaacatatgaggcactgaaagctgaaaaaaagaacaatcttgtggatgttctccagggacagcatgctgatgcgtcccagttagtggcaaggtacaagggcccagttgaaattgaagagataaataggtggatctctcagattatcaaagatggagatactagagaaattccttacttcacttcaaaggtgccagatcttgtaccagaggaaacaagcaaagcatggagttctaaaaatatccgctcagcagggaaaagtctaaaagagaacatcggtttccatttccaagattacctaacccacccaatgattggttcaactttgcttatgtgcggatgtatttctatgggaataatatggttcaggaacaacatacccactcaaagtactcgacaggagaaagctcggaaagacaaggcaaagaggccccgtccgaagcttagcacgtcgctcttcggtgaaccttctgtcccagacgtcgacccaaaagatgctcgtcagtgggaaatgtcaagctcggattcagactaatgactcgcttcttacatttggacctgacgtactgcaaagacgttttaaaattaagtaaactacatagtagtgcggtggccttagttttgggaaatggaacagagtataaccgatatagtgaaaacagttggaccactgaagtaatccagttgccatctttccgatgcttcagctgccctgtgacgtgactccagtgacgtatttgttgacacctgcttgaaaactgacaagcctctctattagacagagtgttaacctgtggtctcagaattgagtaaacaatggtagacagagtgttaacgtacatcatgtctgatgtaagcccgtattttcgtcgtgagccaaaactcggctaacgtcgtgacacggactattatttttatttttcttaaataataatcccttttcagac

SEQ ID NO: 34951 - DNA, 1397 bp, Zea mays
  Clone ID: UC-ZMFLMO17360A09_FLI
cctgtctgaaaacattctcacacagtgattatgtgacttgcatccagttcaaccctgttgatgatagatacttcattagtggatcactagatgaaaaaatccggcatatggagcattcaaaaccgtgaaattgttgattggaaagatttgcatgaaatgatcactgctgcttgctataccccagatggacagagcgcactaattggttcccataaaggcagctgccatatttatgatacatctgataatatgcttctccaaaagaaacaaattgacctgcaaaataagaaaaagaagtccagtcagaagaaaatcactggatttcagttcctcccagggagtacttcaaaggtccttattacatctgcagattcaagaatcagggttgttgatggccttaatctagttcacaagtacaaaggtttccgaaacactaacagccagatttcagccagtttagctgcaaatgggagttatgtgatctcagcaagtgaggattcccacgtgtacatatggagaatcgatgataaccttgaacagggcagaagcaaggggaatgttactgtcaccaattcctatgaatacttccactgccaggatgtgacagttgccgttgcactgccatctaacggctccccagtggtatccagagcaaactcggcgaagcacgatgagcgggattctgtatcggagcattctgcgctgcatgctgcccctgaaaaaccgcaagactcttctgatttccagcctcaaagtggctataccataagcaccggttcaaatgacagtggtgatagagcaacttggcctgaagagctcatgacgccaacaaagcagagccctcggtctagtgccagtcttcccagtggtgctgatcaagctccaggtcggtcagcctggggaacggtgattgtcacggcaggccgtggaggtcagatcagaacatttcagaatttcgggtttcctgctcgagtatagcagctctgaggctgctgcctggtcttggcatctgccctgccgcaagccgccggggtcattttttgtgtgtatagataggcgaaagtttgggtgatttgcacagcagtctgggattggattttgttgctcctaggcgcacctgcttgcgaatttcaactaacctggtactcaaggtacggcgagttcgtttgcccggaattgtatatgggagtggagcccgggaaggacgagggggcgtcggccggttggagctagatcttttttaggatcttttgacagacatcttttcatctgttttctccattgagtccagtttagctttttcatattttttttgtactttatgttttactcgtcattatatattcttgtaagaaatcccagttctacagaaatagaaaagcgaaaaggagttgcat

SEQ ID NO: 34952 - DNA, 1374 bp, Zea mays
  Clone ID: UC-ZMFLMO17360H03_FLI
ggggcaacaagtttttctccattgctgggcataccaaagatccatctgaaggtgttacaggtttgctaaaattcagcttttaaggaatttgatccgcatacttgtacctggtctattgtcaggacttatggaaaatcaccggtttctcgcggaggtcagacagtgactcttgttggaacaacactagttttgttcggtggtgaagatgcaaaacggtgcctcttgaatgacttgcacattcttgatcttgaaaccatgacatgggatgatgtggatgcaataggcacccctcctccgagatcggatcatgctgctgcttgccatgctgaccgctatcttttgatttttggtgggggatctcatgcgacatgtttcaacgacctacatgtccttgatttgcagacgatggagtggtcaagacccaaacaacaaggcctgacgccaagcccaagagctggccatgctggtgcaactgtcggggagaactggtacatagttgggggtggcaataataaaagtggtgtctctgatactcttgttcttaacatgtcaactctgacatggtcagtggttagcactgcggaaggacgagttccccttgccagtgagggcatgactctagtgcatagcaattacaatggatacgattatctcatctcatttggaggatacaatggacgatacagcaatgaggtttatacacttagcctcaaatcagattttaagtccaccacaaaagaagaaactgtctcagatctagggtcgtcgaaccagaggttgaaatggtgattggcgtggacagtgctgattcagacctgaagaacagtagtacagtactgatgaagcaagtgaacagttcttagcagctctcaaagctgagaaagaggaactagaagcgacacttaacagggaacagctgcaaactgtacaacttaaagaatacattgctcaagcagaatccagaaatgtggaactcacaaaggaacttcaagccgtccgtggccaacttgctgctgagcagtcaagatgtttcaaacttgaggtcgatgttgcggaactacgacagaagcttcaaagtatggatgcattggaaaaggaggtcgagctgcttcgacgacacagagccgcgtcagagcaagcagcgctggacgcaaagcagcggcaaagttctgggggcatgtggagctggctcgttggtacccctcctgatgataaatctgaatcgtgatcgcgtcgtgagggcagcactttagttcatacaggccgtgattcatatattatacttgtaacatttatatacccgttgatattttttttacagttactgaattcgtgttcattttgaccacagaagataaggaaatcattagtttt

SEQ ID NO: 34953 - DNA, 2496 bp, Zea mays
  Clone ID: UC-ZMFLMO17362G12_FLI
gtcacggaccttgatgtccaggcaagaatcactgaacaatgtaccaagatttatagaagcggagagaaatcggagagaattagtgtgcgtttgtttgggattataatctgtctagattatataatgtaacatctttagacgacaggcggcaataaactggagacaggcagggacagaggaggaaggggatgtttggtttctagggactaatttttagtccttctaatttaatcttttttagtttctaaattgttaaatacgaaaaactatagtgactaaaatggaataaaatggagagataaaccaaacacccccgaagatgggctcggcagttctcttgttctgttcgatcgatgccctctgcctgacactcccagctccttttgtagctgcacacttcactaatctgagcttaactggcagctcagtccatggtaggcccatttgacagcccagtctgtgaccgatttcgtatccttttccccattcgctgagcacgattttgggtttcccactttctctatgtgtcgttgggtttcgtctttacttgtagtaatcaccaactcaagacacaatctttgcaccatttcgcctgccccgtatggaatgcctatttgttattttatcagtaaaatcttgcacataaatactgagttaatatgcttcatggtgcactttgatacactttttttgtttatttaggactcaatccttgaggtgctggcacaggacgatatgctgaacgcaaaggagctggtccaatgggagaatggcttgtcattcaatgacatagcggctaggcaggggattcgcatccgcagacactgccgccccactgcctccttgaaggagatagaggaggagctgggagccccccttaacatcctagagaagatcatttgggacaaggagattgaagtagctgaggggcatgctaagaagcctcttgaggaggtgattcaggctgcaacgaaagcccctccttcaagagacttctatggcgctttagaagctgcctacaagcgtaatggggtgcctgcattgattgctgaggtcaagaaagcatccccgagtaggggtgtgctcagggagaactttaatcctgttgaaattgctcaagcttatgaaaagaatggagctgcatgtttgagcattttgacagatgagaagtactttcagggaagctttgataatcttgaaaaggtgcgcagctcaggagtgaagtgccctcttctctgcaaggagtttgtcattgacaagtggcaaatctataatgctcgctctaagggtgctgatgcaattctactaattgctgctgtgctaccagatcttgacataaggaaatttcttcagatttgcgaagagttgggaatgacagctcttattgaggttcatgatgaaagagagatggaacgtgtgctgaagataaatggagttaagcttattggtatcaataaccgaagccttgagacatttgttgttgatacttcgaacaccaagatgttgctcgagaaacatggggatatcatcagggagaagggaattttggtaatatcattgtcttgggtgtatattgatccattaaaataaccttgtcaggttctagttcagtgtgtacactctgtcggctcagacacatagaacacaaataggaatgcaaaataagtgtgttattctctaaagacaaatatgaaatcatgataaatatccatttttaaacctgaaatgtgaaaaggcactggaatggcctgttttccaatttgttggacatattactccaattaatgtatgaacatatatgaaaataagtttctttagagcctaaaggaaacaggaaagatattatgaactgaaattgacaatttattttaagcagatatgtcaacttgtactcgatattacagttgtagtgtattgcatattggctggcttctgccagctagaagcagcacaattattgagctggcttttaaaaagctagaagctagcttctgaggctgccttttggtgtggtgagaaactgaacagtcattacaaaaaccaatataaaaaaagccaggaagccaacttttgagctaaaagacaaatagaccctatgactattaagtgtcataatctggtccttgctgatatatctcttttttcctttgtacttgtcaggttgttggtgaatcaggtctgtttactccggatgatgttgcttatgttcagaatgctggcgtttctgctgttttggttggggaatccctggtgaagcaagagtgccctggacgagccattgttgggttatttggcaaagaactgctgcactgaatgagaggacaaagattgtagtagtacatggtttggtggtgaggtgttagtgctaggctgctagctgttagccatagcatcatttgcagtaatagcattggttttattaataataccaccgaatgtgacatgcagaataaaaataatgttcaataagttccattcagtgattttctttagttc

SEQ ID NO: 34954 - DNA, 1022 bp, Zea mays
  Clone ID: UC-ZMFLMO17363C06_FLI
ggcctacagcttttggagctctgtttggaaagccagctgctggaagaaggccagatcttttcctaggattttcaaatgttcagggtaagactaaggtggacaagataacgtcttccgtggtacttccttttcatcatttctcaggtggtgcaaaacttccatcagccgtcctttcagcgaaagaatcgttgcattctgaaccagacagcatccaacacagtgatccagcttgtcagttggaagaagtgatacagttggacatgggaacagacgagcaacaaccaccagaaaatggcaacgaggatgatggacactgtgagactgaagacacggagatgtcaaagtccccttcaggtgacccgtctgttaccgagcaacgattccgatcactcaacgaagaaagaaacgttaagcagatccagaagacacctagagaattcgaatttagtgttccggtggtgccttttgattatgccgaagccagaaagaatctcgtgtctagtttgcctaaagctgagaggagaaaggacgatgccgttgccagggctataaatacagactctggagataagcagaggggttcaaaaaagccaccaggtgggggagagaacgagggaaatttccagcatccacgaagacggcaggctttcccgccttcaggcaatagaaatgctacgtatcaccagtagcaagttgagatgtataactggcgaattggattattccaaaattgtgataaaagagtaccctacgtgttgtatatttggactggggatatctcggactcatgagaaaccaccgagactgctactgcaccgcggtgccctgacgtgttgctaacacgtgctaggtgactgagaatagttgggtattgcgttttttttaatatgttctgaacatgagaatgccctagtatttcattaggatgtgtacattttacaatgttttatggacaattactgttgtatttttacttttgaactccagagccctgttttggtcacgcactacaattttcacct

SEQ ID NO: 34955 - DNA, 708 bp, Zea mays
  Clone ID: UC-ZMFLMO17363E04_FLI
cacggcttgatgctaaccttccagactcatttcacaacagcaatgttcatgcttacatgcccaaagtcttagtgaatgtcgtagcgttagcaatttttttttaaaaaaaagttccattgaatgactaattcttctcctgttgcatgctacagtaatgccctggagaaacgatcaaaagatatcgcaaacaggatgttacttgaagagggtgtactgcggcgttccacacgtgtccgggctcagccaaaggacatggcattcctcaagtacgtcaacaagtggaaggataactgaggtggcggtctgccagcggtggtggtggtctgccagcggtgggaggataacttgagccactgggtgacagggtttgcagtagatgtgtttggtttgaggttaaagtgggatgggacgggggcgacaccgtgctctcaattttttaattttttgggatcacgccgctacaaaaaaactactctggtgtttacctcgtccctacgtgactcccatttaaccactagagtaactgtgaccgtcccatttcatcctttcgtatacttggttaggtcgtcacagtggttcgccatactcgtcgcattagctaatgaaaactgtactagaacctagttttcttccctttgctactgaaatgaacactggttcacaaatgaaaagcttttgctactgaagtgaactgtgccactctttttc

SEQ ID NO: 34956 - DNA, 2256 bp, Zea mays
  Clone ID: UC-ZMFLMO17363G04_FLI
ctttttctctatccaaccataccctcaccaactccccctgtctcggtttgcgtggagagagaaagggagggagcgagaagtcaagccggagccgggaacagctcaacaccacgggccgcggtttctgaaaaggagaggcgtggtgggaaggggagggggagcgggaggggggcgagccagccagagagccgtacgcgaagcaagcagccccctgcatctagatcaggcgttctgctcgcaccgccgccgccgccgccgccgccgccgcttccttctctcaccgacgctaattggagatcacgtctgggcctggctgctcgtcttccgtcctgggtacaattcgattgatgacctcatcagggaagaatgttttgcagtcttacatgagttaaagggatagaaagtgcaacaaccgtggaataaaggactcgtgcttttgagtaattcaggaggagtacatgcatcacgaagccttgattctggaatggtgtccagtcgaaggaacagtgggattatcctacgggaagggtcggttagggactggtccgagttcaacaatccctcgccgtccccaaaactgctgtactcacagtcctatgtcgcaatgagggggttgctggcctcagtgatctccttggactttttcctgctgtcgagcaagctaaaatctgtgtgcgcggctatgacttcccagaggcatggccgatcacaggagaggtcaaaatcaaaggggttgacctgcaggagagttgcagtccatctgctgttctttttcatggttggcattttcattgggttcatgcctttgttctctgtcgatgtttacaagaaaatagtatccgaaaacgagaggcttccgttccatgatggtgtgattgaggcggaaatgatgggcaccaaagttaaggagttggagacagttgtagtagagaaagaggtcgaactgattgacgagcctcaggttcaagagagccctccagttcctgcaatgttggatgatgaggcagattttgctgaatcttcacctgcattacctgctattgaagaatctgacattcctgtgaagaagctgctgataatcgtgacgatcacttctgttcggccacaacaggcatattacttgaatcggctagcccatgttttgaaagctgtacaggcacctcttttatggttggtggtggaatggcctgaacagtcctatgaaacagcagaaattctgaggtcttctggggttatgtacaggcatcttatatgtagaaagaataccacgagtgtacgaaagattgctgtatgtcaaaggaataatgcaatctatcatgtcaaaaggcatcaccttgatggtataatgcattttgctgatgaagagcggtcatactcagctgatgtatttgaagaaatgcagaagatcaggcgctttggctcatggcctgtagcaatccatgttggaacgaagtatagggcagttttggaaggccctatttgcaaaggaaaccgagtcatgggatggcacacagtccagacggttcagaagaagagttcgactcgtcgattcccaattggcttctctgcatttgctttcaacagcacaatgttgtgggaccctcaaagatggaaccgcccacctatggattctgttatggtccactcaggtggaagaggtggtttgcaggaatcacgatttatagaaaagctcgttaagaacgagcgccaggtagagggtcttccggacaattgcagtcgggttatggtctggaatttcaacctggaacctcctcgagtcaactaccccacaggctgggcactatataagaacctagaaccggacatgcctgtgacatagtttcctgccgctgccactgtgcctgcttctagaggtgatttctcccagcaaggcagagaagtttggagcacgtctccagcgtattggtagttctaaatttcaacttcctgctgttaccaggtggtccagaactccacataggctgctcgtcgatgccatcctgagcgagttgcgccaaatattacatggatactgcacgctgagatcttactcccttcccccgcgcgccttttagttttgtgtattcctgttatgccctttattttgtgtttctccttatattcaccagcagctagatacgccgtgtagactttcttttcatgtaggctcttctgttcttttcatactgtgtgtgttaccttactacagatgtataaaggctctcatacattgcagctgtttttaagaggaaaggc

SEQ ID NO: 34957 - DNA, 1776 bp, Zea mays
  Clone ID: UC-ZMFLMO17364C12_FLI
gaactccgaaaagccccccaaccccagcggcctcctctccgccccgcagccatggccgccaccggcgtggtcgccgagccgaagaccaagtacgatcgccagctcaggatatggggtgatcaaggccaggctccactggagaaggctagcatatgcttgcttaactgtggtcctaccggaaccgaagcattgaagaatctcgtgcttggaggcataggaagtgtgactgttgttgatggctccaaagttgaagcatctgacctggggaacaattttctgttggatgaaggatgtttggggcaaccaagagctaaatctatatgttctttcctacaagagcttaatgacgctgttaaggccaagtttgttgaggagtctccagctcatttgatagatactaatccttcattcttttcccagtttactgttgttattgctacccaggaaagcagatatcgttttggttgctgcacgttcatatggtctaaccggtttggtcagggttagcgtaaaggagcattgtgttatagaatcaaaaccagaccacttcttggatgatttgcgacttcacaatccatggactgaactaaagcagtttgcaaaatcaattgacataaacgataaagatcctgttgtccacaaacatactccatacattgttatccttgtgaggcttgcagaaaaatgggcagatgcacatgatggtaacttgccttcaactaggcaagaaaaaaaggaatttaaggatctaattcgagcccatatgcttaatgtagatgaagaaaattacaaagaagctgtggactcttcatataaagtatcagtcactccaggaatcagtaatgagattcgtcagataattgatgatgactctgcggaagtcaattcctcatcgtcagatttttggattttagtggctgctttaaaggagtttattgcaaaggagggcaacggtgagctacctctggagggaacaatacctgatatgacttcccttactgagtattatgtgagcctacaaaagatttaccaagctaaggcagaatttgactgtcttgccctggagcatcatgtaaaggaaatcttaaaaaggattggtagagatccggattcaatttcaagagcatatatcaaaacattttgtaaaaattctcgaaaactaagggtttctaggtatcgtagttttgaggaggaatttagctctccgtttgtcgctgagattcagaggtatttcaccgatgaagactacagttacgcaacgaacttctacattctactacgtgctgttgatcgattggctgccaattatagcagattgcctggaatcttcgacagtgagattgatgaggatatccctaggctgaagactgttgcggcttcagtggcaagtgagatgggtttgaatggagcatccttatccgaagacctgataaccgagatgtgccggttcgggggtgcggagattcatccagtggctgcttttgtcggtggagttgcttcccaagaagtaattaagctggtcaccaagcagtttgtgccgttgccgggaacattcatatttaatggaatcgacctcaaatctcaagttttgatgctataacatggatgtggaacgttgtctttgtggactggatttgagttggcccagattttgtgccagggcacaacgctgcaaatggaatctgtttgcccaacgcgtagccaaatatgtgttgcatgatattttagagcctgtttgtttcctcgcaggattatataatccagcttactttatat

SEQ ID NO: 34958 - DNA, 1727 bp, Zea mays
  Clone ID: UC-ZMFLMO17364H11_FLI
ggagagccaggggttgttagaacaagtccagtctagagagggagcgaaccaaaagggagaaataacaaaaaaagaatagagacacacacacacagctctgttcttcttattccaatcctctctcatcttgctggttcatccttgggatcggctctgtcgtcccctagctagttcgttcggtgctgtggtttctgccgctgtatccaagaactcttgctcttgctgagtctgggacttcagttcctcgcagagccaggctttacatatcttgggtgccgcacacagtatctatgcacctttgacaacaccaatctgattctgatgacaacaacagccactatctcccgtcatccttgcatcgatctgtcagctggcgtcgcctcgtgcttctgaagacgatggccacattcttctccacttccacgaaccagagggacctcgccggaggcggcggcgacatgtcgtcgttccaccactacgcctactcggacccaccagccggcggcctcatgcctttccccgccaccatcgtgtcgtcggaaggccacgtcgcgcacggcggtgacgacggcggcaggggcgcgttcgtggacgtgaacgcgagggacgggccgacgggcggcgccgagatgggcctgcagacgcagctgctcatggcgaacgccgcgtcggcggtgcagcaccaggggctgtcgcttagccttggcacgcagggggtgccggtgtctctttaccagtaccgccaggcggaggcaggcatggccgccgccgcctttctaagcccgaaccaggcgtcggtggcggcgaccaggagcgcgcagagcatctacgtccagaactccaggtacctcaaggccgcgagggagctgctggacgaggtggtcaacgtccaggacgcgatcaagcggaagggggacaagagccagcagggcaaggattccggcggcggcggcggtggcggcgagggcaaggacgccgagacgagcgacgagaaggctggcgagcacgaggggaactcctccgcgccggagctgtcgccgtcggagaggcaggacctccagaacaaagtgtcggcactgatggcgctgctggatcaggtggaccgcaagtacaggcactaccaccaccagatgcagatggtgatgtcgtccttcgacgcggtggccggcgccggcgcggcgaggccgtacacggcgctggcgctgcagaccatctcgcggcacttccggtcgctgcgcgacgccgtcggcgcgcaggtgcagtcgctgcggcggagcctgggcgagaaggacgggtccgcgcagggaggcgggctgccccggctgcgctacatcgaccagcagctgcggcagcagcgcgccatgcagcagttcggcatgatgcagcagccgcagcacgcctggcgcccgcagcgcggcctcccggagtccgccgtctccgtgctccgcgcctggctcttcgagcatttcctccacccgtacccgaaagattccgagaagctgatgctcgctaggcagacaggcttgtctaggggtcaggtgtccaactggttcatcaacgcgcgcgttcgactgtggaagccgatgatcgaggagatgtacagggaggagttcggggcggagatggactcgcactcgtcgtcggagaacgcggcgggcaacaagggcaaggacgaggcgatatcctcggaggaccacgaggagtttcagagcccgtcgagcgccgcc

SEQ ID NO: 34959 - DNA, 1085 bp, Zea mays
  Clone ID: UC-ZMFLMO17365B07_FLI
gctaccgacatcgtccctggccctgcctccccgccgctgccgcctgccgcgagcatccttcgtcggcgtcgtccccggctctccggccgccctgctgcgatcggccgctgcgttggtatgtgtttaaaaggtgagacgaggcgttcaggggactactggatccacctagatgcctaggcgatcgagaaggcgctactgttttccatgtggaattatccaggtaataaacacaagccgaagaatgcacagtatgcagaagtttgcggatgtcaggtggcactttgtaagaaacaagaatccattatgcattgcagggctatggaatgagttgaaaacaggaaccccacacagcatcaaccagaagagacgcatttcaggcattaaaatagccccagagaacaggtcattggaaggtcagaaatggtaccaatccgtttttttttgtctgccgatatttctgtcagagtcgggctttgtttgtgatcagtttcagatcattgtgtcgatcagaaccttaagcaggcagtccatttgccgcctaatcacagatagcacaagattaacattgcatataaaagttcttgacaacatggtcaattcattcctggtgacatggccatccaacagaagaaaaaaaattgatattgctgatcaacgaaacagttctggacccagattggtcagggaatcagttggtttgtttattctacacctggaagggcatcgaagaaaatctctctttatttctcaccagaatcttcagttgtcagaaggccagctaaagaagggcaaagcttcagatgcatacgcgcataaactaaaagtaaatcatgttcctgtttttgtacaggagaagggatctgattgggcagtggacctggctacctagattttcttgaaatttaagaagcctcagtatcgtgtatttacatgttctttttccagtacgatagatttacttttccgtaaagtggcgtaaaccgtaagtattttttcctcccaacagtcctctcctaacgactaacaaagttcaattcatgcgaaattcggatgtttcattttaaaaaaaggatcttcagtgtgtg

SEQ ID NO: 34960 - DNA, 1171 bp, Zea mays
  Clone ID: UC-ZMFLMO17365D08_FLI
ccttgagttgatttcatggaagactgtcacagaaattggggatgataagaaaatccttaagaaggttctcaaggagggagaaggttatgagcgtcccaacgagggtgctgttgttgaagtcaaaattatcggaaagcttcaggatggcgcggtgtttacaaagaaggggcatgacgaagagccatttaaattcaagaccgatgaagaggaagttattgccggtcttgatcgtgctgtgttgaacatgaagaagggcgaggttgctcttgtcacaattcctcctgaatatgcatttggttcaactgagtcaaagcaggatcttgctgttgttccacctaacagcacagtaatatatgaagttgagcttatttcatttgtgaaggacaaggagtcgtgggacttgaacaatgaagagaagattgaggctgctggtaagaagaaagaggaagggaatgcattgttcaaatcgggcaaatatgctagagcttccaagcgatatgagaaggctgccaagtacattgagtacgacacttcgttcagtgaagatgagaagaagcaatccaagcaactgaagatcagctgcaacctaaacaatgctgcctgcaaactgaagttgaaggattacaaggaagctgcgaagctttgcaccaaggttctggaactagacagccaaaatgtcaaggctctctacaggagggtgcaagcttacattcaacttgctgacctagagctagcagaggccgatatcaaaaaggcactggaaatcgatcctgacaacagggatgtcaagttggaatataagatcctgaaggagaagatcaaggagtacaacaagaaggacgccaaattctacagcaacatgttcgccaagatgacaaagtagcttttggggtggaggatgttgtggtgaagcgaagggattaaaaacaccgatttctgctgccgaaggacttcgcccgttgcttaacttctcgcttttcgcatactttgtagtcaattagtgtgcacggatgcttggatatgtgaaactgaggaacatgtacttcgaggattattattggttctgaatttttatgttttctggttcttgttaggaccattgaatgttctctctatataattttcggacacatgttcttaataaaccacgggagcaaaagtttatgctaag

SEQ ID NO: 34961 - DNA, 801 bp, Zea mays
  Clone ID: UC-ZMFLMO17365H04_FLI
gtttggagaggtcctatggtaatgagtgctcttgagaagatgacaaggggagttgcttggggggaccttgatattcttgttgttgatatgcccccaggcactggtgatgctcaactatcgatgtcccaaaggcttcggttatctggtgctttaattgtttcaactcctcaagatattgctcttattgatgctagaagaggagccaacatgttccgcaaagttcaagttcctattctgggattggtagagaatatgagttgttttaagtgcccaaaatgcggtgagaaatcttacatcttcggggaaggtggagcgcagaggactgcagaggaaatggacatgaaattacttggtgatgtacctcttgaaatcagcatcagaacaggttcagatgaaggcaaccctatcgttatatcatcacccaactctgcatcagcacaagcgtacgtaaatgttgctgagaaggtgactcaaaggctcaatgagctagcagaggagcgacggatgggcccagaaatcttactttgagaaattcaggccacttttctacacaccttcccctgtttgacgctacggcgccaaaaaaaaatgcactgataaatagtgttgttggaagtaaacttcaagttttatcagttgggctggaaatttactcgaataaaacctctgctgccaaccttgtctttgtcacgcatgtcccttatctagtattctagtctctgcatttttttcatgactcattgagtgataattatatactagtaatatatagtatgtgacctctgcttttggcatgcctgt

SEQ ID NO: 34962 - DNA, 532 bp, Zea mays
  Clone ID: UC-ZMFLMO17366B11_FLI
gcaagattctggtatttcaacttctggaccaatcagctcagtctcttgttcgtgagcaaaataaccttcagttggcacatcttccagcactacaagattatcagaatatgcatactcatggaatatagcttcaatcctttgccttttctaacaagttgggttaacacttgagatatcatcatttaactgggaagggccatcgtctaaccacttataactgccattttcaggataatgcatttgcttataccctaacttgtaatcaatactggcaacattgtcatctgggcggcatgaattagtgatccttccagagaaacgaactatgcaaaacaaatgtcatattaataatctagaaacatgtttgagatgggttttatctattgatgaggagcctgttaagaaatgtttggttcgcctgtagctgcaaggaatgctaacttttttttgggttcgtctctgcggaggatgccattgttagttgtaaatattggcggcatattaggaaacaaattatccctatttgagttgc

SEQ ID NO: 34963 - DNA, 215 bp, Zea mays
  Clone ID: UC-ZMFLMO17367A07_FLI
ggtcggtgaatgcccaggtggacggcttcctcggaagttgaactgttgaaatcgtgacgtgcatgtatattgtgttgatgcaccatgcgtgctgtaaaacgtaccgggtaatgttgtgtcgacacgttctggttttgatgtacatgagtatgtaagtacaatagtcgtagggattgctaaactaatgtttggcgtatacgcgtcagcattatggt

SEQ ID NO: 34964 - DNA, 1609 bp, Zea mays
  Clone ID: UC-ZMFLMO17367A08_FLI
gttggttaatggttagtgctggaaaggaacaaaaatgaatctgtttgatggaagcaggtaagtattatttgtgatccctatgtttcccagttccccttatatgccaattattcagtatgcaaatctgaaatgctaaatcctaattcatgtgggcacaaagcaacagagttatattagtatcacagcttgcttgattattagttatcgtcattagtttgcaaaaaaattagtaataattatatgcttggaattttaaatacaaacttctggtgctgattcttttgcggctttgccagttgaggccagtatgtcttgtagtcagctgtttactacagttctttttacaatggcaaatttttaactgttttatttacttatttacagttcacaatgcgttagttggaacttggacggttaatattttgtgtcatagtgcacaaagttgttttatgagccgcattactgcatctaatgtctattgtatgctagaataaattttgtatcatagatatatcagtgcacctatcttttctgaaaccttatttgtctgctatgtggttgattgataatacgatctctgtatttcaggaccaagggagctcactggtgctgttgatttgatcagccactacaaactgctgccacaccatgatttcttttgcaagaaacctttgccgctggcaatatcagatacacattatcttcacaatgttgtgggagacactgaaattcgcaaaggagaaggaatggagttagatcaacttgttcataatgcatatctgagggataaacctgcttatattcagccctttgatatggaaactctggggcaagcgttccaacttcgagaaacagctcttgtggatttgccttctactgaaaaaggtataccgactatttcgggtaaaccaaaaagtgagtccaaggacaaagagaagaagcataaaaggcacaaagacaaagacaaggaacataagaagcacaaacatcggcataaggatcggagtaaggacaaagataaagacaaagacaaggataagaaaaaagataaaagtggccatcatgaaaagaagaggaagcatgagggaacagaagattcagtagatgtgcataagcacaagaagagtaagcacaagagctccaaaaccgatgagatggggaatggagttagttaacacttcctagctctacctccaatccttgtaatttgctgttaaaacttaaaaggagacagacggtctctgctatcaaaaccctgtgcagaatagtgggtatcatgaatgggagctcttatttttgcagagtccattgtgaagagaattgaatttgttaatataggtctaatccttccaactgtgcaaatcaactgtgttcctccctgaagcattggttgtagggtgcgcttgaaaggatgtgcaatgagattgtttcgatgtaacgtgcatgagtacactgagtagctgtggatggttatacagtttgtggtctagggatgtgcagtgagggcagggaattgggaataatttcgtgcccccatcgaccttgatttgtagggtaggatgatttactgtttaaccactagcaaatgttagtagccagttccatgttc

SEQ ID NO: 34965 - DNA, 761 bp, Zea mays
  Clone ID: UC-ZMFLMO17367G06_FLI
ggagaaagctattgttagagctagaagaattgtataccatagttggaaggccaaatgtcttcagttacagtgagcttaggtcagctacagagaacttttgttctagtaacctacttggtgaaggaggatatggatcagtttacaagggtaagttgagtgatggaaaagtggtggcagtgaagcagctctctcagtcctctaaccagggaaagatgcagtttgcggcagaaatcgaaaccatttcccgagtgcagcaccgtaacctggtgaggttgtatggctgctgccttgagagaaaaacaccattgttggtctacgagtacctggagaatggaagcctcgatcatgcgttgtttggaaaggggagcttgaatctagactggccaacacgattcgagatatgtttgggcgtagcaagaggtatagcttatctccacgaggagtcaaccatccgcattgtgcacagggacataaaggccagtaacgtgttgatcgacgccgatcttaacccgaagatctccgatttcggccttgccaagctctacgacgacaagaagactcacgtcatcacaaatgttgctggcacgtttggttatctcgcgcctgagtacgctatgagagggcatatgactgagaaggttgatgtgttcgcgtttggcgtggtcgcgctggagattgtcgctggtgaatcaaactatcagaatgctctggacgaaggcacgacctatatctttgaaagggtgtgggaactgtacgagaac

SEQ ID NO: 34966 - DNA, 1069 bp, Zea mays
  Clone ID: UC-ZMFLMO17367H01_FLI
tgtgatgttgctaattcatgtggtcttccttttgagttcaatgccgttccagctgctagccatgaggttgagcttcagcatcttgctataagacatggggagattattgctgtgaattttgcctatcagctacatcatgttcctgacgaaagtgtaagtacagaaaatcatcgggataggattataagaatgatcaagagcatcaatcctagggttgttactctcgttgaacaggagtcaaatacaaacacagctccattcttcccaaggtacatggaaactctcaactactatacagccatgtttgagtcgatagatgttgctctcccaagggatgataggaggcggatgagcgcagaacaacactgtgttgcaagggatattgttaatttaatcgcatgcgagggtgctgaaagggttgagaggcacgagctgtttggaaaatggaagtcaagatttgcaatggctggatttagaccgtacccactgagttcagttgtgaacaacactatcaacacattgttgcatacctacaacagctactacaggcttgaggagagagatggtgtcctttaccttggatggaaaaacagagtattggttgtatcttcggcatggtgttgatatttcctctgcaggttccatcgcactttggcctccatctgacgtttctaaggcaccattatgcttgtctggtatactcagtatatgcttgtatgtaatttgcaaccataccttacccaatggttatcttaccaactagatcttcatggcaaggtgaagtgtcacttaaaatctagaagttgtaactgtcgtgttgacgctagatatagatagttctgctttggtttgacatatgcagatgtgctgtaatgctcaggggttatgctaggcaggcccaagagggtgcctgtttgttatctatcaggctactgtgttgccgcctgctttgtgtgtgcatatatatttggaatgctactgtcctttctctgggatgaagtggattgctaaagtgtcatgtttttcgtaaatactatatccattctcaaatatttgtttgttgtcagct

SEQ ID NO: 34967 - DNA, 680 bp, Zea mays
  Clone ID: UC-ZMFLMO17367H09_FLI
gctttgaagcctttcatgtgtgaggctcctaagcaggaacccgaacctttaccatacctagctgaaaagaatcacataaactatgacattcctcttgaagtcttgattaagcctaaagatcaaaatgttgcactaattgtcacaaaaactaatttcaagcatctgtattggacggtgacgcagcagctaacacaccacactatcaatggatgcaacatgaggccgggggatatatttgcaactggcacactcagtggacctgaaccggactccctcggatgtctattggagctaacatggaacgggcagaaggagataccagtgggcaatttgacccgcaagtttctagaagatggagatgaggtcatcttgacaggatgctgcaagggtgaaggctacaacattggttttggaacttgcactgggaaggtcctgccggcacttccctgagccaacacgtctttacatcagttctcgagtccaaacactcaacaatctagcaagatgctatgtaactgaacaacgggggttgttttcgcataggaaactgatactctgttgtggaataaaatcggttcaccattttatacacattttctctctcaagaattgtgttattaaacttgtaaaaatgcaatgtctctcatctcttcatccatcgcccagtgagatttgaattc

SEQ ID NO: 34968 - DNA, 1785 bp, Zea mays
  Clone ID: UC-ZMFLMO17368D07_FLI
attttgtaggatggcacagttccacctcctcgacccgttctacgacgagagccaccgggggcgccttctgtcggaaggccaggacctagcaacgcttcgttctaggacacacaatgggttccaagacatggtgttcgacgacaggtacactaattacctcagacgagcaggtctagatgtaatatcgtaccagttacgacgcgggttgcctactattgattcggcggccattactgcacttgtggacaggtggcggcctgagacacatagttttcatcttccttttggtgagatgacagtcacattagaggatacacagaagatacttggactcgatgttggtggcagagcagtgacaggccaatgtgaccctgacggttggagggctagagttgaggccttccttggtagagagcttcctgctgagggcgttgaaaggactgctggagtaggcatcacatggctccgtcagtcttttggtgtgtgccctgctgatgctgatgaggctacagtccagttctattgtcgagcttggatcctgcacatgtttggttgtgtcctcttcccagacgccacaggagactgtgcgtcctggatgtacatcccgtgtctcaccgactgggatacagctggacactacagttggggctccgctgtgctttcttttttgtaccggcagctttgtgaggcttgccgtcgtacgtcctcctcttcgtctataggcggttgcgtctacctcctgcagatatggatgtggtttcgcataccagttggtcgaccacgtgttttccagcctagaccctggccatggatgatttatggaaatgcacgtcttcgaccgacgtatgcttatatttgggaccaggtggcagctccttttgcgagagctaagagggcatacatggagtatgttaacgagtttgacaccctttcagcctctagcgtcacatggcagccatacaacgcacctgagtatgctgggatgatctttagtgtagtatgcagcagtgaagatgaaatctatatgatgcaatgtcctttggtctgtttctggtgtgttgagtggcacctacctcacagggttcaaagacagtttggtaggaaccagctatggccggttgaagatgttcctacttcaaaggagctacacaaatttgaccggcggaagcaaaagaagataacggactttcgtcaacatcatatgagtatgacctgtccactagactgggaacccaagtggaggcggcacccatattagatcgagtgggtaacacattgcgacggtcggtagaggacattgatcgccaacttttgactgtgggcgacagcagcatgcgcagcttcttgcagcgtttatctaggcgcctacgtggagctgctgctcgctgtggctgcaggactactgttgcacatgacgtccacgtaccatcgtgtaccgacacagcaacgccctccacaggtcttggtgctggcttcgactacgatcacgacgagataggaccttcacagcttcagggggctccttcgacacagccattacaaccacaagatcgtaggcgacaccgctctccacaacgttacactccaggcaccgacgctttaggcaagggtaagactaggagacgttgaattggtttggactctatggacttgttatgtaacatatgaattatatagactcgtaatggactcatttggcctctacgggcttgtatgacattttaatggacttgtatgaactctatggacttgtaatgcacttgtttagacttttatgagcttgct

SEQ ID NO: 34969 - DNA, 892 bp, Zea mays
  Clone ID: UC-ZMFLMO17377A07_FLI
ttctcaagttacgaaccagaactctttcctggccttatctatcggatgaaacaaccaaagattgttcttttaatttttgtttcaggcaagattgttttgactggagcaaaggtgagagaggagacctacactgccttcgaaaacatctatcctgtgctggcagagtttagaaaagttcagcaatgatgacctgttgtgaaggtcacatccttctaattacaagcttccttgattttcgtgtgaccataaattctaactgtgtacataaaaagtctggcggaatttatagcatcttgtaatttctgtgagctgctgtctggcatgattgggtgggcttgtcgtggtagctggtggaattgtcaagatgatccgtttgggtagaggccctggtgaacacggacaccacattatgtcgcagtgtgagtagtttgtgtgagctgcagggtacatgcttgtcccatgtggttgcagcgttaacttgagtgctaacaagagtagataaattttggcctgcttcgtctttgatacacgagtccttcaaagtctcttctgagtatgtttcagtgtgatgtgcgatgatgaaaaggctggcgctgtatgtaacgtgggacaagggcaagggcaatgtactgacgactggttgtaagttatctgttgtattttagtttgagatgctgtagcgtttgacattggggtaaatcttgctggttatgaccgtatggaggaaccggtcgattgaccatgctattggtgtgactctttgttagagacaataatgtgcacttaaaccgtgcaatcaaacgatctgatgtatgcaagctattttagatgaaagatttcaaatataaaattgctataggttaaatattgcagggattaaatataaaatagt

SEQ ID NO: 34970 - DNA, 968 bp, Zea mays
  Clone ID: UC-ZMFLMO17377B02_FLI
ctcaaagactgttatacagataaggagccatgcacagaagtacttcctgaaggttccgaagaatggtacgggcgagcatctgcccccacccaggccaaaacgaaaggcagctcatccatatccacagaaggcatctaaaaatgtttctcaagctattttatcacaagaacaacctacccagagggagcaaggttctgtcatgcctatggatactgctactgtgagaaacacaaatgcgaatgtggcggtgccttcctgggacaatactcttgctcaacctttcagcgctggtcatgttcaaggtgcagctgcaacaaataactgttcaagtagcatggagagtccatctggtacttggccaacttctgaagcagtcgagcaagaaaatatggttccaccactccgtgccatgccagattttgcccaagtatacaacttcctgggaagcatatttgatccggatacaagtgggcatttgcagaggttaaaagcgatggatccagttgatattgaaacggcactactacttatgagaaatctttccatgaaccttaggagtcccgactttgagcaacatcggaggttgctatcatcatatagctatggtggtgcggaccatgtcaaatctgaagccatggaaaatcatggatctcctcagagtggccatcttccattcctggtaacaagcgaatgagagcacacttccaatttgcggtcggagctttggttgtttacacgggacattcctgtgcgctcccagcaatgaagttgtggagacggctggtctagcagtttatgaatgctagagacgtatcgtggcagtaacatctgtatagcttccaataaatggtctgaccctaggcaagttttgctttttcgcgtacgtgtagatagccagttttgtgtgctcatgcaattttttcctgggtggggcctagatcgtatgttttttttatatacacactatt

SEQ ID NO: 34971 - DNA, 3072 bp, Zea mays
  Clone ID: UC-ZMFLMO17377E08_FLI
tcgcggtcgcgaccaagcgacgacggcgagggagggaatgtacgccgctgtcccccactctcctccccactcccaccgcagtccatcgacagtggagggttcccggaagcaaagcgccagcggcaggtaagcagaagcctggctagctggcctctggtatgtggttggctcaaggattacaggatttcaatcagtaacaatcaagtatgaggaaggaacaacaacgggtgtccaagcttgggtggttggcttgccggttacagcaagtcaattagtaactacagatgggaggaaggcgaccgacggtatggctgacatgagaccctgtctaactcatgtttcttccttccttccctcatcagccgtcccgtcgatcgggcaaataaagttgcgcctagggaggaaggaaccaggcggcaggctgcccgtgccgacgtggatcgggccagagctaggtaagtgcacctgtgggctgtggtcggcaggcgatcgaaggtgagtgagccggtgagccccgccatgcactgacggagtcactgccgactctcgtcgtccgatctctttttactgtggacgaatgggtgcgtgcagcctatctgcctatgggaagcgagagggggcccgggactgggttgagcaccttgtgcgcaaaggcatggtggcgtctggggccggctgcaggcgtgtgcgcacctgcacgagcgtgcagtcgcggcgcgtggctgcagtttggtgtgcctgggacggggactcgtgccgtgtgtcctgcgcgaggtggttttgcggctggctgacggaatggttgatggaatccttgcgtaaggacgcaactgagaggtaagcccccctcgtccccgtcccccgtgggaaacgggagtgccaaagccttgtggcacaccaaactgtagcttttgatcgtgcatggtggggcgcctacctgatgctacgcaaacttttgtgtcgcagcttcagttaccctgaagagcagggcaagctagcaaaaggtgaaagcgtttggtcacgtagaatccatacaggtcatacatatatagcagtcgcaactcgcaactcgcacgtagagcgtagaggttcaaatctgagccttagttcagaatgcagcttcagtttgggagttcgttcgtgcatagcaggccctatagctggggttagtcgtgtgcaaggattctccatgtggacaacacaacacaagcaagcaagctaatataaggttggatttaaaagtcgcagaacaattcatgacgtgcttggaaaacgttggtagcgtcttttaatgcttgatctaaaggctaagttatcatccatgggctaggtttgtttgttagtattaccctgtccagtgcaagggcaggtaggaggtagagagagaccgagcaagtactaacctttcatggccccggtctgcccccccagctccctctttcccttgggggccgctgtgtgctccgtcgccatcgcgggggataaaaggaaaaggctccgaggaaacagtataaaagcgcccccggcacgcacgcacgcacgcaggctcactccacgcagcagttgccaggcgcttgtcactccagccagcggcagcccttttccttggcgaggcttggtttagtttagcccgcctgcggtctgccgcctgccaagtgccacctgagacctgatagccgcaaccgtgagaggctggtagcccgtagccggcatccctcgccctcgacccatttgaacagggcctcgagctttgcctctgctgctgctcgcttgatccgtctcttgccgtggtacgcgtgctcgatcggcggatcgtcggcggcggcggcgggaagctctccgacccgtggccgggatgggtcggcagccgtgctgcgacaagttgggggtgaagcgggggccgtggacggcggaggaggaccgcaagctcatcaacttcatcctcaccaacggccattgctgctggcgcgcggtgcccaagctcgccggcctgctgcgctgcggcaagagctgccgcctgcgctggaccaactacctccgcccggacctcaagcgcgggctcctcacggacgccgaggagcaggtcgtcatcgacctccacgccaagctcggcaacagatggtcgaagattgctgccaagctaccgggcaggactgacaacgagatcaagaaccactggaacacgcacattaagaagaagctgatcaagatgggcatcgatccagtcacgcacgaacccctcgaccggaagacaaccagcagcggcccggctacaacctctcagtcaaccaagtctgacgaggcgaccaaggagcagagcccgcagaacgacgacgccgtgataagggacgtgccggccgatggttgcagcccgacggaatcgagcacgaacaccgtgagcaccggcggaagcagcagcagtggtggcggcggccatgaccaagacccgctggtgaagtggcttttggaagaggagcctgccaccggcgacgaggcgtggctgaacttcactggcagtgtcgacgtggacgagttcagcagcattgccgccggtccggagttgttgccgtgggatggcgcgaccgactggctgctcgactaccaagattttggattgggggactcgagcttggtcgatggctacatggtcaacaacaacagctcaaacggagcaaagttctagctagctagccgaagatgtcatctcatctgcttgtgttgctttgctgccagtgaacgtagatacgtaagtaataaaagcattggtatcgaggttgtcaaaggtggatgaccacatcgcaggaagatcatgaagagtccttgcacgcactcctgtatctcgaaccaactaacggctgggatgcaattgagaaggggaggagcacaggccaatcaatctcaaagagataaaactggttcttgaagatctcgaagaaagatgtgtttcttcacaatcacaaagagaggttgtagaagttcttgctgttgtatacatggttgcgtatatattgctaaattgtaccttgttaggccattttgttcgcaaattgcacgagtcactaattagtcagc

SEQ ID NO: 34972 - DNA, 1357 bp, Zea mays
  Clone ID: UC-ZMFLMO17377F09_FLI
caccaacccagctcgctcgtcccagctgatcaggtcgagcacctagtagcgacctgctcgatcatcagtgtagagtgtcggtaggtgtctgtctctcttggtggctggttgcaacggtcatggcgacgtcgtctcgtcgggtgcccttgctgctgctgtgcctgggcgtgctggtgtcctgctccttcgcggcgggcagcttggaccaggagctggacatcacgtggggcgacgggcggggcaaggtccttgacaacgggcggctgctgacgctgtcgctggaccgcacgtccggctccgggttccagtcccggcacgagtacctgttcggcaagatcgacatgcagctgcggctggtgccgggcaactccgccggcaccgtcaccgcctactacctgtcgtcgcagggcggcgcgcacgacgagatcgacttcgagttcctgggcaacgtgtccggcgagccctacacgctgcacaccaacgtgttcacgcgggggcaggggcagcgggagcagcagttccgcctctggttcgaccccaccgccgacttccacacctactccatcctctggaaccccaagcacgtcatcttcatggtggacgacatgcccatcagggacttccgcaacctggagagcaagggggtggcgttccccaagagccagccgatgcggctctactccagcctgtggaacgcggacgactgggcgacgcagggcgggcgcgtcaagacggactggtcccacgcccccttctccgcctcctaccgcgggttcaaggccgacgcttgcgtcgccgtcgcgggcggccggacccgctgcggcgccaccgtcggcaccgagggcaccggcgcccccgcctccgccgccggcgccggggactggtacaaccaggagctggacctcaccctgcagcagcggatgcgctgggtgcagcgcaagtacatgatctacaactactgcaccgaccccaagcgctaccagcagggcctccccgccgagtgctccatgcagtagcgcccggttattcctcgcccgtccaacaatggcgcgcgcgcgcgtgtgtgtgcatgtggtccgctctactgctaccgctacgacgatcggtgtcgatcaccggatcaaggcaagacgaaaggcatcgaaacatggtagataaataaaggacttgacgatttgtaacgcagtagctggtgcgtgcgtggtgtggtggtaagaaattcttctgctgcctgtgttcttgtagcctcctcgtcctcgcccaccctgttggtacgtgtacggtgtacgtagtctgccgccgcgcgctgttcgtgttcgtcgtgtctcgtgtctgtattatactcgtcctccccatc

SEQ ID NO: 34973 - DNA, 632 bp, Zea mays
  Clone ID: UC-ZMFLMO17380F01_FLI
tcagctggttgctaccaaggataaccaccagtggcatcttagcaaacgccccagcctgcattcgatgggccgccatgcgcttgcgaaatcggcagctctgctccgggaagtcaagaacaagcaaaggactactaaccttgtgaagcgactggagcctactgaagtgaagtccccagaaacatcattgtgggtcccacatccaatgacagggatctactaccccaagggctttgaatgggtcatggaggatgtccccacaagcgcagcttcattccagcagtcatactggttcaggactggggaggcagagccagcaagctctactacatcaaagaacgattctgcttcctttgaccatccatttgcttgatgtatgagaggctttgcactggaaaaaaacactgaaagacacagttgtgtgttttcaggaagaaaagagatacagttgtgcaagtcattcaccatcatgccaggtccatggatgcttcatgctatgacgaagttaccagttgttctgattcccggtatgcagtcacagcacccaccaacagatcagaaacaacgtccgcctttgttttgtactttttcttaaccttctggtggttcaacttaaaagaccttccctaaactgt

SEQ ID NO: 34974 - DNA, 1093 bp, Zea mays
  Clone ID: UC-ZMFLMO17382H06_FLI
taactgttctcaatggaggttctggacaatcaggagtatcaggcctgatagtacctgcagcaactgttggagcactaggttatggttatatgtggtggaaagggatctcgttctcagacctaatgtatgtcaccaagcgcaacatggcaaatgctgtttcaagcatgactaaacatttggagcaagtgcaaagttctcttgctgctgctaaaaggcatttgacacagcgcattgaaaagttggacgataaattggatcagcagaaggctctatctggacaaataagagatgatgtcactgatgcacgtctgaagcttgagaatattggttcagaaatcaagaacatcaaagaattggtttggggtctggatgggaaaattgattcaatggaagctaaacaggacttctcatgtgctggtgtgatgtacctctgccaattcatggagcaaaatggtggaaagcttccggatcgcctggaaggctccaaaatgacgacaaaacgttttggaggccaaaagttcttacagggattgcaactggcaatagaatcagggaattgtggcaaggacaccattgatatgctgttgaaagatgctgattcctctgataaaataaacaggacgtcctccatcaaatctgccagctaattattatctggtcgatactgattcgatgcccagtcggaacatttaagggcttgttcggttagcactcaatccatgtggattgagtgagattggatgggtttgaatcccaaacaagttaaactccttctcaattttttccaatcctatccaatccatgtgtattgggaataaccgaacaagccctaatagggttttcattacagctaaatatgtaaatagctgcagccttttgcttgcaggaagtgcattttgtttaatttgtaagcttgcgcaaaatgctagtagttgctactacgtaggaacctaggtcatgctttaattttgtggtttcgctttgtgaaacgagaatgcaacacgtaataaacgaaaaacaccggttggctttacaatgtggacttgtaacttaaggccgtttggatcttgtcatttttagaggaattggaatc

SEQ ID NO: 34975 - DNA, 708 bp, Zea mays
  Clone ID: UC-ZMFLMO17382H08_FLI
ccgctggccgctgacagtgacaggtgaagctcggaacatgctgtgttcttttactttcgatggaacacgccatgttccttccataagtaagcgaacagagtaacaggcggcgctctgttcacatgtgagcatgcctgccacctgctgcgcgcctgcgctccgtgtatagacgcacacgggctagccctgtctatggtcctggcgaagtcgtcccgccattaatacgagacacggcccggcccgcgcggcccattagtgggtccgactccgtcttcgctctgtctaggttcaaggaataggaatccgtggattcgcattcccgcgagatcacaaacataaagagacacatgagaaacaatagtggataaacttttctcttgttatttagtatgtgcctgattggatgcctgtatccggacgcgtaggctcaagatcaatctgatactgcaatttttgcgtacgagtggatgcaatcaaatgactataaaataacttgttttgcatccgctcatgcagcttgcgtctctcttgtgcaggccaccaaacaggagcttagacagagtcaatgcatacactgctccaagacgaaacagatggtatgagaaggtagatgcttatgatatacaaaagtagagccacttatggatatgtttgatattgtgcacttaaccatcgtatggtttcttaatattataccattttgtctcc

SEQ ID NO: 34976 - DNA, 1155 bp, Zea mays
  Clone ID: UC-ZMFLMO17391E11_FLI
aaaaaatcaaaaatagaaaaagtctcttgccccggcggccgtgccgagccggcatcccctcccccagcaacgatcgcgacgacccaaaccggcaagggtgagcagcggctggccgccgccgcggcagacgagtcccatgggagacaacaagtctccgctgagcctgagcccgatgggcgggcgcgaccgggaccgggaccgggagctcctcatcccggtctccggcggcggctcggcgcccggcgtcgatgacgaggacgccgacagggcctcctccgcctccgcggcgctctcctcctccggccgcgaggctttccataaggtcgtccgcagttgggcttcaaagaagttcatgactggatgtgtaattctcttccccatagcaataacgttctacatcacctggtggttcattcattttgttgatggattcttctctccaatatatgcacaactaggaatcaacatatttggtcttggcttcatcacatctgttactttcatatttttgatcggagtctttatgtcatcttgggttggggcatctgtccttagccttggcgagtggattattaagcgcatgccccttgttcgtcatatctacaatgcatcgaagcaaattagtgctgcaatatcaccagatcagaacaaacaggcattcaaggaagcggtcatcataaggcatcctcgtgttggagaatatgcgtttggtttcatcacatcgtcagtatctctccagagttattccggtcaagaagatctgtactgtgtctatgtcccaacgaaccatctttacattggcgatatcttcatggtgaattcaaaggatgtcataaggccaaacctttccgtgcgtgaaggcatcgaaatcgttgtgtctggtggtatgtcaatgccccagattctgtcaaccctcgacccggagatgatccttcgtgacagaaccggaccaagcagaagctgaagctgccacgagccctttgtgtaacttttgtagtggtttgctagtaacatttcatacaagctaccaagagtacggcgaactgaacttggagcacaagtatctctgtattaagggttgagctgtgccttttttttgtgaaaaagctgctgtgagttatgtgttatacaatagctgctgtgagttgtgaaaag

SEQ ID NO: 34977 - DNA, 2233 bp, Zea mays
  Clone ID: UC-ZMFLMO17391H02_FLI
ccattctcagccgccgccaatcccttcccgtgctccgcaaccgctgagtgagaagaagagatggccggcaagggcgatggcccggctatcggcatcgatctcggcacgacgtactcttgcgtcggcgtgtggcagcacgaccgcgtcgagatcattgccaacgaccagggtaaccgcaccacgccctcgtacgtcgccttcaccgactccgagcgcctcatcggagatgcggccaagaaccaggtcgccatgaaccccatcaacaccgtctttgatgccaagcgtctcatcggcaggaggttcagtgatgcgtctgtccagagtgatatcaagctgtggcccttcaaggtcatttctgggcctggtgagaagccaatgattgttgtccagcacaagggtgaggagaagcagtttgcagctgaagagatctcctctatggttcttatcaagatgcgtgagattgctgaagcttaccttggtagcacgatcaagaatgctgtggtcacagtccctgcctacttcaatgactcacagaggcaggccacaaaggatgctggggtgattgctggccttaatgtgctgcgtatcatcaacgagccaacagctgcagctatcgcctatggtcttgacaagaaggctaccagtgtcggtgagaagaatgtcctcatctttgatcttggaggtggtacctttgatgtctccctcctcaccattgaggaaggaatctttgaggtcaaggccacagctggtgacacccatcttggtggtgaggactttgacaacaggatggtcaaccacttcgtccaggagttcaagaggaagaacaagaaggatatcactggcaaccccagggctctccggaggctgaggaccgcttgtgagagggcgaagaggactctgtcttccactgcccagaccacgattgagattgactcgctgtatgagggcatcgacttctactccaccatcacccgtgccaggtttgaggagctcaacatggacctgttcaggaagtgcatggagcctgttgagaagtgcctgagggatgccaagatggacaagagcaccgtccatgacgttgtacttgttggtggctccactaggatccccagggtgcagcaactgctccaggacttcttcaacggcaaggagctgtgcaagaacatcaaccccgatgaggctgtcgcctatggtgctgctgtccaggctgccatcctgagcggtgagggcaatgagaaggtgcaggacctgcttctgctggacgtcacccctctgtccctgggtctggagactgctggaggagttatgacagtgctgatcccgaggaacaccaccatccccaccaagaaggagcaggtattctccacctactcggacaaccagcccggtgtcctgatccaggtctacgagggtgagaggacccggacacgcgacaacaacctgctgggcaagttcgagctctccggcatcccccctgcaccccgtggtgtgccacagatcaccgtgtgctttgacatcgacgccaacggcatcctgaacgtgtctgccgaggacaagacaacggggcagaagaacaagatcacaatcaccaacgacaagggccgtctctccaaggaggagatcgagaagatggttcaggacgctgagaagtacaagtctgaggatgaggagcacaagaagaaggtggaggccaagaactcgctggagaactactcctacaacatgcgcaacacgatcaaggacgagaagattgcgtccaagctgccggccgatgacaagaagaagatcgaggacgccatcgacgcggccatcagctggctggacgccaaccagctcgccgaggcggacgagttcgaggacaagatgaaggagctggagagcctctgcaaccccatcatcgccaagatgtaccagggcgcgggtgaagacatgggcggcgctggcggcatggacgaggacgcccccgctggcagcggcggccctggccccaagatcgaggaggtggactaagcggtttgttgtcagtcttgagcgtgctgcagttgctggctggcccagtcgctgccgcgagttatcgtcgtcggtcggtgcggtgtgtccgcttaaactttatttgtggtgggctggtacttttgtggtggttattttttttggacctcgtgatagtcggtcggttccatgttatcgcggctactggcaaaccttaagtgatacggtaattcttcttttcggt

SEQ ID NO: 34978 - DNA, 1244 bp, Zea mays
  Clone ID: UC-ZMFLMO17398B10_FLI
gttgaggcgcaaatggaagaggggcgtgttcgtcttgtgcagctgcttcagagaacaatgatcagtgcaagaaaagcggatctgaaaaatattcctccttgcataaagaagataaccttcctagacttcaatgaggagcatgcaaaaagttacaatgaactggtggttactatacgccgaaatatactgatggcggattggaatgacccttctcatgtagaatcccttcttaaccccaagcagtggaaatttcgtgctgctactttgaagaatgtccgtttgtcttgctgtgttgccgggcatatcaaagtagctgaggcaggtcaggatatacaggaaacaatggatgaattggtgcaacagggccttgatccttcttcagatgaatatcagttgataagatattctcttttaaacggtgccagttgtttcaggtgtagcgtttggtgtcgcttgcctgtgatcacaccctgtcgacatcttttgtgccttgactgtgtagctcttgatagtgaaaaatgcacattaccaggttgtggatatcattatgagatgcagtctcctgagactcgtgcaaggccagaaaatccaaacccaaagtggccagtgcctaaggatctaattgaattgcaaccttcgtataagcaggatgattgggatcccgattggcaatcaacatctagcagcaaagttgcttacatgattgagaagctaagaagtctgcgagaagcacacatgaatcatgggaataacataaccaacagtgttggtcattctaatacactatcttatcaaccacaggcaatgctggacaaagttataattttttctcagtttctagagcatattcacgtgattgaacagcagctgactattgctggaataatatattcgggaatgtatagtccaatgcctctagctagtaaggttaccgtcctagtgaatgagcataaatgtgcttcaagcagccggataagttatgggaatgccaatcaagcatgggtagcacagaaggccttgcctttactaagaaatgagccttcacttgctgctaaggctttgcaaaagagagaagtgcacttatgaagtttcaagaggacccaacgtgtatggctttagtcatggatgggactgctgcactggggcttgatttgagttttgtgactcgtgtttttctcatggaaccaatatgggataggagtatggaggaacaggttattagtcgggcacatcgaatgggggct

SEQ ID NO: 34979 - DNA, 1087 bp, Zea mays
  Clone ID: UC-ZMFLMO17398G12_FLI
accccccgagctgagcttagctccactccagctccaatcacagtcgtgaccagagcgcgagagctagctagagggccgtgaaaatgccgatcaataggatcgccctggggagccaccaggaggtgtaccacccgggcgccctcaaggcggcgttcgctgagttcatctccaccctcatcttcgtcttcgccggccagggctccggcatggccttcagcaagctgaccggcggcggcccgacgaccccggcgggcctgatcgcggcggcggtggcgcacgcgttcgcgctgttcgtggcggtgtcggtgggcgcgaacatctcgggcgggcacgtgaacccggccgtgaccttcggcgccttcgtgggcggcaacatcaccctgttccgggggctcctgtactgggtggcgcagctgctggggtccaccgtggcgtgcttcctgctccgcttctcgacgggcgggcaggccacgggcaccttcgggctgacgggcgtgtcggtgtgggaggcgctggtgctggagatcgtgatgaccttcgggctggtgtacacggtgtacgccacggcggtggacccgaagaagggcagcctgggcaccatcgcccccatcgccatcggcttcatcgtgggggccaacatcctggtgggcggcgccttcgacggcgcgtccatgaaccccgccgtgtccttcggccccgccctcgtcagctgggagtggggctaccagtgggtgtactgggtcggccccctcatcggcggcggcctcgccggcgtcatctacgagctgctcttcatctcccacacccacgagcagctcccctccaccgactactaaaagccgaagccgaccgacccaggggtgcgcagcgcagcgcagctagcatccagctctctctccccggcccgctcgccgccgtttagtttctctcgtgcacgtgcatgcatcgtagactgtctcaggccgccgctgcgccggcgccgctcgcatcgtttgcttttccttggaccagcagtcgtcgccgtcaggttgagctgcttgtaaccgttaattccggacccgtttgcttctgtaagatttgtgcattt

SEQ ID NO: 34980 - DNA, 1265 bp, Zea mays
  Clone ID: UC-ZMFLMO17399A03_FLI
ccaaaatcctaccccgcgggggggattctcagttctctcggcgacgactgggagactgccgccgccgccatcccaggtgccctgagaactcgatcgggctcttcgctggcgacgaacacccaccagctatcaggtgtacaaccatgtacttcaccgtgtccgcccctgcaatgtctctatgatcctccagctacggtagacgccccgttcgctagctgaggacctcctggttcctgtgagcaggcggcgtggttagctgctgccttcaagcatgcagagacccaatgcgccgtcggcttgcgctaccatcaccttcgcggaggctctaaggagggagatggagtaccgcaagtgggtggagaggacccacccacatctgctcgtcggaatctgcggagcccctgaaatgcagagagatttcagtgcaggatcagtacctgatgcgatcaagagaaaactagctgccgagaccagtgtgcctccacaacaatcaagtttcagctgtgtaactggacagaagcagccccaaaactggtaccccacaaagaaaaaggtgaaagttccacatcttccatcgcagattctgcagtgtcccagaccaaacgtggtgccatccttctggtgcaaaatctgcaaggtcgactgtgtcaccgagttcaatttcagcgctcacgttggaggcaaaaagcacaaggccaaaaagctagagattctaggtaagaggaacgctggggggcctgctagccgatgcgcaggcaacaggagcgctggacagagtggacttgcagtttctaggagcagaagcagtgaacagaatgtggctggcagcgttgctgctggaccgaactgtgacatgttgtctgagagcagaactaatggaacagaaggaaatgggtgcactgtccagctatgagcagcttgggtttcactcccgtctggtattccaataaaagttcgccttgcacattttcttctcaagggcacagtcaaatggctaggccgctagggagatttcatctgatggattggactgaacaacactagtcagataataagttgaaacgtatgcaatgtcctatgtgagagcagtacattgtttggacatgtatctgacagcagatgcatcctgtttcctttcgcttccttctcgaaaatgtacagtagcaagccttgttccggtaggaggtggaagttcaggacgctgttctgattatgtactactagatagttataatgtatgacatcatggcttgtttgttgtttcc

SEQ ID NO: 34981 - DNA, 1175 bp, Zea mays
  Clone ID: UC-ZMFLMO17399B02_FLI
cattttgcggtgataacttctcgccagtaccctgataaggatgctgcaattactttcttagagggggtgatcacaaagctgcgtgagacaagggagtcacggatcaatgaaccaattctctatgtgaagatgcaaattgcagctattaatcttgagaaaggaaacaaaaaagagtgcaagaatttgttggaagatgggaaaaccactctggatagtatgactgatgtcgatcccacagttcatgctagcttttattggatatcatctcaataccacaaggcctgccaagaatttgcagagttctataagaatgctcttctctatctggcctacacaactgtggagtctctatctgagtcattcaagctagacttggcttttgatctatctctagcagccttgctgggtgataacatttacaactttggggaattgttagctcacccgattatcaatagtcttattggaaccaaggtggagtgggtttatcatatgttacaagcattcaacagcggcaaccttgccctctaccaagaactttgcagggttcacaatgctgctcttactgcacaaccagctttggtgcagaatgagcggaagctgcttgagaaaatcaatattctttgtctgatggagataatctttagtcggccatctgaaaatagaactattccattaagtgttattgctgagcggactaagctttcaatcagtgacgtggaatgtcttcttatgaagagcctctcggttcatcttattgagggaataattgatgaagtggacagtacagttcacgtatcatgggtccagcctagagtgcttggaattccacaggttaaggctttgcgcgaccgcctggatgcctgggttggaaaggtgcataccacattgctttcagttgaggcggaaacacctgatcttgttgctgtgtaactccacagctgttacacttccgcgagaggcttggtcagcaaggtcccatttgcaaaatgtgagatgctttgtgtgacacgtagtcattttctggataatgagatctgctgctgccctgagcgtttgtcttcctgcgcctactgatcaggacatgtaatttcttttttggtgtcctcaggacatggatggttagaactgcacgcagtgtcacggagacgggaccaatggattgaaaatttcat

SEQ ID NO: 34982 - DNA, 1480 bp, Zea mays
  Clone ID: UC-ZMFLMO17399B04_FLI
aagacaccagttttctttcctagccttcaaaagttatgcctaggctgtggatttcataaccgaccatctaattggttccatatcagtcgcacttccatcactgacacatctggacctgcaagatgcaccaattgtagagcctaattcgtcatcagatctcaccaatgctggtcttcagcaaatcaatccgcatggtgttcaaatcttgaaagtgtatgtcttggtggcttctcccgtgttacagacactggttttagggcaatcattcactcctgttctggtcttcataagcttcgggtttcccatggaagccatctaactgatttggttttccatgacattatagccacttctctttgcctaacccatgtgagtctgaggtggtgcaaactcctaactaatgttgggattgagagattatcatgcaacaaggatctcaatgtactggatctcagggactgccgcagtttgggtgatgaagctgttagggctctgagctgccttcccaagttgcagactttgacattggatgccactgatattagcgaccaatcattgaaatatctaggacttggaacatgccctctaacttccttgtctctgaggggttgtcggaagcttacaaacgattgtatcaccttattatttgctggtcatgtgaaacagagcctacagatgttggatctctccagaattccaagtatcacggatgatggtatcatgttattagcaaggagcagaactcctcttattgagctcagaatgcgagaaaatccgaaaatcggggatgcctctgtgatggctcttgcttccatgcaaatagatggtggaacctacggtagtaccttgcagctgctggatctttttgactgtggtgggattacaccccttgcagcacgttggtttaagaaaccttacttccctagattgcggtggctgggaattacaggtagcttgaatagggttatggtggatgcactgtctcgaagccggccattcttacatatggcttgccgtggtgaagaattagggactatgctctgggacacctcctctgactggtatcggcataatgacgacgatctcgacgagcttgaacagtggctcttggaaggtgaaccggtttcagatgatgacaccatcatggaagaatgaggaaactgtttggtaagctggtgtcatgttcctgccatagttgcttgaccaaatacgatgtcaccaagctcgaattagctatgcgatgatctgttgtactagtagtgaagatattctcaatatatatgtatcattccttgggcagccattctgtgtgcatatggcaacctgacgttatgtatgtttgattcagatttttgttctggtccagttctcacgtgacattgacacattgaggagtcgtgctggccattccaagcataaagctagtgtgctgttttatgattttaacatattgatatttctactcatacttggcaaaatt

SEQ ID NO: 34983 - DNA, 1132 bp, Zea mays
  Clone ID: UC-ZMFLMO17399B08_FLI
acgagttctgggggaggttccaattgccggatgacatcgaggaggatcaggctcagtggacacgtgtgaagaggcactttcggaagtgcgctgataagataatcaaggatgccatgtacaatgctcgcatcgcggccgtcaactactactacaagaagataaagggtcagaaaatgagcaaagcattaggggccaatgagatctacctcacagaggagcagtacctggagagcgttgtggattggctgtcgaaggacatggaagcctggaggtggttggctaagagatgggcgtcgcctgagtggattgcagagtccaacaagcaccgtgccaaccgtggcactgaaggaccggggcacaggtacggcgccgatggacaccttggtaccgcacgccgcatggaagctgaaagtggagttgctccaagttttatggaggtttacgtccgtggtcaccgtggccctgatccggcgaaccctgatgtgctatgcagtgaggcggcaagggagaaaatgaatgcatatggggaggaaatgactcaacgccatgggcctgacttcgactggatgcattcagacttagatgcctcggcgttgtaccacagtggtgggggtagaaagcatggcaggtttgcctttggcaccggcgttgtggaatataacaggacaataggtcaagggaaggcatcgtcttcgggagggagttctcgctcctccaggtctgctcgagaggctcagctcgaggaggagactcgggcagcacaggagcaggctcgagcagcacaggagcaggctcgagcagcgcaggagcaggttggacagctgacgcaatatatgacttcttattttcaggaaatgactactcgactcggccctgatatgaacttgcccgcttttcgccctccccaggcacaagaatggggacagtggccaggacaagctccagcgtcgcagccatagtggaccggtgttgggtggacgcaggcacctccaagcacttggacgcctccaccccaaggatcgcagccagtctcagcatgggtgccaccggtctcccagccaccggcgggctctcagccatttcaagcgtggatggcaccgccaccgacggggtgggtgccaccacctatggg

SEQ ID NO: 34984 - DNA, 1226 bp, Zea mays
  Clone ID: UC-ZMFLMO17399B11_FLI
gggagtgccccgacttcttcccggtgtccgggccggggatgcaggccggcctcgacacctccgcgcccggaaggaagtacgtgctcaagagcagcctcgacctcacccgctacgactactacaccatcgggtcgtacgacggcggcaaggaccggtactaccccgacgaccccgccggcgactaccaccaccgccgccgctacgactacggcaactactacgcgtccaagacgttctacgaccccgtggagcgccgccgcgtgctgctcgggtgggccaacgagtccgacagcgtccccgacgacaaggccaagggctgggccggcatccatgcgatcccaaggaagatctggctggaccccaccgggaagcagctgctgcagtggcccatccacgaggtcgagaagctcagggggaaggccgtcagtgtggacgccaagctggtcaagcccggcgaccattttgaggtcacaggcatcgcaacttatcaggctgacgtggaggtgagcttcgagctggaggcggggacaagcctgctggacaaggcggaggcgttcgacccggcgtacgacgacgacgcgcagaagctgtgcggcgtcaagggcgcggacgccaggggcggcgtggggccattcggcctctgggtgctggcctccgccgacctgcaggagcggacggccgtcttcttcagggtcttcagggacggacacggcaagcccaaggtgctcatgtgcaccgaccccaccaagtcgtctcttagtccggatctgtacaagccgaccttcgcgggcttcgtcgacgccgacatctccagcggcaagattgcccttagaagcttgatcgatcggtccgtggtcgagagcttcggcgcgggaggcaagacgtgcatcctgtcacgggtgtacccgtccatcgccgtcgggaaggacgctcacctctacgttttcaacaacggcgaggtggacgtcacggtgtccggcctgaccgcctgggagatgaagaaaccgctgatgaacggcgcctgaaattgaagggaggaaaaaaaaagtcttatccggccgccacgtgactttctttattttcgttcttcttcttcttcgtcaacacacgtctctgccgccaaaggagaagaaattgattgatttcaacgtacgtatgtgtacgtctgctgccgatcgaaagagaattggattattataaaattgtttgaggccggtccttccatt

SEQ ID NO: 34985 - DNA, 2794 bp, Zea mays
  Clone ID: UC-ZMFLMO17399D03_FLI
agatgcaggcaaagcttccaaactccttctatgtcatggacttctatgtggagggccatctgaggagtgttctctgggctgattccagatccagggcagcgtatcagtatttcagcgacgctgtttggattgatacggcatgcttaaggaacaagtatcatgtcccgcttgtttcgtttctgggtgtcaatcatcatggtcagcttgtattgctaggctgtggattgctgtcagatgagagcacagagagcttcttgtggctgttcaagtcatggttaacttgtatgaagggacagcctccaaatgccatagttaccgatgaatgtgtggcgataaaagccgcagttcgagaagtgtttccgaagacacgccatagaataagtgattggcatgtagtgagaagtatttcagaaaaaataggtgacttgccagaatatgaagcgatgagaaccaatttggttactgtaatatatgattctttaaacgacaatgagtttgaggcaaggtggaagaactggattgatagatttagccttcaggataatgaatggatcacctttctgtatgagaatcggcacttgtgggcccctgccttccttagggacactttctcagctgggctctgtactgttagccagcgtgaaagtccaagtacattttttgaggatgcagtcagttcagagaccacattggtgacgttccttgccagctacatgacacttttggataacaaatacaaaatggagcaacaagatgattttgattcattaaatagcagcaggctcctgatatcaaagtaccaaatggaagaacagctatccagattgtacaccttgaatatgtttatgaagttccaggatgagctaaaggcaaccatgcattgtcaagttcagctggatgggtcagcatcttcttttatagttattggtttgactgaagcagggagtgaaatgctgaataaaaagtacgaggttgttcactgcatggcgacaaacaggatggagtgtaactgtggcctatttcagtttcatggtatcgtttgtcggcatgcattatctgtgcttaaatggcagcaagtatacgacatccccccttgctatgtacttaacaggtggcgggctgacttcaagcagttgcactacctagataatccatcaaaggatttagcaacaagtaatcatgtcgagcgttatgattatatttctttgcagtttcttcgtctcgtcgagattgggatggtatccgacgagaagtataggcatgcagtaaggcttcttaaagacatgaaagagactcttcttgatgataatctgtgccgtgatttggagcagaagcttacaccagctgagcgtgcaattgtgaatggtgacaaccatacacaacctggttcatctgagggcggtgctgcaaaaaagcggcgaggccgtcctcctaaaaagaataaagagataaacatggattccatggtaaacccgtatggaaataaggaccctttactagtatcctcggatgtaactcagaaggacacttttcattctgcttcaactacctcaaaccttggcactcatgtccggacgcatggcattgttgatctcatggaagaagtcaatccaagcgagctgtcatttgatagccgttacggggtgcaatctggccactcgcaccattttggtaataaccaactaaatacaggaaacacactgcggtttggccaatctacatcagcagcagagcagtctagggttcagtgggtgtttcataatggcatgtatcaggatgaccaagtgacttacggcagacggacatcataacaattggacttgttaggctccagggtttgccgtttcaggtttctttctcttgagattttattcccgtgtgtgccatgatgaggtgatagatagatcatgtctttcttgcaagttaatatactagccattgcttctacagatagaggagtgactgaaactttgttgagaaaatatagcattttacataagaaccctgtggaacaggaagtcaggaaggccatgaaaatctgcttaataagagctccatcggcatacagtatttgttatggaagctttatgtgtttaggccttgttcgtttaggaggtggatcgaggggaattagaggaattgaataggaagggatttgatccccctcaatcccctccgatccccatacaaccgaacatggcctgagtagaaagttttcgtctaagcggcattcagtgatgagctatatttccaaattttcatctgtccattttctgacgattttatttcatgccacatgtcctgcatggaatgtgcaggaaatcgggtcaggggtcctcggtttttggactttggagcaccgatgacttaagtgatcctccattgtgcttcgaacgttgagccttgggagatgcatgctggaactggctgctggtgatggtggcggcggcggcatctgaaggcaggatacactgtagaaacagaagtttgccactaagccagccgaacgcttccataagccatcaatgttagccaactaactgacatgtgtatatacacacacatcatctcagaaagaagccgtcattccgtgggaagtgctgcgtaaactcctgataataggcgtggtcagcgtcggacaagaaattgagagcttcattttctttctttcacgtgggaaagatacaattttgttgcctcctgacgatcagctaaaagggggaggaaatatccatgctcttcatctgggaaagatgcaaaaaccatccagctttatcatctttgctccttcagt

SEQ ID NO: 34986 - DNA, 1889 bp, Zea mays
  Clone ID: UC-ZMFLMO17399D11_FLI
caatcctaaggatggaagtacttaaatcgggacttgggctaggaacaggtgatgttctacccaggttagttaaggattggatgcgtatgtaggcctgttgatcaaggactatcttaactagccacatgccctggaaatgggacagggtaagcttgaacccggctattccatacatgaaaagacaatcgcgcactgggagtggagagatgacgagagtggcacgtaccctcctggcaaaggaccgcctaaaaagggtggtgtgctctcgggtggcgcgaacctgttcatgaagtggaggatccgtgggaatggtagacatgcaaggtttacgagaaacatatgtcgtgtggttagagatcctcagccgagtaaatcgattcggatcgccgttatatccccggagagtggagacttgatctccgacctacaacctaagtcaggatgtgaacctcatgaataaaaatgatgttgtattgatgagatggtgaaattagactagatgcaaacagagtctattaatatttaatctggcgttaaaatattgaaagtaaggactcactttagtaagctatttctgcaaaagtatctaagttgattcttgctaaagcctctccttgattcccagatccagcatacccttgagagtcttttcttagtcgggtaagtcttgctgagtaattccatactcagggttttattccctgttgtttttcaggatataactttgtgctgctgtgatggtgttaagtgccggtgggctcgaccttcttataagtctaagtaacccttctatacttcttaatgaggatggtcacttgagctagcatatatttcaaaaactacaaataatttatatcagttcaaagttatttctttgaatcacttttgtaatcactccgatcatgtacaaagtaaaatttttgtaacttgtaaaatttggtaataagatttccgctgtaaactgttggtgtgtgtgatttgtgtttacttaatcccgcggttctggttgtaagtggtttatccgatgtccttgggcaatcggacagatcctgttaagttatctggtgcacatgcatagccgtctaaagtctttgagacaaggacaggtgcatgtgggcccaatagcttgggaggttctgccacagagaggctccaagttgtggagattcctcgcaaacgggattgagaaaagcaagcaaaacaccgtggtattcaagtgggtctttggaccgcttgagaggggttgattgcaaccctcgtccgttgggacgccacaacgtggagtaggcaagcgttggtcttggccgaaccacgggataaccaccgtgccatctctgtgattgatttcttgtggttattgtgttttgttgagactcctctctagccacttggcatttactgtgctaacgcttaaccaagtttttgtggcttaagttttcaagttttacaggatcacctattcaccccccctctaggtgctctcaagctcacacatgatcatagctcaacaagttgtgggaaataatgtgcatgaactcaccaaaggtgggagttcatgtgaagtgtaaggctgatcaacaaaataaaggttgaagctgagcaaagttggtcaagattttattagcaattactaagtataagtaaataccaaaccttagtaataataagtaaaactacccttacacacacttgcctttttgtttaagcaagcgtgtatggtggtgtgtgcctgatgactaacgacgtgcgacgaaacttctaccggtaggtgtggcacgtgctctccaatgatgagaccatgcaaatcatgacatatatcgaagtctgcatgatactgatagttgcaatgtagtagtgaaacaactaaattaaaataacaaaatttatat

SEQ ID NO: 34987 - DNA, 962 bp, Zea mays
  Clone ID: UC-ZMFLMO17399E08_FLI
agagggtatggtgagagtgatggttatccttctcagaaagggatcacatatgatgcacaggctgcacttgaccatctagctcagaggaatgacatcgacacaaccaggatagttatctttggaagatctttaggaggtgctgttggagcagttcttgccaaaaacaatcctgacaaggtggccactctaatactggaaaatacatttacatccatactggatatggctggtattatgcttcccttcttaagatggttcataggcgggagctcttctaaaggtccaaaacttttaaactgtgttgttcgctctccatggaatacacttgatattgttggagagttcatcgcaggtcaaacaacccattctcttcctttctggattgcaagatgaactagtcccccctccacacatgaagatgttatatgacaaagcttctgatcataacagaaattgcagatttgttgattttcctagtggtatgcatatggatacctggatgtctggaggggaccgctactggaggacaatccaattgttcttggatcaatacgctcctggagtgcagaatcatgatgccagcttcaaaagtgaaattaccgaggatggcaattattctgctccattgtacctgaagcaaccgaagttgtgaatatttttcgaggatattctccaccatgctctgccgctacatttgcctctggaacttaagttatttgcccatgaaccgaatatatatcctcttgattgaatgtatgaatgatatttttttctcctttgctagtatttggaacattcctaaaaatgtggctgtatgacagcccgatagataggctgtaagctcattggctgaactatttggttttgtgattttgattgtttcctttttcgatgttaaagcatctagacctttaatatgtttggatgacacaagattattgtgattaatgtatgttttgcag

SEQ ID NO: 34988 - DNA, 839 bp, Zea mays
  Clone ID: UC-ZMFLMO17403A09_FLI
gtggaagcctggatgaagtgctgcatgaaaagtctgaacagttggattgggatgcacgtattaacatcatacttggagctgcaaaaggcttgtcttacttgcatcacgattgttcgcctcgaataatacatcgtgatatcaagtcgagcaacatcttgcttgacggcagttttgaggcccgtgtatcagactttggacttgcgaagcttttagaggacgaagaatcacatatcaccacaatagttgcaggaacatttggttatcttgcgccagagtatatgcagtttggcagagccaccgagaagaccgatgtctacagttttggggttctggtacttgaaatactcagcggaaagcggcctaccgatgcatccttcattgagaagggattaaacattgttggatggttaaattttctggctggagagaaccgggagagggaaatcgtcgatctgaattgtgaaggagtgcacaccgagaccttggacgccctgctctctctcgccaagcagtgtgtcagctctttgccggaggagcggccgacgatgcacagggtggtacagatgctggagtcggatgtaattacgccgtgccctagcgacttctacgattcagagtagcctcctggacggacaagccacagtggtgccgctagtttcccgtggaggcgcattcctttattctttgcagatattgtgtaaatgcattgccgcggtgtttgtttggtctcctccaatcggctggttcaacgggtgacatttttgcgtctgtgtttatctgtcatgctacaggttggctatatgctgatttaataagagagaacttaccagtgtgtgttt

SEQ ID NO: 34989 - DNA, 1066 bp, Zea mays
  Clone ID: UC-ZMFLMO17404G03_FLI
gggcttgcaagtttggcttctatgagttctttaagaagtattactcggacattgcagggcctgagtatgcccaaaagtacaagactctaatctacctcgcaggatctgcatctgctgaggtaattgctgatgtggctctctgcccttttgaagctgtgaaggtacgtgtgcagacacaacctggatttgctcgtggattgagtgatgggctccccaaatttgtccgatctgagggtgttcttgggctctacaagggaattgttcctctctggggtcgtcagattccttataccatgatgaagtttgcttcctttgagaccatcgttgagcttatctacaagcatgctgtgcctgttccgaagtctgagtgcagcaagactacccagttgggtattagctttgctggtggttacgttgccggtgtcttttgtgctattgtttctcacccggctgacaaccttgtgtctttcctgaacaatgccaagggagctacagtgggagatgctgttaagaagcttggtctctggggtctcttcactagaggacttcctcttcgtatcgtcatgattggtacccttactggtgctcagtggggaatttacgatgcattcaaagtgatggttggactcccaacaacgggaggtgttacacctgccccagcagcagaggctgaattgaaagccagtgcttgattttttttctctatgttccctgagatcatatttggtggagtggaattgtatcagccagtcgagagcttagttcccgaatcttttttttaatcttaacggataatttgtccgtcatccttctgatgagaggaactcattaaacaggcgaaataggtcttttttgcgctgggaaaagtttacgcttgatgcataataatttgtaggacggcaacgcttttagagcgcaggttttgttcacctcctgtaccgaggaatgcttaccaagtcacatttcacatgatggtctttatgaaagagtgcagtgcacctcggttgatgttcttgtagccgttgctggaactatgcgattgctgtaattttgcttctttgtcatc

SEQ ID NO: 34990 - DNA, 1625 bp, Zea mays
  Clone ID: UC-ZMFLMO17405C02_FLI
cttggatgcaaaatatgcctgcaccttcatgtttggtgttaacgattatcatgccccgccgtacgaagagttcaagtacaatctgactgaagtggttcagatatgccaacaagttaagatgcgccaactttcagtccaagcagatatggatttgttgacggcttacccagaatacataatttcctttttggttcatgccctcgctcatgatccttcatccccggaaattgaagaacatgaaaacgtcaatgcatttggtccaatttactggtatctaatataactctttctgtgctctcttattatcatggatttacttgtcttgttcaaggataatttaataatctgcacctttgcgttgaaacatgttaggatatcatggattcagtgcattttactggtatatgattctgataataacttgcatgtcctagtttgttatcatcataaaaaagggcaggcccatgccagaggctgccacatgagtggtgtctggggaagggataaaccagggcaagtcttccctgtaaatgcggagaggctgcttcgaatctgttgacctgatgactcagtgagacagcttccaccactgaaccaagcctgcccttcagtttgttatcctcataatattcttatttcttgggataaggtcagtaggccttttgatttgggaggccttggaattcccaatctcctcactatgaactgggctctgcaaattcattggctttggctccagaaaactgctccttccaaaccttggagtgggttggatctcaaaatctctccccaggtcagggctctattccaggctgcggtggctaccactattggcaacggttcgacaacctttttttggaaggataggtggattcatgggtgctgtgtcaaggatacagctcccctcattgttgctgcagtgccaaagaagtatagagatgaaaggactgttcaacaggcccttacagatttaacttgggtgcaagatattcagggaaatctctcgctgaccggtattgagcaatatcttcagttatgggtagttcttggcggatttcagttacaaaataataatgacaatcgtgtgtggaggtggaggtgacaatggactctaaattttacactataatatttaaggatcggattaggatcgggccctatttctattcatttttgaactaaaatttatttagggccctactattttgcgaagaagcatttggatcacgatccattaccacccctatgtggaggtttagtagtaatggcttgtttagctccagatcagcctacagagccttcttcattggaactgaaacctttgagtcttggaaagggtttggaagagctgggcagcccctaagtgtaaggtcttcatttggcttactatcaacaataaatgttggacagtagacaggctgcaaacgagaggcctagattaccctgaaaattgtgctttatgtgaccaagaagatgaaactgcacaacacctcttaacaaattgtgtctttgcaaggtagttttggcataatatattacctccaattgggctgtcctctgtggttcctaagaggagaaatcattgttttgctgaatggtggaggaaagcatcaattaaggttcat

SEQ ID NO: 34991 - DNA, 632 bp, Zea mays
  Clone ID: UC-ZMFLMO17419C07_FLI
cgtcttctctccggttgcgacttgcgagcacggtcggaggagctagggtttcgccgcagcgagatgtcggcgtacgacgaggtggagatcgaggacatggagtggaacgcggagctgaaggcgtacacgtacccgtgcccctgcggcgacctcttccagatcacgctcgacgacctccgcctcggggaggagattgcgcgctgcccctcgtgctccctcttccttaccgtcgtctacaacgccgaggatttcgccgactccaaggagccgacccacaagccgtccccgaccccagtcgccgtcgcctgatgtggcccgttcgaggctagatggacgaatggaatggatctcggagcaggaaaaaaggaacgagttcatgtttgacacacaccactacgggagtatttgtttgtactactaaggggctgtttggttcgtggctaaatgtgtcacactttgcctaaggttaggcgttcgaattgaagaactaaccttaggcagaaaagttagacaaaatatggtaagttatgcatcaaaccaaataggctgttaaaactattttttttcatgtgggtgacatagttgtaaggtgacatggacaactcatgctatgaaaatttttgttcgtcccc

SEQ ID NO: 34992 - DNA, 857 bp, Zea mays
  Clone ID: UC-ZMFLMO17425B04_FLI
gtgacaccgacacccgtggcatctctctcgtgactcccggagcagaggcatggacaccgcggcggagctggagctggggctggagttggagcagaagccggcggcggggtactggagcgtggtgggcgcgcgcccttgcgacgcgtgcgccgcggagccggcgcggctgcactgccgcgcggacggcgcgttcctgtgccccggctgcgacgcccgggcgcacggcgccgggtcgcgccacgcgcgcgtctggctgtgcgaggtctgcgagcacgcccccgccgccgtcacctgccgcgccgacgccgccgcgctctgcgccgcctgcgacgccgacatccactcggccaacccgctcgcgcgccgccacgagcgcctccccgtcgcccctctcttcggcgcgctcgcggacgcgccgcagcccttcccgtccccggccccggctcagggggaagcggtggcggaagactacgggagcagcgaggccgaggcggcgtcgtggctgctccccgagcccgacaacagccacgaggacagcgccgccgacacgttcttcgcggattcggacgcgtacctcggcgccgacctcgacttcgcccggtgcatggacggcgtcaaggccatcggcgtgccggtcgcgccgcccgagctggacatcggtgccggcagcttttgctaccccgaacactccatgaaccacattttgtcgtcatcctcggaggtggcggtggtaccggacgcgcaggcggccggcctgccggtggtggtggtggtgagcagaggggaggagcgggaggcgcggctgatgcggtaccgtgagaagcgcaagaaccgccggttcgacaagaccatccgct

SEQ ID NO: 34993 - DNA, 1263 bp, Zea mays
  Clone ID: UC-ZMFLMO17425E12_FLI
cgcctccgctcccgtcgcagtcgcagctcgcagcacattcaccctacctcactcgccctccccaccctcccctccagaccctcacaccaccggcgccgcccgccctgtatggcctactactcgggcggcggcaagctgtcggcggtggacgccatcctggcggaggccgcggacctggtggcgctcgagcaggtcgccaagctcaacacggcccacctcgacgacgactccgcgcttccgtccagcctcgaggcccgcttccgcaagctcaagtccctcccctcgcccgccgcagtgccgcccgtcagcaccctcgcccgcagcgccaccgcgccgcgcccggcccccgctctgcccggccccgatcctcccgctcctgctccgcctgtgcatcacccggtccacgaagacccgccgccgggagacgcggagacgaagggcggcgggtcctcgccgcggcaggctcgcgccccggcacccgcacccgcggtccacgccgacgacgccgaggacctagatcagctgttcgggtcggcgccgcggggccggccgacactgcgggagcggaacagggggagcgactcctcctccgtctccccctcgccgccgccgccgccgcgccaggcgtgctgcttcggcttctcccccaagaagcccctgcggagggcgccgtcggccaagggcaagaagaaggaggtctgccacgggtcccgcgacgtcctcggcgtcgacgccgacgagtggggcgacgagaacaggaggatcgccaccgagctcagggagcagcagcgccggctcaggaaggcgctggaggaccaggtgcaggtcagcagggagaccgccaagatggcgcgctgggtcaagcaggcgtccgcgcgcatgacgcacgccgaggccatcgacgacctgctcagtgactgcgaggacgacctcaaatgagctcacgccgacgctttgctcgtcggttcttccactgtctttgtcttgttggtgatcacaagtctgtcaaaaatgctcatatgttttcatgagtgcatttgcatccatgctttggtacaatgcttatacagaagaagcagagtcacgaaacaatgctatttcttttatgtcacatattattaggaccaggcaaagtatatgaatcgatggggcatataaggttttcatgagtgctgaactgctgatataggaaccaagaacgtggtgttgtgaaaaagatttgatcatgtgttctgtttccatgagaagtaattacacctggct

SEQ ID NO: 34994 - DNA, 1145 bp, Zea mays
  Clone ID: UC-ZMFLMO17425F04_FLI
gtccgactgctcgcttcctgcccttccctctgcctctctccctagggtttctacctcgcgcccgcttccgactagcagcgctagcgtcgcctaactccgaccgaggggacaacgagggttttgggacggacggtgggagatttggaggaggcagcggagggccggagaccagaccatgaggccggtgttctgcggcaacttcgaccacgagacccgccagtacgacctcgagcgcctcttctccaagtacgggcccatcagccggatcgacatgaagctaggctatgctttcatttactttgaagatgagcgtgatgcagaggatgctataaggcgtctcgacaatgtgtcttttggttacaaccggcgcaggctctctgtggaatggtctaggcaagttgaaccggtgccaaagagccgtgataggcctactggggatgtaaagccaacgagaaccctctttgttatcaattttgaccccatacgcactaaggttcaagatattgagaagcatttcgaaccgtatggcaagattgccaacattcgcattcgaaggaactttgcgtttgtacaatatgagacgcaagaggaagctagtgccgctgttaagaacactgacaagagcaccatattggacagggtagtgaccgttgaatatgccttccgggatgatgacggcgatagagatgaccgatacgacatccccaaacaaggtgcttatgacaggcgtggtggtagcccctacatgcgctcacctagcccaaggtaccgaagggactacggtccagattatggtcggcgtggacgttatcctggctatggtcgccgtgatggagcaatgtatgaaaggcgaagccctgtatatgatcgctacggcgggggcagaagccccgcttatgatcgctatgacaggaggagaagccccggttatgatcaatactagtccggtcgattctgaggaacccagtaaagaagtagtttccaaggaagaggtggcgagcaacaacatgatttttgccacgccaagtatacctggaggagccgtggtgtcccaagtatgtctgagtgtagtcatggtaacgcgatgctggttccctggttgttgattggaacgaaacctaagcgtctgaaagagattggtttgc

SEQ ID NO: 34995 - DNA, 417 bp, Zea mays
  Clone ID: UC-ZMFLMO17425F11_FLI
gggcgacgtagtttgctcaactgattctctcatctagaactttagatgatgtgttctgtatagaaaacctgaaactactttagcatcataaggccattaggtattgacaactagggcatctatatccttctcccccttttttgctctataaacttcacctagttgtattgggcgcgtacgtgttggtgttgtcataaacacaatttcctcctatatgtcagttcaatgctcaggtgatcagtgactgagtgaaagccttgaatcaatagggggaaggcatgttcattactacatttaacggttaggcttgcgagtctttagattatctacttggatcaaatgattcttgtatcatttgccatttgtaaccaactgtgttctggaatccttttatcatattacgtagaatatttagat

SEQ ID NO: 34996 - DNA, 1678 bp, Zea mays
  Clone ID: UC-ZMFLMO17425G12_FLI
tcctaatttattctatttcttagtatcatagcacagtatttcgctcgccccgatttcccgactcttcccgtgcctcagacagcatcggattgcttgatctcgattgtcagaataagattcagcgcaggtttggattcaccgaatccaccgattgcttgcgccccgcggtcgcgcgcggcggaatttcggccgccgccaattcgggcctctccggaagggtgtccccggtgtggttcgcctaatatccgctgccctcgtgcgggactcctcgtgattttcggctgtgcgcttggcttttccagtcccgtgttgtggttccagcctttcaggggatggggcgccgcgggttgctcaaggctgcgcttctgctgtgcttccttgctgcttgctccgggagagaacttacgatcaaacagaacccttccactaccatatacaactcgactcttgccaagatactcgtggaatatgcttctgcaatctatactgccgatttgacgcaattgtttacttggacatgtgccagatgcggtgacttgatcgaggggttcgagatgatagagatcattgtggatgtcgagaactgcttgcaggcatattttggttttgccagtgacataaacgcagtcgttgttgtttttagaggaactcaagagaacagcatccagaattggatagaggacttgttatggaaacaacttgatcttgactaccctggcatgcctgaagcaatggttcaccgagggttttattctgcatatcacaacacgacactacgtgatggagtagtcagtggtattcagaggactaggaaagcttacggagacattccaatcatgatcacgggtcattcaatgggtggagctatggcttcattctgtgcgctcgatcttgttgttaactacggactggatggcgtaaacctgatgacatttgggcagcctcgtattggcaatgctgcatttgcttcttatttcaagacatacttgcctcaagcgatccgagttactcatgcccatgatattgtgcctcacctgccaccatatttctcattcttcccacagaagacctaccatcacttcccaagagaggaaccctagtgtaccccgtagaaaagatctgtgacgattctggtgaagaccctacatgctgcaggtcctctctctatctctctctctctctctctctctctctctctcaaatgaaagaacacagcagatgcacagttagcatttccttttgcccctctccacttctaacctacaggtgctttccatatttatttatttttgcatttttttcggtgtttagatcagtaagtggaagtagcgtgcgagaccatatatactatcttggcgtcagcatgcatgcagaagactggagcagctgcagaatcgtcatggactacagcaaattgcagtatcagatggacctcaacggtaatctcgtattgtcgaagcagcccggtttgtcaaacgccagaggattcagtgctcagtgaaccagtctatgatttgtacagtataatagcttcacgaatcagtaatgttcaattgttaatggatcaaaggagaagggttggaaccagcatgccgattcggagatgcttattgtacatgtgattacgtaatgtattgttcagtttgcaaatatatattcacacacgccgatatttgac

SEQ ID NO: 34997 - DNA, 1238 bp, Zea mays
  Clone ID: UC-ZMFLMO17426A06_FLI
cggcaacatcctgagctacaacctggggggcatgggctgcagcgcgggcgtcatcgccatcgatctggcccgcgacatgctccaggccagcggcgcgggcctggccgtggtggtcagcacggaggccgtctccttcacgtggtaccccgggaagcggcgctccatgctcatcccgaacgccttcttccgggccggctgcgcggcggtgctgctgtccaaccggcgccgcgacttccaccgcgccaagtaccagctggagcacgtggtgcgcacgcacaagggcgcggacgaccgcgccttccgctccgtgtaccaggaggaggacgagcagcggatcaagggcctgtccatcagccgcgacctgctggaggtgggcggccacgcgctcaagaccaacatcaccacgctggggcccctggtgctgcccttctccgagcagctgctcttcttcgcgggcgtgctgttccgccacctgttcccgtccaaggcctccacgccggcgccgccgaccaccccaggggacgcctcggccgccgcgccctacatcccggacttcaagcgcgcgttcgagcacttctgcatgcacgcggccagccgcgacgtgctggagcacctgcagagcaacctgggcctgcgcaacgccgacctggaggcctcccgcgccgcgctgcaccgtttcggcaacacctcaagcagcagcatctggtacgagctggcgtacctggaggccaagggccgcgtccgccgcggcgaccgcgtctggcagctcgccttcgggtcgggcttcaagtgcaacagcgcggtgtggcgcgccgtccgccgcgtgcgccgccccgcgcgcagcccctggctggactgcgtcgaccagtacccggcgcgcatggacgcctagcacgtacctgcaatgcagtggctgctatctatctatcgctcgcttcgctaccactaccagtgcagtgctgcacttcaccgatggatgatggatcggatatgatatggtataggacgcggtcggtcgatttgcatgcatgcacaagtgttagtataccgttctgaaggtacgtttgaactttgttcgtttgtattgcactattgcttgttgtttaagtagcggttaagggaggcatacgtacgctgtactaccataatggaagtactccggtccggtcctgtcctgtgtgagccttatgtacgtgcaattttaatgtgttttgatattacaagacttgacggttggc

SEQ ID NO: 34998 - DNA, 2120 bp, Zea mays
  Clone ID: UC-ZMFLMO17426A07_FLI
aatttatgacccctcctgttagccctcctcagcatgattatcttctactaggattgcgccgagtgtgttctatggagtttggacagcatcctataaattcacctgatggctttgctaatctccttttaagctctgctacaggtcccagtaatgcagaactaaagaaacttcccgaatcaacaatttacaactggagttgtggtcacttctctaggccacttttaactgcctctgatgataatgaagaaaccaatgctagaagagaagagagagaacggattgcactagatttcatcactaagtgccagcgctcctcctgcaagattacaagccaaattgctagttgggatacaagatttgagttggggacaaaggcagctttattattgccattttctccgattgtcgtagcagctgatgaaaatgaaaaaaataagtgtgtggaactatgacgatgcacaaccagtgaactcttttcacaaccataagttgtccgacagagggctatctaaacttttgcttatcaacgagcttgatgagtgcttgcttttggctgcctcaagtgatggaaatgtacgcatatggaaaaattttgcttgtaagggagggcagaaacttgtaactgctttttcatcagttcagggacatcgagctgctggtcgcagtattgtgattgactggcagcagcaatcttgttatctgtacgcatctggtgacatgtcttccatcttggtatgggatcttgacaaggaacaacttctcaacaccattccgtcatccgctgatagtgccatttctgccctgtctgcatctcaggtccgctctggatactttgctgctggttttgctgatggttctgtcaggatatatgatgtttgctctcctgataggcctgtctatgtggccaggccgcatgccccaagaacagaaaaggttgtgggcatagggtttcagcctgggtttgatccatacgagattgtaagtgcatctcaagctggagacattcagtttcttgatgttagaatggcagcagaaccctacctgactattgaggcacacaggggttcacttacagcattagcggttcatcggcatgccccagttgttgctagttcagccaagcagatgattaaagtgtttagtcttgaaggagaacagttgaggataattcgctacctgccatcttttatgggccaaagaacaggcagtgtaaattgcctttcttttcacccatacaaatcactcctggctgccggtgctggtcataatgctcttgtctctatctatgctgaggaaaattacaagtaagatcgaggcctatatctcatgctcatgataatgcagacacagtgcgatcgacaggccttacatttttggccaagtgatgctccacagcatggtgcagcttcaagatccaagatgatggtaagctttgtcacagagaaggtgttgatggctccatggctttcggtgcatattgcctgttggacggcgtgtgcaatttgtatgatacagtcaagaactcaagattcattaggcctccttgcattgtgaaccctaccctgatcctgccgttgaacttggaggccccatcaacaaattaatcatacctaagttaaccaaaatgtaaatagccagtgcattcgggttgtactttgtcagcattaatccctttttcaagtgtaaaaaggtctgaaggtgcttgatatgataaacatggcttggtagtggctgctgactgggcaagtggggttgtgcatatgggcctggtcgcacatttctgctcacagatgatgttgaatagatagatgtctgctcacagatgaggttgaatagatagatgtctgctcacagatgttgttgaatagatagatgcatttgtccagctaatatagcgctagatgggggtagcgttggcctgcatgaatgaaggaaagttgtcgagtgaggagtgaccttcattgccattctgtgccgcaacaagtctccatgtgttatcagatggccctgtagataatacatatatttgtagatgtgttttgttcggtgaattgtgctgaccgctgagtaaaatgtattgtgaacgttgttgataaatgctattgtaatgaatttgcaac

SEQ ID NO: 34999 - DNA, 1228 bp, Zea mays
  Clone ID: UC-ZMFLMO17426D02_FLI
caattccttctccatgagagtcagggaatggttctcatggcacttccctgagcttgtcaagattgtgaacgacaattacctatatgccaagcttgctaagtttatcgtgaacaaatctgatttgacggaaaaagatattcctgctttggctgatatagttggcgacgaggacaaggctaaagaaattgttgaagcagcaaaggcttcaatgggccaggatctgtcaccagttgatttgatcaatgtccagcaatttgcccaaagggttatgaatctctctgagtatcgcaaaaacctttatgagtatcttgtgactaagatgaatgatattgcacccaacctgacatcgttgattggtgaagtagttggagctcgcctaatctctcatgctggcagtctttcaaaccttgctaagtgtgcagcctccacccttcaaatacttggtgctgagaaggccctattcagagcactgaaaactcgagggaacacaccaaagtatgggcttatattccactcctcctttattggccgtgcttcaactaagaacaagggcagaatggctcgttacctggcaaacaaatgctcgattgcttcacgcattgactgctactcggaggctagcacctctgtctttgggcaaaagttgcgtgagcaagtcgaggagagactggaattctatgacaagggtgttgcgcctcgtaaaaaccttgatgtgatgaaagccgctattgacagcatggtcaatggcacctcaatggatgatgatgatatcgagaagaccgatgcatctcccaagaaaagcaagaaaaagaagaccaaaaccaaggctgatggtgatgcaatggacgtggataaaccctccaacgttgctggtggagaagctgagcctggaactgagaagaagaagaagaaaaagaagcataagctggaggaggaggcacaggaggagaacggtgcagcagatactacccctaagaaaaagaaaaagaagagccgtgaagcttccgaagaagctgaacctaagaccgccaccgatggtaagaagaagaagaaaaagaaggctaaggccgaggatgatgagtagccaagttatttgttgtatggcgtatgaatccgagagtatttgttgaaaaacagagatgaacgcctgcctagctcaactagcttgtagttcatgaggcgtttgatgcaaacccaactcaaagtacgaagttttcctatcgtcttt

SEQ ID NO: 35000 - DNA, 1684 bp, Zea mays
  Clone ID: UC-ZMFLMO17426E10_FLI
cggcgcagccagagtaagcagagagttgcactaccgtgcttcttcagttcttcttcctagtatgcactcgcttgtgaggcgtggcaatggctacggctacggctatggtggttacggcagcagcaatccccatatgaactaccaccgccaaaacaccgagtccgtgaccaccgtcgtcacggagatgaaccgaatggccgtcgacgacaagccctgctacggcggcggcgtgcagaagcaggcctgcaaggtggaggcgttccaggagcacgacgaagcgtacaagggcgccgtggccgtgcagcagaagcactcctccttcaaggaggacaaggaggaggtgcgcggtgctgctgccgccgtcagaagctggcacgacgagttatacaaggaggaggaggaggagaagcgcgtcgtcgacacggagtacggtgcccgctacgggggtgtggccgccgtgaagaagccgggctacaactacaagcagcacgaggcatacggggagaccgaaggtgcagggtacggctacggcgccggcggcgtgaagaagcaagcaggctacagctacgcgcaggaggcgtgcggagagagctacggcggcgctcaccacggtggtgccggtgccgtcgcgcagacgtacgcctacgaccagcagcaggcctacaagcacaagaacgcggcaggggcgggggcggggtacggtgctccctacggtggtggcgccgtgcagcagcacgacggacacaaagatgtgtaccggcacggcgccgccgccggtggcaaagtaaagaagaacggctaccagtaccaagaggcgtacggcggaactgacgcaggagggtacggtgcgcactacggcggcggtggtggcgccgtgcagcagtacgggtacggcggcgccactaccgatggcaaagtgaagaagggcggccaccagtactacggcggaagtggtgcaggagggtacgactctcactacggcggcggcggcggtggcgccgtgcagcagtacggcggctaccataaagatgcgtacgggtacggcggcggcgccaccgccggtggaaaagcgaagaagagcggctaccagtacgaggaggcgtacgctggaactggcgcgggaggatacggcgctcactatggtggtggcgccgccgtcgctcagaagcaaggctacaggcagggcatatacgagagcgagagcgagagcgaaagcgagagcgagagcgacgagagcgactgcgaggaggcgttcctgccgcacggcggccggacgccgcagggcggcgtgcagcacagctacggctacgggggcggggcgtacaagcacggggctggcaacctcggcggcttgcgccgctaccagtcgtacgagagccgcgaggatctcggcggcggacgccgctacgagacctaccagagcaccgtccagtacaccggctccccgaccaagaaccgccacgtcctacgctacggcgcgtaggcatatatacgctctgatccagttgcattgcagcacgtgcacctacgtatattcctatgccgcgtcgtgtgactcgtgtcgtataggcaggcggcaccgctacttggtgggccttgtgtttgctggtgcagatcgaaaaatctgacaataagatgtacttaatgccaccttgatataataatgtatgaagacgaaactttg

SEQ ID NO: 35001 - DNA, 937 bp, Zea mays
  Clone ID: UC-ZMFLMO17426F09_FLI
cctcctcaagggtgcagttcaggaatatggcgtcgcgcgcgcggtgggtggaggaagccggcgctgcggaggtggtggagaacaggggcaagctgtggctgaccaccggtgtcactcgggggggcaagctgtactacaacgttgaggagaccgggttcttggccgaaatgggtgccttgattcttctcaatgataaggatgagacgataggaattgaagatatctatgggaagcttgctggaggaaattatgggtgctcctgggatacctttcaggcttataagcacttgaaatcacttggatatattgttggaagatttggtgttccctggacaatgaagcatggtggtactcatcacaccattgctccccagatgaatatacttgagactgatcagagcttaaatagagttgatggggcctccaatgacataaccaaattgctcaaggaaatacagattgacgggatatgtccatcttttgaagtttatctgccaaatagcaagttcaaaaagtcatccccagggtgccctagtttcctcttatgtctattaaggggtaaaccgccctcaagggttgaattggaagcagtggaaaataatttcagaggcattcctctgaagtatgcccatgtggataatggacgggtcagctttctctcctttgatgaagttacactccccagcttgccctgatgggtagcagcagaacatgtgaagtgataaagggtctgagcttcagaacaatcttgtcagaaatgataaagggtctcagcttcagaacagtgtcttgagatgcattcgccgcaagcgcagggggggcaaagtatttcagtactaacttttgaacatactaaagtatggaattccctggagtctcacaatccagcgatctgttgtacactccagattgtatgttggaaggagaaatcatgtct

SEQ ID NO: 35002 - DNA, 931 bp, Zea mays
  Clone ID: UC-ZMFLMO17426F10_FLI
gcttctgcggcgggcgccatgaacagcagcaagcaggcgctgatttacagcttcgtggccaagggctccgtcgtgctggcggagcacacggccttctccggcaacttcagcaccgttgccgtccagtgcctccagaagcttccccccaacagcaccagatccacctactcctgtgacggccacaccttcaacttcctcgtcaaccgcggcttcgtgttcctagtggtcgccgatgaggcggccgggaggagcgtccccttcgtcttcctagagagggttagggaagacttcatgcagcggtatgggtccagtatcgatgaggaggggcagcacccgctcgctgatgatgctgatgaggatgactttctgttcgaagaccggttcagcattgcctacaatcttgaccgtgaattcggcccgaggttgaaggaccatatgcagtattgtgttaatcatccagaggaaattaacaagctctccaaggttaaagcccacctatcggatgtcaaagggatcatgatggacaacattgaaaagatattggatcgcggggagaagattgagcttttggtgggtaagacagagaccctacagtcacaggcggacagcttccacaggcatggcagagagttgaggcgaaagatgtggcttcagaacctgaggtttaagctgatggtgggtggcggcattgcggctctgatccttatcatttggctgatggtctgcaggggattcaaatgttagagcacaccaagttgctcgccttttttttttcttttcaggcgtttgatatgcacagactttcaaccaaattgtgttttcagtgtcacggtatcgcaatgtagtggacttcaatccccgcagtctttcccatgttccattacttccatatgataatggtaaaaggtaggaagctggagtacgcggtcag

SEQ ID NO: 35003 - DNA, 746 bp, Zea mays
  Clone ID: UC-ZMFLMO17427C07_FLI
gcgcgacgagatcgacatggagttcatgggcaactcgagcgggcagccggtggtgctgaacaccaacgtgtgggccagcggcgacggcaagaaggagcaccagttcgacctctggttcgacccctccgccgactaccacacctacaccatcatctggaacccgaccaacatcctgttcaaggtcgacgacctcttcatccgctccttcaagcgctacgccgacctgccgtacccgagctccaggcccatgacgctgcacgccacgctgtgggacggcagctactgggccaccgagaagggcagggtcggcatcgactggtccgacgcgcccttcgtcgtctcctaccgcagctactacgccagcgcctgcgtcagcggcggcgcgtgccgggccgccggcagcggcgggtggatgaacaggcagcttgacagcgccgagtggggcaccgtcaggtgggcggagcgcaacttcatgcgctacaactactgccaggatgggtggaggttcccgcaaggactccccgccgagtgcgcccgccactgatatgcgtccgccggttaattctttgttttgttgggtattctttttttttctacgggtatatgattcttgctcttctttgtggatttgtgattaaaaagcagccctgcagctagcaacgtgtgggcggttgttgtacacctagcttttcctaaatcaagcatgtattttttttatcgtgcctttggatacaggcatgcagcat

SEQ ID NO: 35004 - DNA, 647 bp, Zea mays
  Clone ID: UC-ZMFLMO17427E03_FLI
aacgtgctagtgacggggacgccggggacggggaagacgaccacgtgctcgctccttgccgacgccgcaggcctccgccacgtcaacatcggcgacctcgtccgcgagaagagcctccacgacggctgggacgccgacctcgagtgccatgtcatcaacgaggacctggtgtgcgacgagcttgaggacatgatggaagaaggtggtatactagtagattaccacggatgtgatttctttccagaacgttggtttgacctcgtagttgtgctccagactgacaactcaattctgcatgatcgcctgacgggtcgaggttacatgggttccaagctcgccaacaatatagagtgcgaaatcttccaagtgctcctcgaggaggcgagggagagctacagagaggacatcgtgatgccattgcgaagtgacaacgtggaggatattagtaagaacgtaggtgcattgacagactgggtaaacaattggagacctagttagacctgtcaaaagaaatgttgccttatgtgttgtatttggatatgtattgggtggaccagctgccatgtttgtaatgtacggggtgttttggttaaagaaacgaagtcgttcatcctcttattcttttcttttaatggagtgaattactt

SEQ ID NO: 35005 - DNA, 876 bp, Zea mays
  Clone ID: UC-ZMFLMO17427F10_FLI
aatgggcggtatattatctcggcaagtgaggattcccatgtatatatctggagaaacaatgatggtccgaaaccaagtagaaagaagggcattgtttctgtcacagatagccatgaatacttccactgccagagtgtgacagttgctgttacctggccttttgccagcaccgcaatgacttgtttaatgaaccccgggaagcaagaagagcttgagcgtgggtctgagccgcaagatctgcaaaccaaacttgccaaggcacaggagatgccagatgttgagtaccggagcacaaatatcacgagtaacaactcgaatcataataatggtgaccggacatctccgacttggcctgaaaaacttaacacaccaccaaatcaaagtctcagggctactacctgccatgccaacgagggagatcaagctctgaatcggtcggcctggggcctagtgattgtcacagcaggccgtggaggtcaaatcagaacatttcaaaactttggttttcctgtaagagtatagcatgaatatgaatacgtaagataatagtcactgccattcaggagtgtagtttgtgtatagataggagatagtgggtgagtttcacactatccagggattgggtctgattgttccttggcgtgcatgctagagatcagaatcttcatctgacatacactgtgtactgcgaaacttggtatttatttaccctgaggcctaaattgtacacgaaagagaaagccctacagagagcaacactatcagctgactgcagataattcatctgtccgctaaaaccccacctttcgctattactattccgaaccattgcatgttcttgtaagaaaaaaaatacacgtggtgaaattgtcgttt

SEQ ID NO: 35006 - DNA, 1350 bp, Zea mays
  Clone ID: UC-ZMFLMO17427H12_FLI
ccagctcgctcgtcccagctgatcaggtcgagcacctagtagcgacctgctcgatcatcagtgtagagtgtcggtaggtgtctgtctctcttggtggctggttgcaacggtcatggcgacgtcgtctcgtcgggtgcccttgctgctgctgtgcctgggcgtgctggtgtcctgctccttcgcggcgggcagcttggaccaggagctggacatcacgtggggcgacgggcggggcaaggtccttgacaacgggcggctgctgacgctgtcgctggaccgcacgtccggctccgggttccagtcccggcacgagtacctgttcggcaagatcgacatgcagctgcggctggtgccgggcaactccgccggcaccgtcaccgcctactacctgtcgtcgcagggcggcgcgcacgacgagatcgacttcgagttcctgggcaacgtgtccggcgagccctacacgctgcacaccaacgtgttcacgcgggggcaggggcagcgggagcagcagttccgcctctggttcgaccccaccgccgacttccacacctactccatcctctggaaccccaagcacgtcatcttcatggtggacgacatgcccatcagggacttccgcaacctggagagcaagggggtgccgttccccaagagccagccgatgcggctctactccagcctgtggaacgcggacgactgggcgacgcagggcgggcgcgtcaagacggactggtcccacgcccccttctccgcctcctaccgcgggttcaaggccgacgcttgcgtcgccgtcgcgggcggccggacccgctgcggcgccaccgtcggcaccgagggcaccggcgcccccgcctccgccgccggcgccggggactggtacaaccaggagctggacctcaccctgcagcagcggatgcgctgggtgcagcgcaagtacatgatctacaactactgcaccgaccccaagcgctaccagcagggcctccccgccgagtgctccatgcagtagcgcccggttattcctcgcccgtccaacaatggcgcgcgcgcgcgtgtgtgtgcatgtggtccgctctactgctaccgctacgacgatcggtgtcgatcaccggatcaaggcaagacgaaaggcatcgaaacatggtagataaataaaggacttgacgatttgtaacgcagtagctggtgcgtgcgtggtgtggtggtaagaaattcttctgctgcctgtgttcttgtagcctcctcgtcctcgcccaccctgttggtacgtgtacggtgtacgtagtctgccgccgcgcgctgttcgtgttcgtcgtgtctcgtgtctgtattatactcgtcctccccatc

SEQ ID NO: 35007 - DNA, 1072 bp, Zea mays
  Clone ID: UC-ZMFLMO17428C11_FLI
acgcgctggcgcgggacctgggcgacaaggcgcgccgcttcaacgtcttcaaggccaacgtgcgcctcatccacgagttcaaccgccgggacgagccctacaagctccgcctcaaccgcttcggcgacatgaccgccgacgagttccgacgccactacgcgggctccagggtcgcgcaccaccgcatgttccgcggcgacaggcagggctcctcggcgtcggcgtcgttcatgtacgccgacgcgcgcgacgtcccggcctccgtcgactggaggcagaagggcgccgtcaccgacgtcaaggaccagggccagtgcggtagctgctgggcgttctcgacgatcgccgccgtggagggcatcaacgcgatcaagaccaagaacctgacgtcgctgtcggagcagcagctggtggactgcgacaccaaggccaacgccggctgcaacgggggcctcatggactacgcgttccagtacatcgccaagcacggcggggtggcggcggaggacgcgtacccgtacagagcgcgccaggcgtcctgcaagaagtcgccggccccggtcgtcaccatcgacggctacgaggacgtgccggccaacgacgagtcggcgctcaagaaggcggtggcgcaccagcccgtgtccgtcgccatcgaggccagtggctcgcacttccagttctactccgagggggtcttctccggcaggtgcgggacggagctggaccacggcgtcgcggcggtcggctacggggtcaccgcggacggcaccaagtactggctggtcaagaactcgtggggccccgagtggggcgagaaggggtacatccgcatggcgcgcgacgtggccgccaaggagggacactgcggcatcgccatggaggcatcctaccccgtcaagacctcgcccaaccccaaggtccacgccgtcgtcgacgaggacggctccagccacgacgagctctgaattgcgcactacactactacgtactagctatagcctatatagctatactatgattgatccatgtatgctcggacaggaacatcgccgactgtgaatgtctgaatggc

SEQ ID NO: 35008 - DNA, 1753 bp, Zea mays
  Clone ID: UC-ZMFLMO17428D01_FLI
gcgggccgctgccgatcgagtaaaaaaaaaacgccgggcatcggccgcctcctacccccaaccccctccaccctgtcctcggacaggcggcgtcggtgcgccggcggtgccagcgcggaggcggaacacccagacagcccggaccttcagctgtctgcttctgcgtctggcttgcgggagcgatcccgtcttctgtcgaccagtcgtggactcaaactagagctggcttcgccatagacttctggaggaggcaacgggattgggaattggaacatggggagttcggtcggctgcttgggaggcggctccaagtcgaggcaagatcagaatggtcaggtcgtcgcgggttcgtctccccgttcaggtcatgaattatcaagacctggaaataatgtacatgtattctccctaaacgagttgaagactgccacacgaaactttcacatgttgaattgcattggccgtggggggttcggagcagtgtataagggaaacctgaaaaatggcactccaattgcaattaaaaaacttgcagctgagtcaaaacaaggaattagtgaattcttgacagagattaatgtcatatcaaatgttaggcacccaaaccttatcaagctgattggttgctgtgttgaagggagtaacagactattggtgtacgaatatgcagagaataatagtttggcgaatgctttgcttggaccaaagaacaaatgtatcccattggactggcagaaaagagttgctatatgtattggaactgcttctggccttgcttttcttcatgaggaagcacaaccacggattgtccaccgtgatatcaaggctagcaacattttacttgataagaagctgctgccgaaaattggagattttggattggcgaaactctttcctgatactgtcactcacattagcacgcgtgttgcaggaacaatgggttatttggcaccagagtatgccttgttgggacaattgaccaagaaagcagacatatatagttttggggtgcttcttcttgaaatgataagtggtgaaagcagcagcaagtcgacttggggacctaatatgcatgttctcgtggaatggacatggaagctgcgggaagaaggaaggctcttggaaattgttgatccagaactggaaaagtacccagaggagcaaatgcttcgtttcattaaagtggcactgctgtgtacgcaagccacgtcccagcagaggccgtccatgaagcaggtcgttaatatgctatctaaccaaacagaaattgatctgcaaaatgtagctccaccaggtgtgctgaaagaacctcggcagcgtaccggtggctttgggggtttgatagcagacacgtcctcaagccaaagcactaaaggcaacccagctgaatcatacagcacacagaccaacatgaacagctctcagtttagcacaactgatgtatcaccacggtgacgttgtcgactattgtttgacgtcttcagaggtgtctcgcgcctcccacaaggtttattgtgctgagcccggacaaaatcgcttgatatggaaggcctgatccattttcatcctgttttagagctacgtaggatgcgaaggccgctgtgaattgctgatgtacaggaattgtagctcatctgtttttcttttctgcggaggatgatttgcagttaaatttgacattttttttatgttctccattaaagcctgttgtaggtatacattgcaagagtacaagacatgtattcgaaatttc

SEQ ID NO: 35009 - DNA, 970 bp, Zea mays
  Clone ID: UC-ZMFLMO17428E02_FLI
ccccttccctccctccctctccccgcgggccgccagaggcaatttcgccctcgattcgaccccgattcgtccgcccgcgaccgggattccctccgccaagcgcggatctgaacgctgcgctccgtgtcgccgctcgaatccgccatgaagggggccaaatccaagggcgccgccaaggccgatgccaagctggcggtgaagagcaagggggcggagaagcccgccaagggcaggaaagggaaggccggcaaggaccccaacaagcctaagagggctcccagcgctttcttcgtgttcatggaggaatttcgcaaggagttcaaggagaagaaccctaagaacaagtctgtcgctgcggtggggaaagctgctggcgacaggtggaaatccctgagcgagtcggacaaggctccctatgtagccaaggctaacaagctcaagctcgagtacaacaaggccatcgctgcctacaacaagggcgagagcactgcagctaagaaggctcctgccaaggaggaagaggaggaagatgaagaggagtctgacaagtccaagtcggaggtcaatgacgaggatgatgaagagggtagtgaggaggatgaagatgatgacgagtgatggagctcctcgagacaatggaccgtgcttcatccaacaatggagcggctacacaaggccccgtggcgatcacaaaaaaggagcctatatccatgtactagaattattcagtttcactccacatcgtgatgttttatttttacttttgtcgtgctataacggatagcgctcctcgttggcgccactggcgggtggttctgcctctggtctggtgtgtttgtgtgtggtcacacttgccagccagcagaggcgcctgcttgtacctagattactgtttccattgtcgtcatcatcggctaacattgtcataatgtcagtttgggtaatgttagattaagtaattattgtgttc

SEQ ID NO: 35010 - DNA, 839 bp, Zea mays
  Clone ID: UC-ZMFLMO17428G07_FLI
aagcattgtgaagcgtgttgcaaaccgcttcatctttgatcaggcggccaccacagattcggtccagctggaggcaatggtggtgatagagatggtggtcacggagccaacaactcatgggcggggggagcacgtcaagacaccgccctagcccaaacccgagacggattacttcgccgagaaaagaaatctgtggagctagagcttgaaaatatcgatgtcgtggggaggatgtttggagactggagcgtccatgcgctggggtcatcaaagtcgttggacaatacgtctaaggagtgttgtcttcccgttaatcttgcagcacatatatgcaagcagtcctacaatcattaaaaattaggagcagcgatatcatgggacgatgctctacgatcgggcatgagacgctttcagcacaagtactacaacctgttcacctgcaactggcacttgtttgtggcgagctgtctgaactggcttgcctacaatggctccctggagtggaatgtcttgaacgtggctgcccttgtccggattcatggctgatgggtggacagaatgagtactattctagcaaccgagcagatcatcagaaatccagaattatcaataattatctaacgtctgcatcccgaactagaatcaccacaccggtctgtcatgatcatgagaacctacaacaaagcagatctatgttttatacaaattttttactcccgtcgcaacgcacgggcactcacctagtaagcttatatgagtagaatagaccgcgacccattttatattaaattttggcatttgatgattaagataactatttaaagttacatttttttgtt

SEQ ID NO: 35011 - DNA, 253 bp, Zea mays
  Clone ID: UC-ZMFLMO17D04_FLI
cttggaataagatatgtcggcacgtgctctgcgcctgtgcctgcgcgcacattgacgaagatgtcgctttgcatgtgtccgcagtgtgctactgcttgcggcagcgtaggtcatgttgactgagctttcctttactgacaaatttcgagtgtaaattggttcttgcactttttttttcgttagggtgtatcagtagttctgtacaatatgtttttaatgagaccattcggccatcagagctttgatctgtctg

SEQ ID NO: 35012 - DNA, 1125 bp, Zea mays
  Clone ID: UC-ZMFLMO17H01_FLI
ctctcatgcccagccagatgatcttattgatttttaccacctgaagagcaggaagggcatgagccagcttgagttggaagatgaggtgcatgatgatttgaaggctgcaactggtgggtttaccaaggatgcagatgatgcaaacaagctcaaccgcattcttcaattgactgggttcagtgatcctgtgtatgctgaagcatttgtaacagttcaccattatgacattgtacttgatgttactgtaattaatcgcacaaaggagacacttcagaacttgtgcttggaattggctacaatgggagacctcaaacttgttgaccgccctcagaattacaccttggctcctgagtctagcaaacagatccgcgctaatatcaaggtttcatcaacagagactggagttatatttggcaacatagtttacgagacttcaaatgtgatggaacgatcagtggttgtcctaaatgatattcatatcgacatcatggattacatctcacctgctacctgtgctgatgttactttccggaacatgtgggcagaatttgaatgggaaaataaggtggcagtgaatactgtgattcaggatgagaaggaattcttgaatcacattatcaaatcaacaaacatgaagtgtctgacaccaccgtctgcactagacggagaatgtggtttccttgctgctaatctttatgcaaagagtgtgtttggtgaggatgctttggtgaacatcagcattgagaagcaacatgatggcaagctcagtggttacatccgaataaggagcaagacccagggaattgcactcagcttaggtgacaagattaccctcaagcagaagggtggcagttaactgtgacaagtgctgcagttgtatcatcatttttctcttttaggaaatccacgtgccagagataccagtgccgtggcattgaattgagtataaatgtttttttgtacaaaaggatcaaagaaacagataagaggacagttatgaggaagtcacggtgttagatccctgagcatgaagttctcggtcgaagatccatgttgctgtagtaacgatgctgttccaacttcctttcctgataaaatgacaatgtagaaatagttctgaagttt

SEQ ID NO: 35013 - DNA, 1624 bp, Zea mays subsp. mexicana
  Clone ID: UC-ZMFLTEOSINTE007B08_FLI
accatcgaccgcgagttccccgccgatgtagttctcggcgacggccgcgtctttggtggcgtctctctgtatgccggtgaccccctggactccactcagttgcctctggtgttcgccggggactgtggttcccctctgtgcctaatgggcgagctcgactcgaagaaggtggccggcaagatggtgctctgtctgcgtggtaacaacgctcgtgtcgagaaaggagcagcggtcaagctcgccggtggggtcggaatgatactcgccaacaccgaggagagcggcgaggagctcatcgccgactcccacctcgtgccggcgactatggtcgggcagaagttcggagacaagatcaggtactacgtccagacggacccgtcgccaacggcgaccatcgtgttccgcggcacagtcatcggcaagtcgccgtccgcgcctcgagtggcggcgttctcgagccgaggccccaactaccgcgcaccggagatcctcaagcccgacgtcatcgccccaggcgtcaacatactcgcggcgtggaccggcgccgcctcccccaccgacctggacatcgactcgaggcgcgtggagttcaacatcatctccggcacgtccatgtcctgcccgcacgtgagcggcctcgccgcgctgctccgccaggcgcacccggagtggagccccgcggcgatcaagtcggcgctcatgaccacggcgtacaacctggacaacgccggggaaaccatcaaggacctcgcgacgggcgtggagtcgacgccgttcgtccgtggcgccggtcacgtcgaccccaacgccgccctcgacccagggctggtgtacgacgccggctccgacgactacgtcgccttcctctgcacgctcgggtactctccgtcgttgatctccatcttcacgcaggacgcatcggtcgccgactgctcgacgaaattcgctcgccccggcgaccttaactaccctgccttcgccgccgtcttctcctcctaccaagactcagtcacctaccgccgggtggtgcgcaacgtcggcagcaactccagcgcggtgtaccatccgacgatcgccagcccgtacggcgtggatgtcacggtgaccccgagcaagctcgcgttcgacgggaagcagcagagcctgggatacgagatcaccatcgcagtgtcaggcaacccggtgatcgtggattccagctactcgttcggatccatcacctggagcgacggcgcgcacgacgtcacgagccccattgccgtgacctggccgtccaacggtggagcagcagccatgtagtagactgatgctgttgctactgtctaccgctgtgggaagaagaacagggccatgagcccatgagatccgaaatctccacgcctcctgcctgccataggaataatttcctcgactgaaccacgcaataattcagctgcccctatcgtggttgtggtggaccaatggaccatgcttgcagctctctcttttcatttaggggtaggttggttggagcagcgtatgtgattggctgcttgcaaggcagtgagggtgccatccattatggctcattggcgattgaacgtgtatgaacaagtttgtaatgactagaaataatctttgtacc

SEQ ID NO: 35014 - DNA, 1556 bp, Zea mays subsp. mexicana
  Clone ID: UC-ZMFLTEOSINTE008A01_FLI
cccagtccaaatcctcagtcctcaggcagtcaggctgctcgcagctcgtgccgtccactctcccccgaggcagtctcttgcgttcgctgctcgacatggcgctccaggcggcgacgtccttcctcccctctgccctctccgcgcgcaaggaggggtcggtgaaggactcggcgtcgttcttgggtgttcgtctcgccgatggcctcaagctggacaccaccgctctgggcctacgcaccgtgagggtgagcaggtcggcggacatccgcgcgcagacggcagcggtgtcctccccgtcagtgacccccgcgtcgccgtctggcaagaagaccctccgcaagggcacggcggtcatcaccggcgcgtcgtccggcctcggcctcgccacggcgaaggccctggcggagacaggcaagtggcacgtcatcatggcctgccgcgacttcctcaaggcgtcgcgcgcggccaaggcggccggcatggacaaggacagcttcaccgtcgtgcacctggacctcgcgtccctggacagcgtccggcagttcgtcaggaacgtgcgccagctggagatgcccatcgacgtggtggtctgcaacgccgccgtgtaccagcccaccgccaaggagccgtcctacaccgccgacggcttcgagatgagcgtcggcgtcaaccacctcggccacttcctcctcgcgcgcgagctcctcagcgacctccagtcctccgactacccctctaagcgcctcatcatcgtcggctccatcaccgggaacacgaacacgctggcggggaacgtgcccccgaaggcgaacctgggcgacctgcgcggcctcgccggcggcctcaacggcgttggaagctcggtgatgatcgacggcggggagttcgacggcgccaaggcatacaaggacagcaaggtgtgcaacatgctgacgatgcaggagttccaccgccggtaccacgaggagacgggcgtgaccttcgcgtcgctctacccgggctgcatcgccaccacgggcctgttccgcgagcacatcccgctgttccgcctgctcttcccgccgttccagaagtacatcaccaagggttacgtctccgaggaggaggccgggaagcggctggcgcaggtggtgagcgaccccagcctgaccaagtccggcgtgtactggagctggaacaagaactccgcgtccttcgagaaccagctctctgaggaggccagcgacgccgacaaggccaagaagctctgggagatcagcgagaagctcgtcggcttggcgtgatgcccaccgtggccggcgccggcagccggcgacagtttttcctacctaggacatgctcattagttggtctcagtcgagtagtcgacgtgtggtgcgcccgtgtcagagtgccaagccaagacagaaagtgagtacaaacgtgtaaaatatgtgctactgcgacgtgatggtttgggcagtggactgtatgtatctctactctctaggcttctgctttgctttgcatatttaattttctgctaataagaggacagcaaatgcctttcgagcttc

SEQ ID NO: 35015 - DNA, 1652 bp, Zea mays subsp. mexicana
  Clone ID: UC-ZMFLTEOSINTE008F02_FLI
gtgacaaaagcccacagcttcttccccctactcctccgtcatccgtttcgctctctgccgccgccaccgcacaagaagctagctcctgcctgtaccgccccggcatggcgatgctatcccgcgcagcctcctccgcggcccggcgcccgctgctgccgccgcctaggcttctggcggtgagggcgatggcgtcgtcgctcttcggccacgtcgagccggcgcccaaggaccccatcctcggcgtcaccgaggctttcctcgccgacccctcgtccgacaaagtgaacgtcggcgtcggcgcctaccgggacgacaacggccagcccgtcgtgctcagctgcgtgcgcgaggccgagcgccggatcgcgggcaacctcaacatggagtaccttccgatgggaggcagcgtcaagatgattgaagagtcactgaagctggcgtacggagaagattctgacttcatcaaagataagaggatagcagcggtgcaggcgctttcaggcactggtgcctgccggctctttgctgatttccaaaagcgttttttgccggattcgcagatctacataccaacaccaacgtggtccaaccatcacaatatttggagggatgctcaagtgccacagaagacattcacatactaccatccagagtcaagagggcttgatttctcaggattgatgaatgaaatcaagaatgctccagacggttcattctttttgcttcatgcatgtgctcataatcccaccggtgtagatcctacggaggaacaatggagagaaatatcccatcagttcaaggtgaaaaaacattttccattctttgacatggcataccaagggtttgccagtggtgatccagagagagatgccaaggcaatccgaattttccttgaagatggacaccaaattggatgtgctcagtcatacgcaaagaacatgggactttatggacaaagagcaggatgcctgagtattctgtgtgaggatgagatgcaagcagttgctgtcaagagccaactgcaacagatcgcaagaccaatgtacagcaacccacctgttcatggtgcactggttgtttctataatcctcagtgatccagaattgaagagtttgtggttaaaagaagtcaagggtatggctgatcgtatcattggaatgcggaaggcacttaaggaaaatcttgaaaagctaggttcacctttgtcatgggatcatatcactaatcagattggaatgttctgctacagtgggatgacacctgaacaagttgaccgtttaacaaatgaataccacatttacatgacccgcaatgggaggataagcatggctggtgtaacgacaggaaatgttggttacctagcaaatgcaattcatgaggttaccaaaccaaattgagttagggtcctaccttctttggtcgatggaagctgatgcaatgagactgtgaagcggcgtttccccccctctgttcctgacagaaataagtttagcctgctgctaccatatacatggacacagactcagatgtagacactcaagttttgagagctgtgatcctgtttcatttaatcaaaaacaattttgtttttttttccatcttgtcatggcaaatgttacaccagctgcaaaattattacaataattgatctt

SEQ ID NO: 35016 - DNA, 1709 bp, Zea mays subsp. mexicana
  Clone ID: UC-ZMFLTEOSINTE073B01_FLI
tgtgttcttgggcgtacgcggacacagccccgatccgaatcgtcgtcctcgcgagcctcgccgatcccctactcccctcccctcgcttcaagatgcagatctttgtgaagaccctcaccggcaagactatcaccctcgaggtggagtcttctgacaccattgacaatgtcaaggctaagatccaggacaaggagggcatccctcctgaccagcagcggcttatcttcgccggcaagcagcttgaggacggccgcacacttgctgactacaacatccagaaggagtcaacccttcatttggtgctgcgccttaggggaggcatgcagatctttgtcaagaccttgactggcaagacaatcacccttgaggtggagtcttcagacaccattgataatgtcaaggctaagatccaggacaaggagggcatccctcctgaccagcagcggcttatcttcgccggcaagcagcttgaggacggacgcacacttgctgactacaacatccagaaggagtcaaccctccacttggtgctgcgccttaggggaggcatgcagatctttgtcaagaccttgactggcaagacaatcacccttgaggtggagtcctcagacaccattgacaatgtcaaggcaaagatccaggacaaggagggcatcccacctgaccagcaacgtctcatctttgccggcaagcagttggaggatgggaggacccttgctgactacaacatccagaaggagagcaccctccacttggtgctgcgtcttaggggtggtatgcagatctttgtgaaaacccttactggcaagaccatcactcttgaggtggagtcttcagataccattgacaatgtcaaggccaagatccaggacaaggagggcatcccgccggaccagcagcgtcttatctttgccggcaagcagctggaggatggacgcacccttgcggattacaacattcagaaggagagcaccctccacctggtgctgcgcctcaggggaggaatgcagatcttcgtgaagacattgaccggcaagaccatcaccttggaggttgagagctccgacaccattgataatgtgaaggccaagatccaggacaaggagggtatccccccggaccagcagcggctgatcttcgccggcaagcagctggaggatggtcgcaccttggctgactacaacatccagaaggagagcaccctccatctggtgctccgcctgaggggcggtatgcagatctttgtgaagaccttgactggcaagaccataaccctggaggttgagagctctgacaccatcgacaacgtgaaggctaagatccaggacaaggaggggattcccccagaccagcagcgtctgatcttcgccggcaagcagctggaggatggtcgcacccttgcagactacaatatccagaaggagagcaccctccacctggtgctccgtcttcgcggtggttattaagccatcagtcgttgaagctgctgctgtatctgggttatctagtgtctctgccattgcccatggatggtgctgtctttcaaagtatttgtatggtttgtgtcgtgagtcgtgactgagctggtttcatggaccagttgtgttctcgttacccaaaactatcgtgcgaccgcatatggcttaatcatgaataaatgttgtttgaatttaaactattcgctgaatattgttgttttttgtcatgtc

SEQ ID NO: 35017 - DNA, 1580 bp, Zea mays subsp. mexicana
  Clone ID: UC-ZMFLTEOSINTE073H07_FLI
tctgccgtctacgcctccaatttggcctctctcccttgcaagtttaagcttcaccttcaaccatgggtaaggagaagtcccacatcaacattgtggtcattggccacgtcgactctggcaagtcgaccaccaccggccacctgatctacaagcttggaggcattgacaagcgtgtaatagagaggtttgagaaggaggctgctgagatgaacaagcggtccttcaagtatgcttgggtgctcgacaagctcaaggctgagcgtgagaggggtatcaccattgatattgctctgtggaagtttgagaccaccaagtattactgcaccgtcattgatgcccctggacaccgtgacttcatcaagaacatgatcactggtacctcccaggctgactgtgctgtccttatcattgactccaccactggtggttttgaggctggtatctccaaggatggccagacccgtgagcatgctctccttgcgttcactcttggagtgaagcagatgatttgctgctgcaacaagatggatgcaacgactcccaaatactccaaggcgcgttatgatgagattgtgaaggaagtctcatcctacctcaagaaagttgggtacaaccctgataagattgcctttgtccccatctctggttttgagggcgacaacatgattgagaggtccaccaaccttgactggtacaaaggcccgaccctgcttgaggctcttgaccagatcaccgagcccaagagaccttcggacaagcccctgcgtctccccctgcaggatgtgtacaagattggtggtattggaactgtaccggttggtcgtgtggagactggtgtcatcaagcctggtatggttgtcaccttcggtccaactggcctgactactgaggtgaagtctgttgagatgcaccacgaggctcttcaggaggcccttcctggtgacaatgttggcttcaacgtgaagaacgttgctgtgaaggatctcaagcgtggttttgtggcctcaaactccaaggatgaccctgccaaggaggctgccagcttcacgtcccaggtcatcatcatgaaccaccctggccagatcggtaacggctatgccccagtgctggactgccatacctcccatattgctgtcaagtttgctgagctgattaccaagatcgacaggcgttctggcaaggagcttgagaaagagcccaagttcttgaagaacggcgatgctggtatggtgaagatgattcccaccaagcccatggtggtggagacattctcgcagtatcctccccttggtaggtttgctgtccgcgacatgaggcagacagttgctgttggagtcatcaagagtgtggagaagaaggacccgaccggcgccaaggttaccaaggcagctgccaaaaagaaatgatgcaacctgtcgttaatcctgtatctgcttttgcaatacctgacttgtcactccatcccgaagttttgtatgcggttgttactgttattgtgtactgttaagctctgctgcggcgtgccctgttgtttgggtagcgtcaacgtcgagcgccacttgcggctagttcagatcgcg

SEQ ID NO: 35018 - DNA, 988 bp, Zea mays subsp. mexicana
  Clone ID: UC-ZMFLTEOSINTE080C05_FLI
cttctctccttttgctcggaacgcacacaccgcccgtccccgatctccgatcccctcgtcgatccaaagatgcagatcttcgtcaagactctcactggaaagactatcaccctcgaggtggagtcctctgacaccattgacaacgtcaaggccaagatccaggacaaggaaggcattcccccggaccagcagcggctcatcttcgctggcaagcagctcgaggacgggcgcacacttgccgactacaacatccagaaggagagcaccctccaccttgttctccgccccaggggaggcatgcagatcttcgtcaagaccctcactggaaagactatcaccctcgaggtggagtcttctgacaccatcgacaacgtcaaggccaagatccaggacaaggagggcatccctccggaccagcagcggctcatttttgctggcaagcagctcgaggacgggcgcacgctggccgactacaacattcagaaggagagcaccctccacttggtgttgcgtctcaggggcggcatgcagatcttcgtgaagactctgactggcaagactatcacccttgaggtcgagtcttctgataccattgacaatgtcaaggccaagatccaggacaaggagggcatccctccggaccagcagcggctcatttttgccggcaagcagctcgaggacgggcgcacgcttgccgactacaacatccagaaggagagcactctccacctggtgctccgcctccgcggtggtcagtaagccatggttcatttaagctgctgctgtacctgggtatctgcgtcgtctggtgccctctggtgtacctctatatggatgtcgtcgtctaataaacatctgtggtttgtgtgtcatgaatcgtggttgtggcttcgttggtttaatggacctgttgtgtcctctgtgttgtacccaaaactcttctgcagcagtatggcttgaatccttatgaagtttgatatttgaactt

SEQ ID NO: 35019 - DNA, 1900 bp, Zea mays subsp. mexicana
  Clone ID: UC-ZMFLTEOSINTE080C06_FLI
ctctccttttgctcggaacgcacacacagcccggtccccgatctccgattccctcgtcgatccaaagatgcagatcttcgtcaagaccctcactggaaagactatcaccctcgaggtggagtcttctgacaccattgacaacgtcaaggccaagatccaggacaaggagggcattcccccggaccagcagcggctcatcttcgctggcaagcagctcgaggacgggcgcacacttgccgactacaacatccagaaggagagcaccctccaccttgttctccgcctcaggggaggcatgcagatcttcgtcaagaccctcactggaaagactatcaccctcgaggtggagtcttctgacaccatcgacaacgtcaaggccaagatccaggacaaggagggcatccctccggaccagcagcggctcatttttgctggcaagcagctcgaggacgggcgcacgctggccgactacaacattcagaaggagagcaccctccacttggtgttgcgtctcaggggcggcatgcagatatttgtgaagactctgactggcaagactatcacccttgaggtcgagtcttctgataccatcgacaatgtcaaggccaagatccaggacaaggagggcatccctccggaccagcagcggctcatttttgccggcaagcagctcgaggacgggcgcacgctggccgactacaacattcagaaggagagcaccctccacttggtgctgcgtctcaggggtggcatgcagatcttcgtgaagacacttactggcaagacgatcacccttgaggtggagtcctcggacaccatcgacaatgtcaaggctaagatccaggacaaggaaggcattccaccagaccagcagcggctcatctttgctggcaagcagctggaggatggccgtacccttgcggattacaacatccagaaggagagcaccctccacttggtgctgcgtctcaggggcggcatgcagatcttcgtgaagacacttactggcaagacaatcacccttgaggtggagtcctcggacaccattgacaacgtcaaggccaagatccaggacaaggagggcatcccaccggaccaacagcgcctgatcttcgccggcaagcagctggaggatggtcgcactcttgcggattacaacatccagaaggagagcaccctccacctggtgctccgcctcaggggtggcatgcagatctttgtgaagacattgactggcaagaccatcaccttggaggtggagtcgtctgacacaatcgataatgtcaaagccaagatccaggacaaggagggcattccaccggaccagcagcgcctgatctttgctggcaagcagctggaggatggccgtaccctcgccgactacaacatccagaaggagagcaccctccacctggtgctccgcttgcgaggtggtatgcagatctttgtgaagaccttgactggcaagaccataaccctggaggttgagagctccgacaccatcgacaacgtgaaggcgaagatccaggacaaagagggcatccccccagaccagcagcgtctgatcttcgctggcaagcagctggaggatggccgcaccctagcagactacaacatccagaaggagagcactctccacctggtgctccgcctccgtggtggtcagtaagccatgggccatttaagctgctgctgtacctgggtatctgcgtcgtctggtgccctctggtgtacctctatatggatgtcgtcgtctaataaacatctgtggtttgtgtgtcatgaatcgtggttgtggcttcgttggtttaatggacctgttgtgtcctctgtgtgttgtacccagaactcttctgcagcagtatggcttgaatccttatgaagtttgatgtttgaactt

SEQ ID NO: 35020 - DNA, 1677 bp, Zea mays subsp. mexicana
  Clone ID: UC-ZMFLTEOSINTE098F09_FLI
gctccgctgggccaccagctttgaccgccgcctcccttcccctccgctactgctcctccccaccccactcccccgcaggagcggcggcggcggcggcggcggcgaggtcgtaccccacatcggcgagcggcggcggcactgccggaggcaaaggcaagatgttcgggcgcgcgccgaagaagagcgacaacaccaagtactacgagatcctcggggtgcccaagtcggcgtcccaggacgatctcaagaaggcctaccgcaaggctgctatcaagaaccaccccgacaagggcggtgaccccgagaagttcaaggagctcgcacaagcctatgaggttttgagtgatccagagaaacgtgagatttatgatcagtatggtgaagatgcccttaaggaaggaatgggcggtggaggatcccatgttgatccatttgacatcttctcatcattttttggaccctcttttggaggaggtggtggaagcagcaggggaagaaggcaaaggaggggagaagatgtagtccacccacttaaagtttctctggaagatctttacaatggcacctcaaagaagctctctctttcgcgcaatgtcatctgctccaagtgcaagggcaagggctcgaagtctggtgcctcaatgaggtgccctggttgccagggctcaggcatgaaagtcactattcgtcagctgggcccttccatgatacagcagatgcagcaaccttgcaatgagtgcaaggggactggagagagcatcaatgagaaggaccgctgcccagggtgcaagggtgagaaggtcattcaagagaagaaggttcttgaggttcatgttgagaaggggatgcaacacaaccagaagatcaccttccctggtgaagctgatgaagcgcctgatactgtcactggagacattgtattcgtcctccagcagaaggatcactccaaattcaaaagaaagggtgaagatctcttctatgagcacaccttgtctctgaccgaagcactttgtgggttccaatttgttcttacacatctggacaacaggcagcttctcatcaaatcagaccctggtgaagttgttaaacctgaccaattcaaggcgattaacgatgaggggatgccaatttaccagaggcctttcatgaaggggaagctgtacatccatttcacggtggagttccctgactcgctggcaccagagcagtgcaaggctctcgagacagtacttccaccaaggccttcatccaagctgacagacatggagatagatgaatgcgaggagacgactatgcatgatgtgaacaacatcgaggaagagatgcgcaggaagcaagctcacgctgcccaggaggcgtacgaggaggacgacgagatgccgggcggagcccagagagtgcagtgcgcgcaacagtaagcagactatcatcaaggcaattgggaggggtgcccttaaagcgtgggagtgagctctggttttgctgtcgccgagctgggaaataggaagctgaatcgacctcgtaagcggggaatgtatccttttttgctgcaacataaaaaatgctacccaggcatagctgggtaccttttaacttctgtttgtgggatttgctagagtgatggtttcgatatatagggagacttgaatgtctgtggaatgctacggtataacgcac

SEQ ID NO: 35021 - DNA, 1651 bp, Zea mays subsp. mexicana
  Clone ID: UC-ZMFLTEOSINTE098F12_FLI
gagataggcgtcttcgtactcgcctacctccgcggctcaaacctttcccccttctcccaattccttccgccggccgccgctccacccgtacgacgacaccatgagggagtgcatttcgatccacatcggccaggccggtatccaggtcggaaacgcgtgctgggagctgtactgccttgagcatggcattcaggctgacggtcagatgcccggtgacaagaccattgggggaggtgatgatgctttcaacaccttcttcagtgagactggtgctgggaagcacgtgccccgtgctgtttttgttgaccttgaacccactgtcatcgatgaggtgagaactggcacctaccgccagctcttccaccctgagcagctcatcagtgggaaggaggatgcagccaacaactttgcccgtggtcactacaccattggcaaggagattgttgacctgtgccttgatcgcatcaggaagcttgccgacaactgcactggtctccagggcttcctcgtcttcaacgctgttggtggaggaacgggctctggccttggttccctcctcctagagcgcctgtctgttgactacggcaagaaatccaagcttgggttcactgtgtacccttccccccaagtttctacttcggtagttgagccatacaacagtgtactgtccacccactccctcctcgagcacactgatgtggctatactgctggacaatgaggccatctacgacatctgccgccgatcccttgacattgagcgcccaacctacaccaacctcaacaggcttgtgtcccaggtcatctcatcccttactgcctccctgaggttcgatggtgctctgaacgtggatgttaacgagttccagaccaacctggtaccctacccgaggatccacttcatgctttcttcgtacgctccagtcatctctgctgagaaggcctaccacgagcagctctctgtggctgagatcaccaacagtgccttcgagccatcttccatgatggccaagtgcgacccacgccatggcaagtacatggcctgctgcctcatgtaccgtggtgatgtggtccccaaggatgtgaatgctgctgtggccaccatcaagaccaaacgcaccatccagttcgtggattggtgcccgactggcttcaagtgcggcatcaactaccagcctcctagcgttgtgcctggtggcgacctggccaaggtgcagcgtgccgtgtgcatgatctccaactccaccagtgttgtggaggtgttctcccgcatcgaccacaagttcgacctcatgtacgccaagcgtgccttcgtgcactggtacgtcggtgagggtatggaggaaggtgagttctctgaggcccgtgaggacctggcggcgctcgagaaggactacgaggaggtcggtgctgagttcgatgagggcgaggatggcgacgagggtgacgagtactagagaagtttgctgatgacgcagcatcaggccagtgtgctgcccttatcccgtgatctgccgagagttgctcctgctatcgtgttatgtgtgtctgttctgaagtattgtgtggtttacaacacctgatgttgtaagagttgttaattcccctgcattgctaccgggttattgagaataattatggctgtttacgtt

SEQ ID NO: 35022 - DNA, 1234 bp, Zea mays subsp. mexicana
  Clone ID: UC-ZMFLTEOSINTE108A01_FLI
gtcatattgataaacggagacgattggaagcggcaccgcaaagtggtcctccctgcgttcaaccatgagacgatcaagagcatgtcggcggtgacggcagaggtaacggagcagatgatgcagcaatggcgcggccagatacacggaagcgaagaggaatccgccgagatagacatgatccacgccttcaacgacctgacctccaaggtcaatggccgcgtcgccttcggcacgagccaccgggaagtcgaggaggtcattgtactgatgcgggagatgcagaagctcgccactgcggccacgctcgatgctccaatactctggtatctgccaactcggcgtaacctgcacgtccggcgtctgaacaaacagctgagaagcaagatcatgtccatcatgcaggcgcggctggccgccgacggagctgataggcgtggtgggcgcggcggcgccgtttccggcggaggcgacctacttgggctgttgctagaggcgtggacgccgcagccgcagcacgggaacggcggcgagacgctgacaaccgacgaggtgatcgacgagtgcaagaccttcttcgccgcggggcaggaaaccacagctacgctcctggtctgggccatgttcctgctcgccgtgcacccggaatggcaggacaaagtcagggaggaggtcgtcagggaattctgcaccagcgacgacggcgaggttccccatgccgatgtcctcgccaagctcaagctgctatacatggtgttgctggagacgtcgcggctctacccgccgatcgtgtacatacagcggagggctgcctggacgccgtccttggaggcatcaaggtgccccagggcaccgtcatctccatccccattgccatgctgcaccgggacaagcaggtctggggccccgacgccgatgagttcaacccgatgaggttcgagcatggcctcacaaaggccgccaaggatcccaaggcgctgctgtctttctccctgggcccaagagtgtgcactggccagagcttcggcatcgtagaagtgcaggtcgtcatggcgatgatcctcaggaggttctccttctccctctccccaaagtatgttcacaagcccaagtatctcctgtccttgacacccaagcttgggatgcctctcatcgtcaggaatgtggatggctgagagggataatattgtaaaagctcgttttgtgtgtgaaaatgaatacatgactagtgtgtgac

SEQ ID NO: 35023 - DNA, 2132 bp, Zea mays subsp. mexicana
  Clone ID: UC-ZMFLTEOSINTE39C11_FLI
cgagcgctcagcgtctcgtctcgtctcctcctcccacaaaaagccgctgaattgctccgtcggcgtcatgtgtggcatcttagccgtgctcggatgctccgactgctcccaggccaggagggctcgcatcctcgcctgctccagaaggctgaagcacaggggccccgactggtcgggcctctaccagcacgagggcaacttcctggcgcagcagcggctcgccatcgtctccccgctgtccggcgaccagccgctgttcaacgaggaccgtaccgtcgtcgtggtggccaatggagagatctacaaccacaagaacgtccggaagcagttcaccggcgcgcacagcttcagcaccggaagtgactgcgaggtcatcatccccctgtacgagaagtacggcgagaacttcgtggacatgctggacggagtcttcgcgttcgtgctctacgacacgcgagacaggacctacgtggcggcacgcgacgccatcggcgtcaacccgctctacatcggctggggcagcgacggttccgtctggatgtcgtccgagatgaaggcgctgaacgaggactgcgtgcgcttcgagatcttcccgccgggccacctctactccagcgccgccggcgccgggttccgccggtggtacaccccgcactggttccaggagcaggtgccccggacgccgtaccagccgctcgtccttagagaggccttcgagaaggcggttatcaagaggctcatgaccgacgtcccgttcggggtcctcctctccggcggcctcgactcctccctcgtcgcctccgtcaccaagcgccacctcgtcaagaccgacgccgccgaaaagttcggcacagagctccactcctttgtcgtcggcctcgagggctcccctgacctgaaggccgcacgagaggtcgctgactacctcggaaccacccatcacgagttccatttcaccgtacaggacggcatcgacgcgatcgaggaggtgatctaccacgacgagacgtacgacgtgacgacgatccgggccagcacgcccatgttcctgatggctcgcaagatcaagtcgctgggcgtgaagatggtgctgtccggggagggctccgacgagctcctgggcggctacctctacttccacttcgcccccaacagggaggagctccacagggagacctgccgcaaggtgaaggccctgcaccagtacgactgcctgcgcgccaacaaggcgacgtcggcgtggggcctggaggtccgcgtgccgttcctcgacaaggagttcgtcgacgtcgcgatgggcatggaccccgaatggaaaatgtacgacaagaacctgggtcgcatcgagaagtgggtcctgaggaaggcgttcgacgacgaggagcacccttacctgcccgagcatattctgtacaggcagaaagaacagttcagtgacggagtgggctacaactggatcgatggactcaaagccttcaccgaacagcaggtgacggatgagatgatgaacagcgccgcccagatgttcccgtacaacacgcccgtgaacaaggaggcctactactaccggatgatattcgagaggctcttccctcaggactcggcgagggagacggtgccgtggggcccgagcatcgcctgcagcacgcccgcggccatcgagtgggtggagcagtggaaggcctccaacgacccctccggccgcttcatctcctcccacgactccgccgccaccgaccgcaccggagacaagctggcggtggtcaacggcgacgggcacggcgcggcgaacggtacggtcaacggcaacgacgtcgctgtcgcgatcgcggtgtaatagtaatgaactggaggatagggacgaacgaacgactggtaggtgtggcgtgccgcgcgtgcccaccggccggccatatatatcgatcccggcccggcgcggcagcacgtgctatcatctctgaatgtagtgcctcgatcgtatctgtacgtctttaggaaaaggtgtgtccgtgtgtattgtatgtgtgtgagcaagcgtgcgtgacgcgctctgcctgtgtgacaaagcagagcagtacaagctcaggcattttctgtccgagcgatgatttgaactggatctatcatctctg

SEQ ID NO: 35024 - DNA, 1217 bp, Zea mays subsp. mexicana
  Clone ID: UC-ZMFLTEOSINTE41G09_FLI
caaccatggaggtgtggtggaagggtgcccttgatggaattggtggccattgttccaatgtttgtggaggactttggtgaagggcgcccttggtgtaatcttattgactgttgtagatgatgaagttgcaagttaatgtatttgagtacttcgactcacgtcagcttattgtttgtggcaaccatttccgcagaattcgagaagtggagttgaagcgcgactatgcattcattgaattcagtgacccccgtgatgctgatgatgcacagtacaacctagatggcagggaagtcgatggaagccgcattattgttgaatttgctaaaggggttcctcgtggttctggtggttcacgtgattacaacggaagaggacctccaccaggaacaggccgttgttttaactgtggagttgatggtcactgggcaagagactgtcaggctggtgactggaagaacaaatgctaccgttgtggcgaaaggggccatatagaaagaaattgccagaacagtccaaggaacctcaggcgtgagagaagctattcacggtctccatccccacgccgaggacggggccgcagccggagctacagcagaagccggagctatagccgatccagatccccgtctggatctcctaggggtgaacgccgagaccgtgatgagaggagatcaaggagtcttagctacagcaggagcgcaagccctaggcgttctgtgtcacctgcaaaggaaaaggagcgcagccgcacacctgatggcagtaggagccccagcccaagggacaaggtgagcccaccaccaaaggataatggtgcacacaatggctcggaccgtgaagacagccctgggggcagggagatgagcaagaggagtcggagcccgtctgatggctaccgtagccctgtgggcaatgggcgcagcccgagcccgagggatgaccgtagcccaagcccaaaggtcaacaatggtgacgacccaagccccaagggcaacaatggtgacgacgagcaccgcggttcaccaagaggaagtcagtccccctgaactgaaaaactccccgtgcaatttggggagcagtgtgcctgatttgagaaaacaaactgtattttgccatttctcagacttgtgatctttttgagcaagaaaactcggtgtaagaatttgttgccctcgggtgtaagacagatttgtggtatttgagcttttcatcctgcc

SEQ ID NO: 35025 - DNA, 1469 bp, Zea mays subsp. mexicana
  Clone ID: UC-ZMFLTEOSINTE011A01_FLI
aggtcgcggccgatcccaccacgcgtggctacctcgaccagccggacttcgtgcagatgctgcgggaggtgcagcgaaaccccggcagactgaacagctacctttctgaccaacgaatggttcaggtgctcaccctcatgctgaacatcaagttccagaaccagagcagtggggcgcctgacccggcagcagcacaatcgaacccgccgccaccaaagcagcagccagaggcgaaggcaagagaaccagagccggacccggagcccgagcctatggaggtgacagaggaggataaggagcagaaggagaggaaagcgtcggcgcagaaggagaaggaagcgggcaacgccgcttacaaaaggaaggattttgataccgcgatccagcactacacagaagccatggagctcgatgacgaggatatctcctacatcaccaatcgtgctgctgtttaccttgagatgggaaagtatgatgaatgcattaaggactgtgataaggctgtcgagagaggaagggaactgcatgctgatttcaagatgatctcaagggcacttaccagaaaaggaactgctcttgccaaacttgctaaatcatcgcaagactatgatgctgccattgagattttccagaaggcgttaactgagcaccggaacccagatacactgaaaaaactaaatgatgcagaacgagcaaagaaggagctggagcaacaagagtactatgacccaagaattgctgacgaggagcgagaaaaaggtaatgagttctttaagcagcagaaatatccagaagcggtgaaacattacaccgaagctctcaggagaaaccccaaggaccccagggtatacagcaatagggctgcttgttacaccaagctaggggcccttcctgaaggtctgaaagatgctgataagtgcattgagctagatcccacattctccaagggatacacaaggaaaggtgctatccagtttttcatgaaagaatatgacaaagcgctggaaacttatcaagctggcctaaagcatgacccgaaaaaccaggagttacttgatggtgtaaggaggtgtgttgaacagatcaacaaggcgagcagaggcgaactcagtggggaggaactgaaagagagacagaacaaagccatgcaagaccctgagatccagaacatcctgactgatccgatcatgcagcagcttgccatgcaggttttgacggatctgcaggagaaccctcgggctgcgcaggcgcacctcaagaaccccggagtgatgcagaagatccagaagctcgtcagcgcagggatagttcagatgaagtagacggtggctggaatgtccgggttcagatctgggacctgtgctggaaatgctgtgaacttgatcattgtttcgcattttggaaactgaacccttttgtgcgaccatagtttgatcatggctgttaatgatccatatatgggttttccc

SEQ ID NO: 35026 - DNA, 614 bp, Zea mays subsp. mexicana
  Clone ID: UC-ZMFLTEOSINTE011A05_FLI
cgtcgatgcatcccttgctggtgccatcattgggaagggtggtaccaacacaaagcatatatcccgagtgactggggccaagttagccatccgggacaacgaggctgatcccaaccataaaaacatcgagctcgagggaacatttgaccagatcaagcacgctagcgcaatggtcacagagttgattgtccgcatcagtggtaagccgcctccacaagccaagaacaacccaggtagggggcctggttctcatgcggggggtcctggaagcaacttcaaaaccaaattgtgcgagaacttcaacaaaggctcatgcacctttggagacaggtgccacttcgcccatggcgaaggtgagctgcgcaaacctgctgctgcttgacaggcatgcttattgtggcctgtggtgattaatctgcctgtatggctgaataacaccataaccaaggacagtcgcgccatggtgaagtgtgctgagccacatgctgcctgagagagagcatttccctgtggctcgtatttgatcttaatgctgtaacaaactctcctcgatggagattaagcaatggccgtttatttaggatttgtaggattgccgtattggtcaccctttt

SEQ ID NO: 35027 - DNA, 878 bp, Zea mays subsp. mexicana
  Clone ID: UC-ZMFLTEOSINTE011A08_FLI
ctggaaatacaggacaccctgaagtcaccgccggccgagaacaagacgatgaagagggcgtcgatgatctcgatcatcgtcacgacattcttctacctctgctgcggctgcttgggctacgccgccttcggcagcgacgcgccgggcaacctccttaccggcttcggcttgtacggtccgtactggctcatcgacttcgccaacgcgtgcatcatcctccacctgctgggcgggtaccaggtgtacagccagccgatattccagttcgcggagcggctcttggcggagcggttcccggacagcgggttcgtgaacggcggctcctacaccgtccggttcgcgtgcctgcgggcgtgccgggtgaacccgctgcgcgtgtgcctccggacgctgtacgtggcgtccacgacggcggtggccgtggcgttaccctacttcaacgaggtgctggcgctgcttggcgcgctcagcttctggccgctggccatctacttccccgtggagatgtacttcatccagcggaacgtgcgccggtggtccgcccgctgggtcgtcctgcagaccttcagcgtcgtctgcctgctcgtcagcgccttcgcgctcgtcggctccatcgaggggctaatcagcaagaagctaggctaggctagtccgatccagtggaacaccctatctgcaggtctgtcagagagtggcagcgggctcggttattttcacagtgttgccttcctcctgcatcgggttgtaagttgtaacatatatgtcgtactagtatagtgcccgtgcgttgctacggcatgtcaattatttgataaaatgttagttcacaacgattacaatgttttgtgacaatatgttagggtgaaaacagacaattt

SEQ ID NO: 35028 - DNA, 1389 bp, Zea mays subsp. mexicana
  Clone ID: UC-ZMFLTEOSINTE011D09_FLI
caagcaaggaatcccccgatggctcatcgcgttctcctcctcctctctctcgcggctgccgccacggtagccgccgccgtcgacgcggaggacccgctgatccggcaggtggttcccggtggagatgacaacgatctggagctgaacgcggagtcccacttcctgagcttcgtgcagcggttcggcaagtcctacaaggacgccgacgagcacgcgtaccggctatccgttttcaaggccaacctgcgccgcgcgcgccggcaccagctgctggacccgtcggcggagcacggcatcactaagttctccgacctcacgccagcagagttccgccggacctacctcggcctccgcaagtcccggcgcgctctcctcagagaactcggggagtcggcgcacgaggcgcccgtgctccccaccgatggtctccccgacgatttcgactggagggaccacggcgccgtcggccccgtcaagaaccagggttcgtgcgggtcgtgctggtcgttcagcgcgtctggagcgctggagggtgcgcactacctcgcaactggcaagctggaggtgctttcggagcagcagttcgtcgactgtgaccacgagtgtgattcatcggagcctgattcatgtgattcgggttgcaatggtgggctaatgacgacggcattcagttatctccagaaggccggtggccttgagagtgagaaggattacccttacactgggagtgatggcaaatgcaagtttgacaagtccaagattgttgcttcagttcagaacttcagtgttgtgtctgtggacgaggctcaaatttctgctaacctcatcaaacatgggccattggcaatcggcatcaatgctgcctacatgcagacatacatcggaggcgtgtcatgcccatacatctgtggcaggcaccttgaccatggtgttctccttgttggatatggtgcttctggtttcgcccccattcgcctgaaggacaagccttactggatcatcaagaactcgtggggcgagaactggggggagaacggatactacaagatatgcaggggttccaacgttcgcaacaagtgcggcgtcgattccatggtctctaccgtgtccgcagtccacgcctcgaaggagtagactctggtcagcggtgataatcgtgattccatatattgtagaactacaatccctgctagtaatccatttgtgctgtttatgtatcgaaggcagcaaagatgtgtgaagcggcaatgggatgcttgctgtaaggtaatatgtttggcttgctaggcatgctacacgctatttggatgtagcaacgttatcaccagctgtatacgctttttaatcgacaacatttgaataatatgtacataacattatgttgtgctc

SEQ ID NO: 35029 - DNA, 1193 bp, Zea mays subsp. mexicana
  Clone ID: UC-ZMFLTEOSINTE014A06_FLI
ctcggtcccatgtagctagcagctagcactcactagcagcgaagagttaggagtgagaggagacggtaaccccagcggcattcgctgctgggaggtacaccaataatcgagcagcgtgcgtgtgagagagagagacgaaccgagccacagagaagagagaacgcgaagctagtggcaaactgacataacacgcctgctcgacatcaagaaggtggtcggcatccccgagggcgtcaccgacgccgacgacgtggccgccatcgtccgcgccagcagcaaggcatcgtcgtcgtcgtcgcgccacgacggggtgtggaaggagctgctcatcaacccttcccgccccgtgcgccgcatgctcgtggcggggctcggcctcatgttcatccagcaggccacgggcgtggactgcgtggtgatgtacagcccgcgggtgttcgagcgggcgggcatcaagtccaagaccaactcgctgggcgcgtccatggcggtgggcgcgtgcaagaccttcttcatacccatctccactctgctcctggaccgcatcggccgccgcccgctgctgctggccagcggcggcgggatgaccatcttcctcttcacgctggccacgtccctgcacatgatggaccgccgccccgagggggaggccgcggctctgggcgcggtgagcatcgcggccatgctgtcgttcgtggcgtcgttcgcgtccggcctgggccccgtcgcctgggtctactgctccgagatctacccgctgcggctgcgcgcgcaggctgctgccatcggcacggggctcaaccggatcatgagcggcgccaccaccatgtccttcctctcgctctccaacgccatcaccatcgccggcagcttctacctgtacgcgtgcatcgccgccgcaggctgggtgttcatgtacttcttcctgccggagacgatgggcaggagcctagaggacaccgtgaagctcttcggcaaggacgcggacgacgaggacgtcggcgacagccgtcgtgacgcgcccagtaagaagccctccacttccactgagctgagtgctcagcactgagtgatgtgtgccatgcaacacgtgtcctcccgagtgtgaccgaagcttatgtctaaagcttcgatgatacagtctactcctagtatcttgtgtgctcgaactgtggtgaatcttttgtagatcc

SEQ ID NO: 35030 - DNA, 908 bp, Zea mays subsp. mexicana
  Clone ID: UC-ZMFLTEOSINTE014B02_FLI
cgaactgttcttgggccttgttcgctcgggtgcaagcacaaggtcaagaagcttcttcgaaagatcgaaggttgctcttctatggagacttccaaagaacaggcttccaaggactatgctgatttcgagaaaaaagttaagaggacgatatatattgaccacctttctcctcaagtaaaggaatcggccatcaaagctgctcttgcacaatgtgcaaatgttgtccatgtggagtttatcgtcaattacacgatcccatataaagatattgcttctgctgcattggtggaattggatgatgatgtgcaggctaaggctgctgtagaattgatgaatgatttcccgttcataattgggggaatgccaaggcctgtaaaagctatccatgccaaggctgagatgtttcgtgatcgccctccttgccctggccttcgaaaaggtttctgctgggtaaaacaaggagataaggactatgaagcgatgcagaaattgaaaaaccttgcaaagaggcaggaatctgagaacatggccctcatacagaaaatcttgaaagatgagaaggaactggcgactcggcagcaggaggtgcttgatggaaactgcaagaagtacgacatgctggaaactctagtgcagaagggagacatcactaaccttgctcaacaatacggagtgaacttgaacgactgatgagtcattcgtgtcttttccccccttccccttggagcgatggcggaactggtgtgatgatgatggaataggatagcatgccatagttttggtccggtagctggaccctccctctggtgtaaagactatcccaacttaggcttgggcttttcagccttctttggctctccaaaaaatctaaattagctggctctgagcctctgactttctgatcgatc

SEQ ID NO: 35031 - DNA, 734 bp, Zea mays subsp. mexicana
  Clone ID: UC-ZMFLTEOSINTE014C07_FLI
gttctcgtcttgttctttgctacgtacggctctgtgcctagctagcatagcaatgagggcgcttggaacggttgcttgggcatggctgctgctcctgcagcaactcgccggggcctctcatgtcgtctacgagaaccttgaggtggaggcggcgacagcagccgccgtgcggccctccattgtcgaccccctgctgaggaccgggtaccatttccagcctcgcaagaactggatcaatgatcccaacgctccactgtactacaaggggtggtaccatctcttctaccaatacaacccgaagggcgcggtgtggggcaacatcgtgtggggccactcggtgtcgcgagacctgatcaactgggtggccctgcaaccggcgatcgagccgagcatcccgtccgacaggtacgggtgctggtctgggtcggcgacgacgctggccgacggcacgccggcgatcatgtacacgggcgtgaaccggccggacgtgaactaccaggtgcagaacgtggcgtacccgcggaacaggtcggacccgctgctgcgggagtgggtgaagccgtcgcacaaccccatcatcgtgcccgggggcggcatcaacgcgacgcagttccgggacccgaccacggcctggcgcggcgcgggagacggcctctggcgcctgctcatcggcagcgtcaccgaggcgcgccacggcgtggcgtacgtgtaccggagccgcgacttcaggcgct

SEQ ID NO: 35032 - DNA, 1647 bp, Zea mays subsp. mexicana
  Clone ID: UC-ZMFLTEOSINTE015B04_FLI
ccaccatctctttgctcagagcatcacactccctctctctctctcgcgcgcgctcacaagcacgtcgtcaaccatggttgttgagatgaaggagaacggcggagcggcgttggcggcgggcgagaaggcgccgcagctgggcgtgaagcgcggcgagccgacgctggtaccgccggcggaggcgacgccgacgggcgggcagtactacctgtccaacctggaccagaacatcgcggtgatcgtgcagacggtgtactgctacaagccctcctcgccgcccggcggcggcgaaggcaaggacgtggacgtggcagccgcgctccgcgacgcgctggcgcgcgtgctggtgcactaccacccgctggcggggcggctgggcgtcagcccggagatgaagctcaccgtggagctgaccggcgagggcgccgtgttcgtggaggccgacgccgcctgcgacctcgccgccgtcggcgacctcaccaagcccgaccccgccgcgctcggccagctcgtctactccgtccccggcgccaagcacatcctcgagatgcccccaatgaccgcgcaggtgacgaggttcaagtgtgggggcttcgcgctcggcctggccatgaaccactgcatgttcgacggcatcggcgccatggagttcgtcaactcgtgggcggagacggcgcgcggcgtcgccgagctcaccgtgccgccgttcctggaccgaagcgtcctgaaggcgcgcgacccgcccgtgcccaccttcccccaccacgagttcgccgagatccccgacgtctccgacacggcggcgctctacggcgcgcaggagctgctgtaccgctccttctgcttcgacccggaccggctggagcgcgtgcgcggcctggcgctcgccgacggcgccctgggccgctgcaccaccttcgaggcgctgtcggggctggtgtggcgcgcgcgcaccaaggcgctggggctggcgcccgagcagcgcaccaagctgctgttcgccgtggacgggcggcgccggttcgcgccgccgctcccgcggggctacttcggcaacggcatcgtgctcaccaacgcccttgccacggccggcgagctgctgtccgcgcccgtgtcgcgcgcggcggggctggtgcaggacgccgtgcggatggtcaccgacgactacatgcgctcggcggtggactacttcgaggcgacgcgggcccggccgtcgctcgcgtccacgctgctcatcaccacctggtcgcggctcgagttccacggcgccgacttcggctggggcgagcccgtcatgtcgggcccggtcacgctgccggagaaggaagtcatcctgttcctggcgcacgggaaggagaggaagagcatcaacgtgctgctcggcctgccagccaccgcgatggacgccttccaagagctcatggacgagatatgattcattcgtcggtgatgacggacatggatgggttgctgctatacatacatatacgatgccgggtgcttatacattcttcagttgctcggtgttatagtacgaccgtgttaatactcgatctatgttgatgttgttaagtttagtggtcatgagaatttgctgtcgattgcaatggttctaatattaatggaaaatagtaaactttgtttcct

SEQ ID NO: 35033 - DNA, 1082 bp, Zea mays subsp. mexicana
  Clone ID: UC-ZMFLTEOSINTE015H08_FLI
gctaaccaacccccctcccgtgccgttcaccaccacttccttcttcctccccctaaccgccactgcactgcttacccccatatagctaaccgcaactgccatttcaacaacttctcggtcagccttgtcacatttttttgacacatacatacatacatacattcaattttaatttgttgggtaaattaaattgggttcgatcgagtccgacgatggcttctttgatgatcagtctgtcgtcattcgtgatcctatcattctttcaaggtgcggccggcgggatcacgttcacgttcacgaaccggtgcggcggcacggtgtggccggggttgctggccaactccgggagctcgccgctgcagacgacggggttcgagctggggcccggcgagacgcggtcgctgacggcgccgccggggtggtcggggcggttctgggcgcgcacggggtgcgcgttcgacgccgcgtcgggcaagggcgcgtgcgcgacgggggactgcgggtcgggcgaggtggagtgccgcggcaggggcgcgaccccgccggcgacgctggcggagttcacgctgggcggcgggggcaaggactactacgacgtgagcctggtggacggctacaacctgcccatggtggtggaggcggcggcgccgggctgccccgtcacgggctgcctggtggacctcaacgagcggtgcccagtggagctgcgcgccggcggccaggcctgccgcagcgcgtgcgaggcgttcggcacgcccgagtactgctgcagcggccagttcggcaacccggacacgtgccacccctcgccctactcgcagatgtttaaggcggcgtgcccgcgctcctacagctacgcctacgacgacgccacctccaccttcacttgcaccggcaccgactactccatcaccttctgcccgcctcgcgctggcacgtccagcagccagaaggcgaccaagggccccttgccgacgcccagggacgtgcagctcgagggcgactcgtggctggcgagcctggccaccggcgagacggacgccgcgacgtcgacggcggcggcgtcgctgctccaggccgca

SEQ ID NO: 35034 - DNA, 545 bp, Zea mays subsp. mexicana
  Clone ID: UC-ZMFLTEOSINTE019A01_FLI
tgcgcgcgccaagtgaccgaacaagcttgagctctgctgcttcagttgcttgcccctgtgccaaactggcaggaggtaggtagcttatagcagctagagctaagctgtggtgcgtagcggcagctagagctagctagcagtgcacgcgcaggtgcgtgctagctagctcgttagcggtgtagcagcagcacagtagcagtagcctagccggtgataaaaggaatttctttggggacatgtcggcggagagagccccggtcctggtgaggcacggcggcggcggcgtggaggcgctccggcagctcccgccggggttccggttccgccccacggacgaggagctcgtggtgcagtacctccggtgcaaggccatcggcgtgccgctccccgccgccgtcatccccgtcttccgcgacctctacagccgcgacccctgggacgtcgtcgccgtctctgcccctgatacgaggagcgagggggagaaatacttcttcgcggtgcggccggcaagcgacggcaagagcagcggcgctggtactggtagc

SEQ ID NO: 35035 - DNA, 1902 bp, Zea mays subsp. mexicana
  Clone ID: UC-ZMFLTEOSINTE019E07_FLI
ataatataactccacctccatccactctaggtctctagctctactcctctccccgagtcctctcctctccggggtattgaattcgaaccaaaaaatcaaaacaactcagcgattcgattcgcggcgagtcaagcgggatgccgccgcgcacggctccggcggcgacctcaaccccgccgcggaaggtgcccctccggaagctgctgcgtgcggcgtcggtcgcctgcggggtgcagttcggctgggcgctgcagctgtcgttgctgaccccgtacgtgcaggagctgggcatcccgcacgcctttgccagtctcgtctggctgtgcggtccgctgtccggcctcctcgtccagcccctcgtcggccacctctccgaccgcatcggccccgccgcttcgccgctcggacgccgcaggcccttcatcgccgccggcgccgcgtgcatcgccgcagccgtgctcaccgtcggcttctccgctgacctcggccgactcttcggcgacgacgtcaccccgggctcaacgcgcctcggcgccatctgcgtctaccttgtaggattctggctgctcgacgtgggcaacaacggcacgcaggggccctgcagggcgttcctcgccgacctcacagagaatgacccaaggaggactcggatcgctaatgcatacttttcactcttcatggccctgggaaacatacttggatatgccaccggagcatacagtggatggtattcgatatttcctttcactgttacagagtcctgcggcatcagttgtgccaaccttaagtctgcctttcttcttgacattattgttctggtcatcacaacgtacactactgtaacatccgtgcaagaacctcaaacttttggaagtgatgaagcacaaaatccaggtgctgaacaggaagctttcctctgggaactttttgggtcattaagatacttcaccctaccaatttggatggtcttaattgtcactgcccttacttggatggcatggtttccttttaccctctttgatactgattggatgggccgagaaatctatcgaggaagcccagacaacccaggagagacccaaaggtaccatgatggtgtgagaatgggttcttttggtctaatgctcaactctgtcgtccttggattcacctctgttgtgctagaaaagttatgtaggaagtggggagctggacttgtatggggtgtctccaatattctaatgactttgtgcttcttggcaatgcttgtaataacatatgttgcaaagaacatggattatccatccagtggtgcacctccgactggcattgtcgttgcttctttggtggtttttacaattttaggggcacccctggcgatcacatacagtataccatatgcaatggctgctagtcgtgttgaaaatctcggtcttggccaaggcctagcaatgggtattctcaatttagctattgtcataccacaggttattgtgtcacttggcagtggcccatgggatcagctgtttggcggtggaaatgcacccgcttttgcggtggcagccggtgcatctttcatcggtgggctggtggctattctggggcttcctcgggcacgcattgcatcctcgtcctccaggaggagaggcgggacacaccgataagtctgctcatttaccattacaggcatcatcaagtctggaaactctttgtgggttggagaagagcacgctgggagctcttgaatgctgtgtgctctttggtggtttgccccgttgagctattttttgccttgtctccaaatcttttgttgttcaattcaactcgaatgtatgtacgcacgtatgcatgtatgtatttgtatgtatgtggatcatttgtagagagcttaagcaatgaataaaagttacaggagttacgttc

SEQ ID NO: 35036 - DNA, 1584 bp, Zea mays subsp. mexicana
  Clone ID: UC-ZMFLTEOSINTE019H05_FLI
ggttcttcctctcccccactccccacgctgcctgagaggctgagactaggaaggggaaggaaaataatagtttggcgcgcaaatatccgcctccattcgtacgccgctattctcgtctgcgatccgcagcgcgatgatgatcccgtggggcggcgtggggtgctgtctcagcgccgctgcgctgtatctcctcgggaggagcagcggaagtgatgcggaggtgctgaggtcggtggcgagggcgggcagcatgaaggatttagctgctatcttggacactgcaagtaaggtcctaccacttgtagttgccatctctgggagagttggttcagacacaccacttatatgccaacaaagcggcatgagaggtgtaattgttgaagaaacggcagagcaacacttcctgaagcacaatgatgccggatcctggattcaagattcggcagtgatgctttctgttagcaaagaggttccatggtatctggatgatggaactggacgtgtttatgtggtcggtgctcgttctgcagctggtttaattttaactgttgccagtgaggtttttgaggaatcagggaggacacttgtacgtggaactctagattatttacaagggttgaagatgctgggagtaaagcgagctgaaagggttcttccaactggaacctcattgacagttgttggtgaggtattatttctattatccattggccattaaagatgatgttggaactattcgaattcagcgaccgcacaaaggacccttttatgcatcatcaaagagcattgatcaacttattgtgaatcttgggaaatgggccaagttataccgaattgcttccatgggttttgcaacatttggtgtcttccttcttgcaaagcgtgcactacagcattttctagaaagaagacggcggcatgaactgcaaaaaagggttcttaatgcagcagcacaaaggcaagctagagaagctgaagggagcaaaggtacatcagacgcagagcctaacagtaaaaaagatcaattagtgttggacatatgtgtcatatgccttgagcaagagtacaatgctgtttttgtgccgtgtggtcacatgtgttgctgtgtggcatgctcttcacatttgacgaactgcccactttgccggagaagaattgaccaagctgtcagaaccttccgccattgatggtgatatatgatgcaaaaaactggcatggtaccaccacatgtactgcttctgaaaccaatttattcttggaacttggaagtgctggctgctatcaaccaacgacatgaactgcaatactggggcgaagcagcttcaatgagtttgctttttgaactgaacagtgagtgatgcaagttgcaagctcataattgacagttgagatactctcactccctacatagtgccaatgggtgctcttgcctgtaatgtactacaactctgtacaggacgctcttgtgtaagtgcacatagattagcagcttgcttattgacaacatcgatgccggtaatatgtactgttgcccatcgggcatttgtgcaaaggaataacaaaatcagctcgtttagttgtgat

SEQ ID NO: 35037 - DNA, 1497 bp, Zea mays subsp. mexicana
  Clone ID: UC-ZMFLTEOSINTE026D07_FLI
ttcagctgaggtagcggcgcctcacccatcccccccgctacatacacatatctccttcttcgaagtgctcggccctttgggagcgagcaggagcccgagcaggaccaggaccaggaagatcattatcaggagaagctaggggatatggcgaacgctggcggcggggcggccggggaaggggagtggctcaaggtcgcccagctcagggccctcgtccaggaggaccaccgcgccaaggaggtggacaacctgacgctgcgccggttcctgcgcgcgcgcggccacaacgtggacaaggcggcggccatgctgctcaagttcctcaggtggcgggcggaggcggcgcccggcggcggcaccgtgcgggaggagcaggtgcgcggggagctggagcaggacaagatctacatgggcggcgtcgacaggaccggccgccccatcatcgtcggcttgctggctaagcactactccgccaaccgcgacatggcggagttcaagagtacgtcgacgacgtggcctcttctttcttcatcaatcaaaatgcatgtgtacgtacgtgcggaggttttctttctttcttggccgttgagcgcgcgcgtgtgtgtgcggtgtgccctctctcttgttcttgtgcaggttttgtggtctacttcttcgacaagatctgtgccaggtaaacgtaaatattaaacgcagtggccggccggtttatcttcttctgtgcctagcaatggagatttactgctgttcatcatcaacatgtaaaatagaaagaaagaaagaagatagagagagagagagagacgattaatttaactgaacctcatgcatgcatgcaggatccccagaggccaggagaagttcctcgccatcatggatctcaagggctggggcttcgcaaactgcgacgtccgggcctacatcgcggccattgagatcatgcagaactactacccggagaggctgggcaaggcgctgatgatcaacgtgccctacatcttcctcaaggtgtggaagacgatgatctaccccttcatcgacgccaacaccagggacaagttcgtgttcgtggatgacaagagcctgcgggagacgctgcggcgggagatcgacgagacccagctcccggagttccttggcgggaagatgcctctcgtctccctcaaggactacgcccagcagcctcagcccgtttgcgagtgagtctgtcgtagcgatggtggccggccggtgccgtgagcgagccaaagccgaaagctgattcgatcatgactaagctaatacagcctacaagatcagggaggaagagaggccctattggtggaattaggcccactagtttgtggcacaattcaataaggaagtcgtgttgagatggtatgacatgagtatttaatctcatattgtccatctagatagaagagaaccaacgtatattggtagtgttccgtacttttcacatgagacaaataaagtgatacggaggctaccacacgc

SEQ ID NO: 35038 - DNA, 764 bp, Zea mays subsp. mexicana
  Clone ID: UC-ZMFLTEOSINTE026E08_FLI
gaggaataacaccaaatggaggcccctctcttgtcctgcgagagcgaggtcgctgacaaggggttctggacgaagctgaaagacgctatccaccatttcatcaaggagctgatggcaccgcccaccatatccgtggtatgtttaggtatctcgcttctcacttcgctgtggcacgtagttggaattggaaggaccaactctgatgttgatgccacatcttggatgagataattgggttcgttgttggcctggtcccatggctgaaatccctaatcgttggcgacggagctcctttcaaagttatactggattccctctagctgatgggcgacgacacgatcccttgcatcacccttatcctaggcggaaacctgactcaagggctttgaaagtcggggctaaagcgtgcggtgatcgtcgcgatcctgtgtgtccgcttcgtgctcctcccgctgatcggcatcgccgttgtccgcgccgcgtacgggctcggcttcctgtcccgtgacccgctgtaccgctacgtgttgatggtgcagttcgccgtgcctcccgcgatgaatatcggtcctttaaggtgacaccaatggagaattccttatggctatgcaacaacaacttgtccatgaaatttgtgaagtatggacaacttcagttgagaatctactttatatgaaggaagaccttatcatccctgatggatgtgtgcattctcttgtaatctacgaagttctgttaaagttagtcgaaccattttctgattc

SEQ ID NO: 35039 - DNA, 1350 bp, Zea mays subsp. mexicana
  Clone ID: UC-ZMFLTEOSINTE032D03_FLI
tcgccgaccagaagtactgcgagcgacacatgaaccggggacgccatcgttcaagaaagcatgtggaaggccagcctggccgtgccgcgaaagccatgtccgcggtggccgtggcggctgcggcggctgctgctgctctggccggcgccggagctaccgctgctgctggcctcgctgtcaaccagcaccggcagccggggaagagctatgccacgggtgcgactgatccatgctctctgcaatatagcaggggactggcgaacaaactgtcgaacgagagcgaaaacatgcaggactctgacaatgtctcgatgctgacttgcatgaacacaggaaacactgcaggcagcgtgtttccgttctcaaaacaaaacactgatcttttcgaagtgagcagctcaaggccagagtttggccttgttccatcggattcactgacgaggtcacctcatagttccttgaagagtgtcaaaaatctgctcagctcacggagtctgagtgagcaccagagctccacctccctgcaacactttgtggactggcccaggacgccacctgcccagggaggtctttcatggcccgaggcagaggacatgcccagagctcagaggtcccagctctcagtatccgctccgatggcatcctccgagctatcatcggcctccacatctcccatccacgaccacgagaagctgattctgtcacctctcaagctgggccgcgagtatagcccatctggcctcgtcagcgttgcaggagcgagcagagacgaggttagccagctagaagcgacctgggcgacgacgttccgcgactcttcgacgggcggcccgttgggggaggttctggccaagaacaacagtaacgcggaagcaagaagttgcccgtcggcggcgccacctctaactgaatactactgctgggattcaggccacgggatggagtcgtcccccgtgggagttctgcagaggacgaccgccttcggatcggtctccagcagcacgggcagcagccctagggtcgagaaccacggcgccagctgcgatggtaccagcaacctgatggatgatctcggctcagttgtagtgagccaccccagcatccgcctcttgtgagcccgctgggttctggccatggaaaaagcgtgaggggggagcatttaccacgtagtttgtcatttgagactgatctgtcacttgagttcttcttttgtttccttttaacctggctttgtaactctcaccttctttggatcgtgaaaagcgctgcgatgtgtggtgtggctggtttttttgtgcgccgttgatgcgtagtaccatcttataaaagtgagactgcacatttggattc

SEQ ID NO: 35040 - DNA, 1639 bp, Zea mays subsp. mexicana
  Clone ID: UC-ZMFLTEOSINTE039A03_FLI
cgcgtggtagacgtcgtcttgccagcgagagcctagctcgatcggtctctctggtacaacgtagggagaaagatcgagggggagaggacgacgacgatggccggcgcgaccgtgaccgtggaggaggtgaggaaggcccagcgcgccaccggccccgccaccgtgctggcgatcggcaccgccacgcccgccaactgcgtgtaccaggccgactacccggactactacttccggatcaccaagagcgagcacctcaccgacctcaaggagaaattcaagaggatgtgcgacaagtcgatgatccggaagcgttacatgcacctgacggaggagttcctggcggagaacccgagcatgtgcgcgtacatggcgccgtcgctggacgcgcggcaggacgtggtggtggtggaggtgccgaagctggggaaggcggcggcgcagaaggcgatcaaggagtgggggcagcccaagtcgcggatcacgcacctggtgttctgcaccacgtccggggtggacatgccgggcgccgactaccagctgaccaaggcgctgggcctgcgcccctccgtgaaccgcctcatgatgtaccagcaggggtgcttcgcgggcggcacggtgctgcgcgtggccaaggacctcgcggagaacaaccgcggcgcgcgggtgctggtggtgtgctccgagatcacggccgtcacgttccgcggcccctccgagtcgcacctcgactcgctcgtgggccaggcgctgttcggcgacggcgcggcggccgtggtcgtgggcgccgacccggacgaccgcgtcgagcgcccgctcttccagctagtctccgccgcccagaccatcctgcccgactcggagggcgccatcgacggccacctccgcgaggtggggctcaccttccacctgctcaaggacgtgcccgggctcatctccaagaacatcggccgcgcgctggacgacgcgttcaagccgctcggcatctccgactggaactccatcttctgggtggcgcaccccggcgggcccgccatcctggaccaggtggaggccaaggtcgggctggacaaggccaggatgcgcgccacccgccacgtcctctccgagtacggcaacatgtccagcgcctgcgtcctcttcatcctcgacgagatgcgcaagcgctccgccgaggacggacaggccaccacgggcgagggcctcgactggggcgtcctcttcggcttcggcccgggactcaccgtcgagaccgtcgtgctccacagcgtccccatcaccaccggagcggccaccgcctgattcatcgattcatcaacgatcaaattcctcccctctccgatccgccagtcgtcgtctcgttcgtcattattttacgtcgtccgtccgcaaataataatgtgctctctgctataattgtcgtgtgtagtaagtagctgatactatttttccatgtactgtcagtcgcacaatcatcatatataatatctctctatatatatgcatttcatgcaagaccagggtagacgagctagcttgaggagaagacccttatcgttgtcactttagcatgcatggggtggtgaggtattgggtatacctgtgtaagacaagcttggctggtttaattatatattttttt

SEQ ID NO: 35041 - DNA, 1154 bp, Zea mays subsp. mexicana
  Clone ID: UC-ZMFLTEOSINTE055A05_FLI
ctccaaccccttccttccttgcttaggagagagagggaggagaggagaggaggaagaagatggagagggcggccccagtgaggagttcccacacctccacggccggcctactcgcgtggcctcaacccgatggcgccgcgtcgcaggcaccacgtcggcctaaccagccgacggaggaattcaggaaggtggtgttcggggggcaggtcaccgaggaggccgacggtctcaacaagacgaagatgaggacgacggcctccgcacccaagtcgaaggagacaacagggatcggcatgtttaaggccgagagcgccgccgccgccgtcacaactgcatcccgtgatcgccaggctagccagatcactttttctcaggacgggaccattcctcccaggaagccaacttcagttgctggggtggcgaggcagcgcgaacttagccataccgttgagagttcgggggacggtaagatgaagcggcaggtgtccaatgcgaaatccaaggagctcagtggtcacaacatctttgctgatcatgaagatccgagtcccaacaggtcaagcagctctgctgctgctctggcacatgtgaaaaatgcaaatgtgagctccttctcctttggaaaggccgacatggacagcacagtgaaaacagcaaagaagaaagggtccagcaacaagtctactgatctgatgaatggcaaggccatctccgagagggattcagcgcctgcagggaaacagcctctgaaccgcgcgaagccgaaaggattgagtggtagtagcatttttgcagacgggaaggcctcgacaactggtgatcatgcaggccgtcggacccggcagccacctggcggcgacagcagcatcttgctgggctagcgtgcacatggatattgtcctatgccgccacacgggtggttggtccgtccgtgtgcggccatgttttcctgatcaggcgatgagtcccatctcagatgatctggttcacttctggcgtgtgtatgggtttgtgtctgtgttggttgtgacatgtccaatggaacaaccctatcgctactgcgtgtggtgccgttttgttgtgtagtagtacaacggatgacatgtggtaccgtttcgttgtgtgtacgtggatatacatatgtgtgtttggtt

SEQ ID NO: 35042 - DNA, 1372 bp, Zea mays subsp. mexicana
  Clone ID: UC-ZMFLTEOSINTE055G02_FLI
gttccgccgccgtccatcgatcctagctagctagctagggcgcgaccgtcgtctcggtggttgttgacaggtcccgtacgtgtgtgctcgccatggctcgtggcgacggcgggcagctggagctgtccgcgggggtccgcggtgctggcggctcggccgcgacggcggaccacgtggccccgatcagcctcgggaggctcatcctcgccggcatggtcgccggcggcgtgcagtacggctgggctctgcagctctccctcctcacgccctacgtgcagactctggggctttcacatgcgctcacttcattcatgtggctctgcggccctattgccggcttagtggtccaaccgctggttggcctgtacagcgacaggtgtacagcgagatgggggagacggaggccgtttatcctgacagggtgcatgctcatctgcgttgccgtcattgttgtcggattctcgtcagacatcggagctgctctaggggacacgaaggaacactgcagcctctaccacggtcctcgttggcacgctgccatcgtgtacgttctggggttttggctccttgacttctccaacaacactgtgcagggtccagcgcgtgctatgatggctgatctgtgcgaccatcatgggccaagtgcggctaactccatcttctgttcttggatggcgctgggaaacatcctaggctactcctctggctccacgaacaattggcacaagtggtttcccttccttaaaacgagcgcctgctgtgaggcctgtgcgaacctgaaaggtgcatttctggtggccgtggtgttcctggttctgtgcctgacggtaaccctgatcttcgccaaggaggtgccgtacagagcgaacgagaacctcccgacgacgaaggcaggcggcgaggtccagactgagcctaccgggccacttgccgtgctcaagggcttcaaggacctgccccccgggatgccgtccgtgctcctcgtgactgccatcacctggctctcgtggttcccgttcatcctctacgacaccgactggatgggccgggagatctaccacggcgaccccaaggggagcaacgcccagatctcggcgttcaacgaaggtgtccgagtcggcgcgttcgggctgctactcaactcggttattctagggttcagctcgttcctgatcgagcccatgtgccggaaggtcgggccgagggtggtgtgggtgacgagcaacttcatggtctgcgtcgccatggcggccaccgcgctgatcagcttctggtcgctcagggactaccacgggtacgtgcaggacgccatcaccgcgaacgccagcatcaaggccgtctgcctcgtcctcttcgccttcctgggcgtccc

SEQ ID NO: 35043 - DNA, 693 bp, Zea mays subsp. mexicana
  Clone ID: UC-ZMFLTEOSINTE056C04_FLI
cgcacacacacaattaggtcacatacacacttcccggctgcctccctaggtagcagcttctacaatggaggcatccaacaagctcgcagtcttgctcctgtggctggtcatggcagctgccactgccgtgcacccttcctactctgagaattcgcctcaagactacctcactccccaaaacagcgcccgtgccgccgtcggtgttggcccggtgacctggagcacgaagctgcagcagttcgcagagaagtacgccgcacagagggccggcgactgccgtctccagcactcgggcgggccctacggggagaacatcttctgggggtccgccggcttcgattggaaggcggtggacgcagtgcgatcgtgggtagacgagaaacagtggtacaactacgccaccaacagctgcgccgccggcaaggtgtgtggccactacacgcaggtggtgtggcgcgccactacaagcatcggctgcgcgcgcgtcgtgtgccgcgacaaccgtggcgtctttatcatctgcaactacgagccccgcggcaacattgccgggatgaagccctactgatatattgtgcctgcgaacgatggcaactgatattatatctagacacgggcttgttgcagcgcatgactttccacgtgatatatgaataatattttataaataaatcaaagaggtttgttatttac

SEQ ID NO: 35044 - DNA, 995 bp, Zea mays subsp. mexicana
  Clone ID: UC-ZMFLTEOSINTE056E12_FLI
ggagcatagaacataagaggagagaccgcactacacacctcacccctgaaggccagatctaagccttctcgtcctcgcccaaggacaacgataaacatctaagaaccaaacaaaacagagcacgagcatcggtctctaagcaaaacgcgcagcacgccgggcgctgcacgcacgtagcagagcgcgcatggggcttctggaccagctgtgggacgacacggtggccgggccgcgcccggactccggcctcggcaagctccgcaagcacgcgtccttctccccctcgtcggccgcgccgtcgccgaccgcggagggcgcggcgccgcccgccgtgacgcggagcatcaccatgctgcggccggcggcgctgtccgtcgccacgtcgccgcgcagcgagtccagctccgcgccgtcgtcgccgtcgcccgcaagcggcgctcccgactcgcccttcggcgcagcgacgacgcccaggggagagggctggaagaagctgcgccggaaaggcaggatggccgacggcgccgacgcccccggcacgccgaggagccccaccgtgtacgactgggtggtgatcagttcgctggaccgctgaagcagccggccgggccaagacgaggaggacacagcacaaggatggaggaaggcagccaccatcagcagcagctagcggactgaaggaggatcggaacagagaggccccccggccatgcgacctgcttaacagagagcttctggtcacggttctgttatactacgcgttaacggtgtatgtatatacgtcatcttcctgtaaatctccgtggtgtgaggtgctgctgattttgaagagagtgatgctcctgttatgtgctactagctagctagtgctgttgctgtatgagtacagtgtagtctactattaagggttgtcgtttggactgttagtctatagagacagaaaaatgtagaagtacgtattaaagccaatcgaatagacatgtttgtcgccatgt

SEQ ID NO: 35045 - DNA, 2053 bp, Zea mays subsp. mexicana
  Clone ID: UC-ZMFLTEOSINTE056G12_FLI
gcactcttgggttcttgcatcccgcataccctcgaaagctcgaaagatcccgcggcgcagcagccacccttctctcctctccgctcccaatcttatcgtcgcctccctcgaagtcgccgctgccttcattccaccatggcgcttcacgccccggtccacgtgatgaaggactcgctgaagcgggagtctggcgcgaaggttcaccaagccaacatccaggcggccaaggctgttgctgacatcattcgcacgacattgggtcccagatccatgctgaaaatgcttctggacgctggtggaggtattgtggttactaatgatggtaattctattttgagggaaatagacatcgcacaccctgctgccaagtctatgattgaactaagtcgtacacaagatgaagaagttggtgatggcactacatctgtcattgttctagctggagagatgctacacgttgcacaggcattcattgacaagaactaccatcctactgttatttgtcgagcatacaccaaagcgcttgatgatgctattgctgtacttgacaaaattgcaatgcctgttgatgtgaatgatcgcggggcaatgctaggcctcgtgaagagctccattggtacaaaattcactggccagtttggtgatcttattgctgaccttgctattgatgctacaacaacagcaggcgttgaccttggtcagggtatgcgtgaagttgatatcaagaaatacattaaagttgaaaaggttcctggtggtcagttagaggattctagagtccttaaaggagttatgatcaataaggatgttgtggctcctggaaaaatgaggagaaagatagttaacccccgtatcatcctgttggactgccctgttgagtataagaaaggagaaaatcagaccaacgctgaattgatgaaggaagaagattggcaggttctcctagagatggaggaagaatatataaagaacctttgcgctcaaattctaaaattcaagcctgatttagttatcacagagaaagggctcagtgatctcgctatccattatttgagcaaggctggtgttactgcaatccgtagacttagaaaaactgacaacaacaggattgctaaagcttgtggggcagttatagtgaacaggcctgaggagctccaagaatctgatgtgggaacaggagctggcctgtttgaggtcaagaagataggtgatgaattctttgcctttattgttgactgtaaagatcccaaggcatgtactgttctgttgaggggagcaagcaaggatgtattgaatgaagttgagagaaacctgcaggatgccatgtctgttgcaagaaacattttgaaaaatccgaaactccttcctggaggtggtgctacagagctgactgtatcagcaacactgaagcaaaagagttcttcagttgaaggcgtggaaaagtggccctatgaagctgctgctctagcatttgaggcaattccaaggactttggcccaaaattgcggtttgaatgttattaggataatgacacaacttcagggaaagcatgctaatggtgaaaatgcgtgggttggcattgatggaaggagtggcgatattgttgatatgaaagagcgaaagatctgggattcctacagcgttaaagcgcagacgttcaagacagcgattgaggctgcttgcatgcttttgagaatagatgacattgtcagcggtatcaagaagaagcaggctcctggagcctcagctcccaagcaaccccaaattgaaactgagggtgatgccgacaatgagcagatgatcccagagtagaggctgtgaccaacctgcactggcaaagttattatttactagtgccggagtagcactttgaatagagttcattttatttgagtgttggtggttagccttaggttttatatatagtttgatacactcgtccgagggttttttttgtagtgtggttgctgcgcattttgctttggactgatggcgaactttgcatgttgtatgccgtaaatctacctaatacatggtaatgctgttgtttccc

SEQ ID NO: 35046 - DNA, 2042 bp, Zea mays subsp. mexicana
  Clone ID: UC-ZMFLTEOSINTE057G08_FLI
gctgtacgagccatgggaagttgtcgatgatgaagggcagccattcaccatgttcgacccgttctggaacaggtgcctcagcatgccgtatgacccccctgcaccgcttctgcccccgaagaggatcaattcaggtgacttatcgatgtgcccatcggaggatctgatctttgaggacgagtcagagaggggaagcaacgctcttctggcccgagcgtggacgccagggtggcagaacgcagacaaggcgctgacggccttcctcaacggcccactggccgactactcagtgaaccgcaagaaggccgatagcgcgagcacgtccctgctgtcgcctcacctgcacttcggcgagcttagcgtgcgcaaggtcttccacctagttcgcatgaagcagctcgtgtggagcaacgagggcaaccacgctgccgaggagagctgcaccctgttcctccgttccatcggcctgcgggagtactcccggtacctgagcttcaatcacccgagcagccatgagaggcccctcctggcgcacctcaggttcttcccctgggtggtggacgagagctacttcaagatttggaggcagggaaggaccgggtacccgctcgtcgacgctggcatgagggagctgtgggcgacggggtggctgcatgaccggatacgtgtggtggtggcaagcttcttcgtcaaggtcctccagcttccatggcgatggggtatgaagtacttttgggacacgttactggatgctgatcttgagagcgatgcgctgggctggcagtacatcactggctctcttcctgatggccgggagcttgaccgcatcgacaacccccagtttgaaggctacaagttcgacccgcatggggagtacgtccggcggtggattcctgagctcgcaaggctgccgacggagtggatacaccatccatgggacgcgcctgtctccgtgctgcaagctgcaggaatcgagctgggctccaactaccctctccccatagtggagctggacgcggccaagggcaggctgcaagcggccctgtcagagatgtggcagctggaggcggcgtcgagggccacgatgaacaacgggacggaggaaggcctcggcgactcctcggaggtcctgttccctcaagagctgcagatggaggtcgaccggcagccagccccagccgaggcagcagccaacgtgcacgtgcacgtgcacgtgccgatgcctgcccggaggcgcggggaccagatggtgcccaccatgacgacctcttcgctgaacagagctggaacagaggtctccgccgatctagtagtagcgaacagcgaggaggaggacaccagggcgcaggttccgttccacgcgcatctccatctccacccccgagccgaagccccgccagctgcgcgtagaaccaacaacggcgctcgccagcacgacgccttccagcagcctcggaaccacaggcgagatgctctgcttgctccgtcggcgtcggaggcttcgagcagctggaccggcagagagggcgccgtggtcccggtctggtcgcctcctgcggcgtcgggccattcggacgccttcgccgccgacgaagctgacgtctctagtaggagctatctgggtaggcatccgcagtcgcaccgcctgatgaactggagccaactatcgcagtcatcgtgagctcggatgcacgcagcagaagattctgtgcggccaaacttaatcgagctgaagattctcgtatgtagattgtccactgaactgctcatccatagtctgatgggatggaaaccaggcggcttttcctggttgtggtggctatagctgtgtaaatctctgtcttctagaacgtgtgtggtcgatatagtgcggttggctttacaacaaaaaaaaaaggtcgctattcttgatcagacgacaaaggttttccgtattttttttagccttttttgggggaggtatgtgatgtatgtaaccgtaactgtacattcccttgtgctgaccatattgttagtttccatgcgtcttgtattgctgttta

SEQ ID NO: 35047 - DNA, 3096 bp, Zea mays subsp. mexicana
  Clone ID: UC-ZMFLTEOSINTE058G05_FLI
ggcctcatttagcatctgatgctaatgcagagtcctggcacagcaacgacattaaaggagctactggttcggaggaaggtgataaatcaccatgtgctatattagatgatgacaacagcaggacacctgatcattctgttaaggatgcacatgcatcgcgagctgcgtgctcgtcatatatgaatgaaaaaggtgtcagtgaaactaaggtgggaacctcattcagcccaatgaatgctcttattgaaatcaagtactctgaagctagtcattcactgcaagctggagatgacacagctatgaatcttcttgctagtgtggcaggagaaatatctaaatctgaattggcttcttcaccaagtacttctgtaaagaaattggtctgtgagggtgtcaatactggaaaggttaaagtagaaagtgacatgggcccatcacatccagggcaagcagatgctaagaaagttgccatggggaatgaagtgaaaaatgatgcttgtttggttccgaaggaggaacaacatcaaactgcgccatctcctgagctagcagattcaaaagcagttaaatcttcagcaaagattgaaatccatgaagggcatgcaaacaaatgcaactcccagcatgcttcaattgattccaaaggcgaaaatcgggatggctgtactgcccatgggaaagttgaagatggcagtacaaacaaggatggtgccatggaatctgcattcggcagccagcgtagcttggttgtttccagtaaaaattcaagattggttcttgctggggaatcttcattgtctgctgctgataaacaaacacagggtctgttaaaatcaactaatcataagcatcttctgagtgtatcggacaacccaggagcctttgatagacatgacagtttggctggaaaattagatttgatggctgcagaggtgaaaaaagctgatgtcgtgggcaatagtagtgtattgcagaatgacactgaaaagaaggaacatgtttctccctcttcggctgatgttccaaaactagtaccagcagcgtccccagttggtgtggcaaatgggaataatgagatgaaagaatcaaacggcagttcaagtgaatccaatagccatgtaaaatctgaaggtgtcaattctcagcaaagcgagcaaagtgcaaagcagagttcaaagaaatccagtgatggtgtgtgcggaaaagaggacggaaaagaagaccatgtcttatcagacgaagaaggttcttctctagccgctcacaccaagtcaaatgctacagccaagcttgattttgacttgaatgaaggaatacctggggatgatgggcatcagtctgagacaactgcctcacctgttgtatgttcctcagcaatccatttaactgggcttttgccattcacttcgcctactacaagtgggttgccgccagctccaataacagtagctgctccagctaaaggaccctttgttcctcctgaaaacctactaagagcaaagccagagatcgggtggaaaggttcagcagctacgagtgcatttcgccctgctgaaccaaggaagattttggaaatgcctgctgccacacgtgacattccagtatctcatgctgctgggaagcagtctcgtcccacgcttggtttcgatttgaatgttgcagatgaccaaactctcgaggaagattttccacagagtttctgcacagactacctgttcagaatctggaaatacgagaagtcgagatggctcgtcacgaagtgctggtattgaacttgatctgaacagagctgatgaagttgcagacaatggccaatttgtaccaaatgcttcacacagagttgaagtcccattgttttcgacgagatcgttacctagagttttatctaatgctggcgcaaatagctcaagggactttgatcttaatagtggacccgacctttatgatgttggcactgaacctgcaccaaggagcctaccttctaaaaatacaagtagtattcaattcctaccacaagttcctgttaggatgaatagtgatgccatgagtaataatatatcaccatggcttgtctctaccagtccttgtggtccagtagctatacagtcttttttaccatctagagaacagccttacccattggaggcagcacctggagcccagcggattattgcgcctacagctgatggtggccaatttggaggtgatccctgcaggcctccagttatttcaacgtctccagcgatggtttttcatccgcctgcatatcagtatgcaggattctctttccctccaagtgttcaccttcaaacaccagcattttcaattggatcagcaacatttaataattctgcatctgcaggagttccatattttccaactctttcctcctctcttgttgggccagccggagcgttgccttcccaacattcaaggcagtatgccgtaaatcttgctgagggtagcagcagtagtgtacgtgacggtaatcggaaatgggaaagtcagggccttgatcttaactcaggccctggaagtatagatttagaaggaaaggatgaacggatgcctttaccagtcagacaaaatttgatcccacccctacatggctttgtggaggatcaaggaagaatttaccaaatgccagttgtaggaacaaagagaaaggaacctgatggcagttgggactcagaaaggtctacatacaagcagttaccatggcaatgagggctctgaaggagatcattttgcaccgactggtctgcgaatgagcatatcacctgcatgtagagcttggccggtgtgttcttcagtcactggactacactcaggggattcagccccatgacgatggcgtgggattgaggaaagcgaaaacttcctgtaattgttgtagattttttcttagctgttaggcttttggttctaatttactcaggagggtatggctgcggtggaggaatctttgtgatcctgagctctgtggccgctgtaattagaccgtccgctctgtttgttggtgataaactgttgagcacatgctggagctttacataagaatttagatgtgaccttgttccttgttggggaagcgtt

SEQ ID NO: 35048 - DNA, 1656 bp, Zea mays subsp. mexicana
  Clone ID: UC-ZMFLTEOSINTE059A07_FLI
cgctactattctactccactctacctaccgccccacgctccagtgctcgcccgccctccagaccgcacgcacgcacggcacgagctcgccgcgatgtcatggttcgctcgctccatcgctgccacactttcatctgcccactctgacgacgatgaatccgagccccactccggcgacaacagcccgccgcgcgcctccgaccccaccagcgccgagaccggtgagtccgatgagcagccggacaccccgagccgcggcgttaagggcgacatctcggagctgaccgagtccctcacccgccggttctggggcgttgcctccttcctcgcgccaccgccaactgaaggagagactgaagaggaggaggaggagacagccgccgccgcggaggtgcctcagtccccacggatcgacgggatccggagtgacctggcggagatcgggggcagggtgaagaccggcatctcgatgctgtcgaacgccggcgcggtggcggagatctccaggttcgcgtcatcgttcctgccattcggtcccggggatcagggggaggaggaagagggcgaggcggtcggtgtgaccgaggaggtagtggtgttcgtcggtaacatctcaaagcatccgaagacatggctcgatttccccttgtttgttgatgaccgacacgcagatgattttgaactatcagatgaacagtatggacatgcagttgctatagagcggcttgtgccaagcctatcatacctcaggactgagctctgctctaccaatatgagtgaagcgtgcttctggaagatatattttgtgcttctccattcgaaactcagcaagcaagatgctgaaattctttcaacaccacaaatcctggaagcaagagaaggactactgcaaagttcaccgacaaagcacaagctgttatcagaaagcaggaatactacagaacctgaagagagtgagttgtcaccggcaagcatccaaaacaagcatggagtatctgaagcgccgtcattccaagaactaacttctgaccctgtgcctaatgttgaggctgacaagcatcctatctcaagtactgaggcagaaatagttgacaagtctgtaattcaagaagagttggtgatgaaaactgaggccaagagtttacccactgaggaatctaaccctgaccctgcggatgatgatgatgaaaaagaagtagatgattggctacaggatgtcgactctgtgcccagcaaaactggcaaccctactgcagttggggaggaggaagatgtatccttcagtgatctagaggatgactgaggggctgttattgtgccaaccagctatcagcatactgttagatggtagcttcatgaagtgaagaacacttgctctgtggctttaccacttcactgcctggttcttccgattgcagtagcagaatcacgtaacaatgtccctcggtgtgtcccaattccatgttgtatctaagcagtaaccgttttctctgtacataaagttccagatgcggttctgcattcatgctatatcgctgtccttacgagctgttttttgaaacacgagattctgaatgtaatatattagaatcatctataagctgtcggatatcatgtatctcttacatgttgatatcttcaaagttccttttttttc

SEQ ID NO: 35049 - DNA, 1435 bp, Zea mays subsp. mexicana
  Clone ID: UC-ZMFLTEOSINTE059G06_FLI
agcaaatccagcgggtccgtactcatctgcttcacctccgggctccggctacggcggcactcttctctggcaaccggtcggaagatgttggatcttccgcttcaaatcgacgcataaaggatgcagattagttttgttcgcgtcaaatttattttgctcggtgtagttctgtccattaattaattatttgtactggatttaaggtgctgctattttgaaggttttttctcccggaaattttcacatcccgaaacgactggaaattgaagtagccatttgatgctgttacctgggttcataagttgttagacttgttgttatttgtttgttaatcctatagctattgcatattgtgtgcctgatcaggaccacagaaacatctaggcgacgaatcgagcaggtagaggagtaatcaggcatccatggctgagcatcttgcgtccatctttggcacggagaaggaccgcgtgaactgccccttctacttcaagatcggcgcatgccgccacggcgaccggtgctcccgcctgcacaacaagccttccatctccccgacgctgctgctctgcaacatgtaccagcggccggacatgatcaccccgggcgtggacgcgcagggcaaccccatcgacccggagcggatccaggaggacttcgaggacttctacgaggacatcttcgtggagctgagcaagcacggcgagatcgagagcctccacgtctgcgacaacctcgcggaccacatgatcgggaacgtgtacgtggagttccgcgaggaggagcaggcggcccgcgccctgcaggcgctgcagggccgctactactcgggccgccccatcatcgccgagttctcgccggtgacggacttccgggaggccacctgccggcagttcgaggagcacagctgcaaccgcggcggatactgcaactttatgcacgtcaagcaggtcggccgggacctgcggcggaagctgtttggccacctgcatcgctccctccggagccacagccggggcagccgcagcccgagcccataccgccgccgcggtagctcgtccaggtccagggaccgcgacgattaccacgactactactaccactaccgtagtggcagtggcagccgcaggagcagcgagaggcaccgcagccacgacagcgacgggagccgccgtcgacgcgggcggtcgaggagccggagccggagcccggtgagggaaggcagcgaggagcggagggcaaagattgagcagtggaaccgcgagcgggaggcagctcaggtgtaagcagagcaggttccccctcccctgtgatgagtggttgctgcattgttattggccttggtagttgccatgttgctgttgctgaagcctgttatcatgtattgatgtgtggctcaggcagggtaaggccataaattgaacctgaaattggactg

SEQ ID NO: 35050 - DNA, 2562 bp, Zea mays subsp. mexicana
  Clone ID: UC-ZMFLTEOSINTE060D03_FLI
cacaccacgtctcctccgcctgcgtctgcgtcccttcctccgcggacgccctcctaaaatccccaaaatccgatccgaccaccaaaccctaaccccatcccgcactccccccctctcccaacacgctcgcgctttcttagccgctaagcatatccctctccgccacgatctcgatggtggagatggctgtggtggagcttaggacgctgccgctcggcttccgattccaccccaccgacgaggagctcgtcacccactacctcaagggcaagatcaccggcaggatcaactccgagtccgaggtcatccccgagatcgacgtctgcaagtgcgagccgtgggacctcccagataagtccctgatccggtccgacgatcctgagtggttcttcttcgcccccaaggaccgcaagtaccccaacggtagcaggtcgaacagggccaccgaggcgggatactggaaggctactggcaaggacaggataatcaagtccaagggcgacaagcgcaagcagcataccatcggtatgaagaagaccctcgtcttccaccgtggtcgtgcccccaagggcgagcgcacggggtggattatgcacgagtaccgcaccaccgagcctgagttcgagtccggcgagcagggtggttatgttctttatcgcctcttccgtaagcaagaggagaaaactgagcgctccagcccagaggaagtggatagaagtggctactcacctactccttctcgttcttcacctgacaacctagaggcgaatgaggaagctaatacaccattaaataaggaatctccagaatctgctctgcatgaaagcccgattgagctgccaaaatctgttgaaaccaatggtggttcaatgacaaggtggctggcggacagaaatggtaacttgatggctaatgcaccagatgtttcccatatacctttccatggacatgctgctgatgtagctaaggttgatccttctgttggtgcttcaggccacttagttaatccccacaatggaaatgatgattataacaaatttgtgtctgatttcacccccattctaccacttgaaaatccattcttcactgatatacaacaaggagcttttggttttgatggcatcatgaatcctcttgatcccctcgatgctttcttgaatcaaacactagttgatcctgatgaacattcatcaacaacatcaaaagttcagtatgattctgacattccaacagaatttgagaaccattggaatatgaaggttgagccacaagatgatcaatgctggtgggcaaacataggttttgagccagacgaaccaaatcctctgcttccttgtgacaccactgaccaagacatactttctgttgactctggtgctgattccttcaatgagcttttcaatagcatggaagagactggaattactgttaggcctcaacagttggactccactgtgcaaccaaaccatgtgttcgctagccagggcaatgcaacacggaggctgcggctacaggttgagtgtagggagatcataactaaagatgagagtgaagatgaagtatcatgtgttctaactccagactgtttgaacgattctgttgaggagtccactgcagagaaggatgtggcttctgatggggatgaggctgagtcaacagggattgttattagaagccatcaccctgctccaagatcaagctcagagaggtcattcactcaacagggaactgctatgcaaaggctgcggctacagtcaggccttaacaaaggccagcgtcctagtactgatgattcatcaagctgcattatagacgaaccaggaagtcagcacaaagcagaaaaagcggagattgaagaggatgcgagtacaaacctcactggaagtgctgatgatctacctggtaatatccatgatgatgagcaaaagaacatccctgaatatggtgctgaaatgacttctccagaagccaaatctgttctgaggttgcggaagacttctgaggaaagcaacaaggatgtcaagcaggagagttgtctcgagccacacgtgagagcaccaatgcagaagggaggcttccaatcatacatcatctggctggttcttccggtggctctgctcctgcttctctgtgttgggacatatggatgggtatgaaatctatcctggtgcggtgcaaggcatgactttttgcgcacatgggttcctggcgtcaacctggtgtgctgtcttctgtacataacctgtggcatcctttcaacagccgtaccctgcagtaagacatcccggcattgccaaggcagctgaaaaataaataaaaaaaacaagaggtagaaatgacaaggtggaaaagagcgaggtgtgttattgttggttttagtacatcgtagtcttcttttactgttgttgtagatgtcttgctaatgttgtcgctgttgtgtagttgcaattcaagcccagggctgccagttttatttcctaatgtaatgtagcaagagcgagaccctgttagacgggtgcgctgaaattctgaacctctgtaaaatctgatgttcttgtggat

SEQ ID NO: 35051 - DNA, 1093 bp, Zea mays subsp. mexicana
  Clone ID: UC-ZMFLTEOSINTE060G07_FLI
tgtagtaggtaaagcctgcggcgctcgagcgagcagtaagacaaaggcaagcatggccgggggtggcttcgccgtggccgatggcccgtccgtcgactacggcggccgggtgaccttctcggtcgtcgtgacctgcctcatggcggcctccggcggcctcatcttcggctacgacatcggcatctcggggggcgtgacggcgatggagtcgttcctgtcggccttcttcccgggggtgctgcgcaggatggccgcggcgcggcgggacgagtactgcgtctacgacagccacgtcctcacggcgttcacctcgtcgctgtacctggccgggctggccgcctctctcgtcgccagccgcgtcaccagggcgatcggcaggcaggccgtcatgctcgcgggcggcgcgctcttcttcgccggcgccgccgtcaacgccgccgccgtcaacgtcgctatgctcatcgtcggacgcatgctgctgggcttcggcatcggctttaccaaccaggcggcgccggtgtacctggcggagacggcgccggccaagtggcggggcgccttcacgacggggttccagctcttcctcagcatcggcaacctgacggcgaacctggtgaactacggcacctcgcgcatcccggcgtgggggtggcgcctctcgctgggcctggccgcggcgcccgccgccgtcatcctcgcgggggcgctgctcatcccggacacgcccagcagccttctcgtgcgcgggcgcgcggaggaggcccgcgccgcgctgcggcgcgtcaggggcgccaaggcggacgtggacgcggagctggaggacgtggcccgcgccgtggaggccgcgcgcgcccacgagcagggcgcgttccgcaggatcctccggcgggagcaccggcaccacctggccgtggccgtggcggtcccgctgttccagcagctcacgggggtcatcgtcatcgccttcttctcgcccgtgctgttccagacggccgggttcggcagcaacgccgcgctcatgggcgccgtcatcctcggcgccgtcaacctcgcctccacgctcttgtccatcgtcacggtcgaccggtacggc

SEQ ID NO: 35052 - DNA, 992 bp, Zea mays subsp. mexicana
  Clone ID: UC-ZMFLTEOSINTE061H11_FLI
tagcatagggagagaaggcatactccgaggcatccttctcctttccctctccttccccaaacccttttcctctttccctcgccccaagaacttcatctcatctccaggcgccccttttgcgcttgcgcaggaggagctcacggggacagtgggcggagagctcgatcgctgcaccactacttcactggaggtccgcccactcccatggaggagatcacccaacactttggagttggcgcaagcagccacggccatggccacggccagcaccaccatcatcaccaccaccaccacccgtgggcatcctccctcagcgccgtcgtagcgccgctgccgccgcaaccgccaagcgcaggcctgccgctgaccctgaacacggtggcggccactgggaacagcggcggtagcggcaacccggtgctgcagcttgccaacggtggcggcctcctcgacgcatgcgtcaaggcgaaggagccctcgtcgtcgtctccctacgcaggcgacgtcgaggccatcaaggccaagatcatctcgcacccacactactactcgctcctcactgcctacctcgagtgcaacaaggtgggggcaccaccggaggtgtcggcgaggctgacggagatagcgcaggaggtggaggcgcggcagcgcacggcgctcggcggcctggccgctgcgacggagccggagctggaccagttcatggaggcgtaccacgagatgctggtgaagttcagggaggagctgacgaggccgctgcaggaggcgatggagttcatgcgaagggtggagtcgcagctgaactcgctttccatctccggaaggtcgctgcgcaacatcctttcatctggctcttctgaggaggatcaagaaggtagcggaggagagaccgagctccctgaagttgatgcacatggtgtggaccaagagctgaagcaccatctcctgaagaaatacagtggctatctaagctcgctcaagcaagaactgtc

SEQ ID NO: 35053 - DNA, 1688 bp, Zea mays subsp. mexicana
  Clone ID: UC-ZMFLTEOSINTE063D12_FLI
gtgaggacacaccacaaggaaagaccattttcacatcatacggtacaacattatatcagatgtttgtcctgttcaccacatccaataatcctgacgtatgggtccctgcttacaagagctctcgttggaacgccctgtttattgttatttatgtgctgttaggagtttatttcctaacaaatttaattcttgctgtcatttatgatagctttaaagagcagcttgcaaaacaacttgctcaaattgactctataaggaaaagtattctacagaaggcatttgatctcatcgatactaacggtcagggctaccttaacaaagaacagtgcatatcgttactggatgagctaaacaagtacaggtcgttgcccaaaacctcgagggaagattttgaactaatcttttccgagcttgatcggagtggtgatttcaaggttacctccgaggaatttgctgacctatgcaatactattgcaataaaattccagaaagaaccaccaccttcatatctggagaagtacccatttttctaccattcaccacagtgtgaaaggttgaagtcctttgtacggagtcgcctctttgagtatattgttgtctttgttcttctggtgaacctaattgctgtcgttattgaaacaacgctagatatagagaacagctcttcacagaaagtgtggcaagaagtggaatttgtctttggatggatctatgttgtggagatggcacttaaaatattttcattaggatttggtgcctattggatggagggtcagaataaatttgattttgtgattacttggactatttttattggagagactctgacatttgctttcccatcaacgcttccttttctttcaaatggagagtggattcgatatcttctccttggaaggatgttgcgtttaacaagaattttgttgcaaattcggcgtttcagagcatttgttgcaacattctttaccctcatgtctagcttgttgccatacttggggactgtgttttgcatactttgtgtatattgctccattggtttacagttttttggtggcatcgtgtacgcaggaaacttgaagttggaagaaacagatctctttgggaacgattatcttcttttcaacttcaatgactacccaagtggtatggttactctgttcaatttgttagtcatgggcaattggcaagtctggatggagagctatgcacacctgactggaagttcttggagcctggtttattttatcagtttttaccttatttcagtattactgctgcttaatctgattgtggcatttgtgttggaggcgttttttgctgagatggaactggagaaagctggagaagctgatacgcaggattctaccccacaaggaagaaacaagcggcgatccatgcgtgcgaggacgaagggtactatggttgacattcttctgcaccatatgttgagcaatgaacttgatggatctcaaaactcggattgattactcatcttaatggtaccagaccactagtactaccctgctgttctttttttaacttcgaccacggcttccgttatgaacacctgtctcatctctactccacagcacccaagacttcgattggtaatttatataccatacgtatagcttaaagtgacacaatggatactgacagatgcttatttatctgcaatttcagtcaat

SEQ ID NO: 35054 - DNA, 1926 bp, Zea mays subsp. mexicana
  Clone ID: UC-ZMFLTEOSINTE063E02_FLI
gctctccactcccagccccagcccccggggactacaagggcactgggctaggtccgttggcaacagccgccacactgctccgctctgctctctggaggcattgcctgcctcgagttggcatggcggcagcggggacgcagctgggtcggctccttgttggcggcctctggctcctggccgcgttgctgcagcggggcgctgcggcggcagtggccgccgtggatgggcggcgcgccatcgcagcgactggggagaacttcgtgtgcgcgacattggactggtggccgccggacaagtgcgactatggcacctgcccctggggccgcgccggcctgctcaacctggatctctccaacaaggtcctcctcaacgccgtcagagccttctcgccgccgctgatgctccgcctgggagggtcgctgcaggacaaggtggtgtacggcaccgcggacctcgggcggccgtgcgcgccgttcgccaagaacgcgtcggagatgcacggcttcacgcagggctgcctgaccctgcgcaggtgggacgagctcaacgccttcttccagaaatctggtgccaggatcgtgttcgggatcaacgcgctaaatggccgtgttccgttgccggatggatccatgggagggccatgggattacaccaatgcggcgtcactgattcggtacaccgcaaacaagggctaccgaatccatggatgggagcttggtaatgaactcagtggcactggagtcggagctcgagttggtgcggaacaatacggtgcagatgtgatcgccctaaaaacactagtcgacgacatatacgcaagccatccatcgaaaccattggtgcttgctcctggaggattctttgaccaagcctggtttgcccaacttattgtcaggaccaggccgaatctactgaatgtgatcactcaccacatttacaatttagggccaggaagggacacacatctgattgacaagatcctcaatccatcagtcctcgacgggatgagaagcacattcagcagtcttcaggggctactgaaatccgcaggaacgtccactgtcgcatgggttggcgaagctggaggcgcttacaacagcggccggcacctagtcactgatgcatttgtgttcagcttctggtttttagatcagcttgggatgtcagcaaagtatgacacgaagagctactgcagacagagtttgattggtggcaactacggcctgctaaataccacaacgttccaaccaaaccctgactattacagtgctttactgtggcatcgcctcatgggaaccaaagttctagcaacaacgttcagcggcacgaacaagatccgcgcatacgcacactgcgcaagagattcaccaggaatcactctactgctgatcaatctcagcggcaacaccacgacgcaggtctcggtgagtgtgacgacccaaggggccgtggcggcgcacaagcatggcgcaaggaagcacgtcggcggcaggaagttccggcacgtccacgtccccagcttcgacgaggccgccggcggcgtgagagacgagtaccatctcacccccaaggacggcaacctgaggagccagatcatgctgctgaacggcagggcgttggccaccgacacagcggggaacatccccgcactggaggcggtgaagatggatgcggcacaacccatcgctgtggcgccctactccatcgtgttcgctcgcatttcacatttcaatgcaccggcatgtagttagagtagttagtgggtacagatcataatggcaagggagagtttgttttccttttactccttagaattatgtaaggttgaagaaattatgatgatcaacgatgggaaggggaaaaacttagagttgtaaaaggttgaaagaaattatgatggtcaacgatgggaagagggaaagttag

SEQ ID NO: 35055 - DNA, 488 bp, Zea mays subsp. mexicana
  Clone ID: UC-ZMFLTEOSINTE065A05_FLI
gggcacagaggaaagcctctcaacacggctcgcgtgcagaggatatatatacacaagggcgccaaatacatttcccaactccaacaagaacagcgccatttcttaatcgcagcgcctaaacccagcccctcctaattatatcaccgcacagctgctagaaccaggtgcgatttacaggcttaaaacgcaccggcatggccactgtacaggacaacggtgtcctgcacttgcacccctatgccgtcgccgcggcggcagcggcattgatctcggcgtacatggtgtggttctgggcgctgacgcgacggctgtccgggccgcggatgtggcccctcgtcggcagcctgcccagcgtcgtcctgaatcgggcgcgggttcacgactggatcgtcgacaacctgcgctccaagggggaagcggccacgtaccagacgtgcatcttgccgctgccgttcttggcgcggcgccaggggctggtgacccggacg

SEQ ID NO: 35056 - DNA, 1622 bp, Zea mays subsp. mexicana
  Clone ID: UC-ZMFLTEOSINTE065B01_FLI
agcaatataatggctggttcttcaatggacactgaagctgcaggcaaggagctcaagcagggcagcggcggcggcggcggctacaccatgccggctactgctcatgcggtggacacagactcgtggcagcaggtggggctgctcctggtgatcggcttcaactgcgcctacgtgctcagcttctccaacctcatgatggtgcccctgggctgggcgtggggcgtcgcctgcctgctgctcgtcggcgccgccgcgtggtacgccaactggctcctcgccggcctccacttcgtcgacggccagaggttcatccgctacagggacctcatgggcttcgtattcgggaggaacatgtactacatcacctggttcctgcagttcgcaactctacttctgtgcaacatgggcttcattttgctaggagcaagagcgctcaaggttaaaaaaactgtatctgaccagtggtgactcctcctagtagtatatatatagcagtaaatcagtaatacgtactcgtggttattattattattaaccaggcaatcaacacggagtttacccacaccccagccaggctgcagtggttcatcacggccacgggaatcgtctacttcgccttcgcctacttcgtgccgacgatttctgccatgaggaactggctcgccacgtcggcggcgctgacgttagcttacgacgtcgctctgctggctatcttgatcagagatgggaaatcgaacaagcagaaggactatgacgtccatgccggatcccaagccgagaaggtgttcaacgcgttgggcgccgtcgctgccatcctcgtctgcaacacgtccgggctgctcccggagatacagtcgacggtgcgggagcccgcggtgcgcggcatgaggcgggcgctgctgctgcagtacaccgccggcgccgcggggtactacggcatcagcgtggcggggtactgggcgtacgggtcagcggtgtcggagtacctccccaacgagctcggcggcccgaggtgggccgccgtcctcatcaacgccaccgccttcctgcagagcattgtgtcccaacacctgttcacggtgccgatccacgaggcgatggacacgcggctgcagcggctggacgagggcatgttctcccgctacaacctcacgcgccgcgtctgcgcgcgggggctcgtcttcggcttcaacgtcttcgtcaccgcgctgttcccgttcatgggggacttcgtcaacctcgtcggctccttagcgctcgtcccgctcaccttcacgttccccagcatggccgtcctcaagatcaaaggcaagagcggtgggagatgtaacagactttggcattggggcatcatagttctgtcctcggctctctgcgttgctaccaccgccgccgccgttcgtttgatcttcaacaatgctaggatctaccacttcttcgccgacatgtagcgagctagtagtagtgggattgacatgtgtatcgtcaccatgaggtgatagtatggcccacttcgttctcaattttttgtttggtccaagagtggaagggtacggtggtcacttattagctcatgtttgatttttttgattatggaaacaaagagttcgggcttttgcatc

SEQ ID NO: 35057 - DNA, 1259 bp, Zea mays subsp. mexicana
  Clone ID: UC-ZMFLTEOSINTE066B03_FLI
gtggagacagggggagaacgaagcagcagcgccatccgctcgcttccttccccccaccgccagcgtcgcctcttcgtgtgcgcgccccgccgggggtggcgtcactgcacccttgggcagcaggcacctacgtgcggggggagccacacgcctccctctcgcctcttgccatggacgccggcggagagaagtgcggcgacgcgacggcagagggcggagacctctacgcggttctcgggctcaaaaaggagtgctccgacgccgagcttaaggtcgcttaccggaagctcgccaagaaatggcacccggacaaatgctcgtcctccagcagcgtgaagcacatggaggaagccaaggagaagttccaagagatccagggcgcctattccgtactctccgacgccaataaacggctcctctacgatgtgggagtatatgacgatgaggacgacgaggaaagcatgcaggggatgggggacttcatcggtgagatggcccagatgatgagccaggcgcagccgacgaggcaagaaagctttgaggagctgcagcagctttttgtggacatgttccagtccgatattgattcaggattctgcaataggactgccaaggcccatcagtttcaggggccaaccaaaagtagaacatgctcgacctcaccttcatcatcaccgtcccctccttctcctaccacagcaaaggatgcagaggtgccaacatgtaatggcttcaataagcggggttcatcagctctggattcagggaagcctccaaagcctgttgaaggtggtgcaggccagaaccaggctggattctgttttggggtgagcgacacgaagcaagcgccgaagctgccaggtcagaacgccagccggaggaggaacggccggaaacagaagctgtcatccaagcacgatgtttcatctgaagatgaaacggcggccggttcgtaacacccgcagcatggtagccgtttgaccattggcttcggtgatatcattcgttggcccttggctgtgcctaggggccctagtagctagcagcagcagcagggacggcacatcatgccagctgctgtgatctgaagaggcgtttagctcatcatatgcctcaccttaggcctgtgggggattttccattgaaactcgtcgatgatactacatctttctttctccatctgtgtcgtttgtgttgtaagacaatgacttctgaagtctgatcgtctcggttctttttattaacatttgatatacgtt

SEQ ID NO: 35058 - DNA, 2167 bp, Zea mays subsp. mexicana
  Clone ID: UC-ZMFLTEOSINTE066C03_FLI
gtttagccaaaatggaagcaacccacctagcatgacttccatgtctgaagatggggtagatgatgaaggaagttgtacagaatcttggaccaatgctctggtatctgagccctgtcaattcaaaagagagaaggcagccaagagcagcacgacagaaagctccaataggttggagctcatggatgacttcttagagatggagagattagcatgtctgtcttctgaagttaatggcaatggcagtactgttgacaagatgaaggtagacaatgttggggctacttttgctggctttactgaaagagatggtgttaaagatttgcagtcagcttcaccaatgtcagaaactccatctaataaacagtgtctgtctgagaaatctccgcttttgaatttccagtcaagaatatcttccttactggattctgaatcaccagagaataatgctggaaaggtacttgatagcatcagaaacattctaaaggatattgaagatgaggcagattcggtgaatgtaaatgggactcatccttcagatgggaccttaagttcagagagcaaatttgccatggatcaagatcttaagaatgccatattgaaaattctagactttgtgaagttacttgatcaagaaatctccaagtttcaaggccagtcacccgattatgatggactatgtgagaaaacacaacagttctctgcattagtcgataaagttctgtcaaacgttgatgttctaaatgatattgtcatagcactgtctgttatcttgtcagaaactagccagattaagttcacattgttgagagacaatagcaatgaagcagaaagtaataacttagattgtgttgataaagtgactctacttgaaaataaggtgcagcttgagccagtaaaagacaatgttcctggtatctgcccactgttgcctcattcatcttctgatcctgagtttgaggggcctgctgatgctagattcgatgttaagactgcagtgaaggtgtactcgccggaggaatatgaacaacttaaatctgagaaggcaaatttggagggagaactagcaaagtgcaacaaaataatagaagaaacaatggctaggttaagtgatatggagaaaaaactggaagaccttacatctaagttggctgacagtgagaaatcaaatagcttgaatgagacacagttgaagtgtatggctgaatcctacaagtcacttgaatcaaggaaaattgaattagaaaatgagatagaagcgttacggtccagaatagatgctctaacagctgaactctctgatgaaagacagagtcatcaggaggacttagttaaatacagagatctcgaggagaagatggaaaggtatgagatggagaggagttcaattcttgtggatgaggacccagacaccaagtcaaagcaggagagagagatagcggctgcagcagaaaagctggcagagtgccaggagaccatattgattcttggccgtcagctgcaagctatgcgtcctccagccgagtcgctaggctcttcacctaatcggcaacgcatggaggagtttctgaaggatgcggcaggaacaaccgcaggagaatattcccagaaaccttcaggccaacctgatacagaccaggatatgcttgggacaggaaatgtgtctccgatcagtgggtacaagacacacatgatcccttctgatgcggacgtaagccctttcccttctccaaacacctccaagcgcccgaagcatcgatcgagatcctcttcgtcttcctcattcaccaaccaccagttgccagacaaacagaaccgaggattcagtcggttcttcgcgaagagcaaagagtgaaactattccggatcgcagtgttaggtttgttgatttttggcgccaattgggtgggatggtggtcatgaatttctgtagagctagtgagggatgcttgcttgtgcgttcgctcaggtcaggtgattcctttgggttgctggaataatactcagcttgcagtcgagcgggttgtggcgagagtgtgtgggggaatatttaagttgtcagtctcttctgctagagcttttctgggtttctgtgtgctcgaaacctcactaaaacctcactgtacatgtgcttacttgcttgaaggagcttggctgttggtttgtgttt

SEQ ID NO: 35059 - DNA, 1467 bp, Zea mays subsp. mexicana
  Clone ID: UC-ZMFLTEOSINTE066D04_FLI
cactttcatcctctcccagtatccacgggctcgcacgcagtcgccgccgccctgcccgtctccttcctgtcgtctccccttctccaatcgcttcccgatcccagccaatatctcagacggaatcgatccaaagctatcctagggttccgccgtcccgtccagatccgggctcgtcgatggggaaggagggcgtggcggcggggccggcggcggaggggagtaaatcgcggtcggagtgtatcaactcgtccaacccgtaccacgagtgctccgactactgcctccgcaagatcgccgaggccaggcagcgcctcgacgacgagctccctgactcgtggaagcgcccgcccgagcagcgcaccgtccacccggactgcatcaatgcctccaacccttaccacgagtgctccgactactgcttcaagcgcatcgccgacgctaaatcccctgcctgcgggctggagcgtgaggagcgacagccaccagctgatgtgtttgccgccgccggcatgtctgatgccgtggagcagcatcggcctgtagataacgatcccgacgaacaggagggcgcaggcccggatgacggctacccgcagatgacggagaagcagaagaagctgttcgagctgcggcttaagatgaatgaagcacggaaagcaaatcagcaggcgatggttgccgagaagaaaaggatggagcctcgtggcgagagccgaggtgtttctaagcagaagtggttagacgacaggaagaagaagattgggaagctgctggactcgaatgggcttgatatgaaaatggcgtacatgctcgacacgcaggagactgcagaagccaagtacaagaagtgggagaaggaacctgctccatatgggtgggatgttttcaatcaaaagaccttgtatgacgcatacaagaagaggaccaagaacatagaagttgacatggaggcttacaataaagccaaagaagctgatcctgaattctaccgcgacgcctcaagtcttcagtatgggaaggtgtccaatgtcccagaagaaaacatcgacaagatggtgaaggaactcagggagcgggaagagaagcggaaatcgttcagccggaggcgcaagtttaacgaagacaaggacattgactccatcaatgaccggaacgagcacttcaacaagaaggttgagcgtgccttcggcaagtacacgctcgagatcaagaacaacctcggaagaggtactgccctgccggactaataaaaccttacacggcggcagctatcttcggccgtttttcaagctaaccagtcgactagaggcgtgtgtccctgctgctgttttccttttcgcacggttacttgtatgcttgtaacttaacttgaggccacagttccattgtgatttgtaacaaaacctggactgggttgtgtaatgacgcgaggctgaagcaaacagttgtgtatgcatatgagttgtc

SEQ ID NO: 35060 - DNA, 1387 bp, Zea mays subsp. mexicana
  Clone ID: UC-ZMFLTEOSINTE066D10_FLI
cagcttctgcttgctttgtgggggaaggagagagagagagagagagatctagtagagaggctagtaggtggtcctcgaacgaagatgttggcggtgttcagcgggcaggtggtggaggtgccggcggagctggtggcggcgggcagccggacgccgtcgcccaagacgaaggcgtcgcagctcgtggggcgcttcctggccgcctccgagccggccgtgtccgtgcagctcggcgaccacggccacctcgcctactcccacaccaaccaggcgctcctccgccccaggtcgttcgcggccaaggacgaggtgttctgcctgttcgaaggggtgctggacaacctgggtcggctgagccagcagcacgggctgtcaagcaagggcgccaacgaggtgctcctcgtcatcgaggcctacaagacgctgcgcgaccgcgcgccctacccggccagcttcatgctcgcccagctcaccggctcctacgccttcgtcctcttcgacaagtccaccaactccctgctcgtcgcatccgaccccgagggcagggtgccgctcttctgggggatcaccgccgacggctgcgtcgccttctccgacgacatcgacatgctcaaaggctcatgcggcaagtcgctcgcgccgttcccacaaggctgcttctactccaacgccctcggagggctcaagtgctacgagaaccccaagcacaaggtcaccgctgtccccgccgacgaagaagagatctgcggtgccactttcaaggtggtggaagggtctactgtcctgacggcgctgcactgatcgatcatcatcaggcggaggcgatgcgacgatacagaactttgtacatgcgtggtgggtgtaacatagtggctggcaacaagccatgctcatgcaaaccgatgaatctatctctgtatcatgcatcgatctcggttgcttgctagtccagactccagactccagacatggctatatatagctggtgctaataaataggagtataatcgtcatatcgatcggttgcgtgtggaatgccaatcaagtgtgtaatctgttccaaataacaaacctctgttcctccagctgctgctgctgctgctgctcttgtccgtgcgatcatgattcagaactggcgtgggcgccaataactcagaagatcgagagacttgctagtagtacgcattgtccctcttttgtcgtccatgcttgtaatccaactctattatgaaaaccaaaacgagaatccaaccaaacgctggttattttttccaactctaaactagcaaaactgagaatattataggcatcaactcttgttcggtcctgcatccagccgggtcgtagaaaatgtaagggctcctttgaattaaaaggattgttttct

SEQ ID NO: 35061 - DNA, 2855 bp, Zea mays subsp. mexicana
  Clone ID: UC-ZMFLTEOSINTE066G04_FLI
caaaacgccgcccttggatgagccaatcttcctctcgcacggcccactccttacccccaccgtcgacagccgccgccgccgccgccgccgccgtcgacagccaactccccgcgcccccaccgcctccgcgcaccgccccacacctgattgcgcgtccagaggtattcagagctctctgctgtcggagcaacgagggcagggatgagggaggtggtgacggtgcaggtcggcggtttcgcgaacttcgtcggctcccacttttggaacttccaggatgagctgctcgggctcgccgacgaccccggcgccgacccggtattcaggaccgccgcgctcgacatggacgtcctgtaccgcgccggcgagacacaccagagcgtcgccagctactgccctcgcttggtatcagtcggttctcgagggtctcttggctcattaagttcctctggtactctaggttcgagcagtgcagctgcagatgagcccaacatcttcacatggtctggaaaggtaacaaaatcagtagcaaaacctcatgagcgaaacttgttcctacaaagtttatctgaagaagaacagaacccaagctctagcgatggccaaaacaatgctagtgttgaagataaggacctggtcgcaaatctggagaatggagtcaaattttggactgattattcaaaagttcagtatcaccctcagagcttatatgagttgtatggatcatggacagactttgacaggtttgataactatggaactgcaaaggaggtggtttcagaatggtcccaaatggaggaaatgaatgagaggctaaggttctttgttgaagaatgtgaccatatccaggtcttgtcttttttacagcaaactatcaataaacactctattcacacaatgggctgtgttcacttacatatttagtgaatttatagaatttttctctcttttttcgttgaggtcttgacctttgaaattattgatcttgatttactacagggtatccagtttcttgtggatgattctggaggctttgccagtgtagctgcacagtttttggagagtattgttgatgattacacaaatacccctgtaatgctgtattgtgtgcggaatccagactcctatgggtcttccagaaatcagcgtgaaaccatcataagatctttgcatgatgctgtatctttgtcgaaactttcatactactgcaatctgatggtaccaataggactgccttctttaagtatgcttctgattgcttataatcttttacgtagactgccatataacatgtgattctcttatccattctccattgtagcatgttcgtatgtgcagatccttataattctactgaatgtacagtaaactcataattggacttgtgattctttttagtaatttgaggcttcttatagcagtgcttggaccttagttttgcaaatgtttcatttcctgatctttgatcataagctaaataaacattcagatgttgcattcttcacctcaaataactcacacacctgctgttggtgaatgcaatgctcattctattataatccagccctatggtcagcatgcctatcactgtcacattgtttataccgaattttgtgtaggttttgtgaaagcttgttgatgtgtgttcctctaacattgtttttttttactttgactgttcaggttacttgtcacctttgctttctataaaagatgagaagcacttccactccagtgccatttgtgcagcagcaatgcattcattatctattccattcaggctacaacacgtgggcccggcctcagattcagcgcattcatctggtaagcttgatattggtgagcttgtgcacatattatctgatcaagggaggcagaacacgatcactgcgctggatgtagcaatgcctgccccttctttgacagatagaaaagatttgaggaacatacagaggagcttgcattctctgacacctgaaatcagcgacgaggatgaagatccttacgctgttgaatccatggtggttcatggagtcctagatgcaggcgggaaaagggcttccatatctcaggtgaaggaatccatctgttcagcactggaaggcagggcgacgaaacccaagttctcccacctctcggtatcgccgtgccccctcccaatcccgctcccgttcccgtcaatcttcagcagcagcgtaggccagcagggcgagatcctcggcaccagccatgcagaaggagcccggccaaagggtccgcttgccgtcggctcggtaccgatggcagcgcgcctgaggtcgagcagcgccatagcgccattcatcgagaggaggtcggcgagcctccagaggctcggtgtcgccaggggcacactgggctcgcaggtcctccacgactggggcttcgggagggaggaggtcgaggacatggctgagcacctggcgaagatgctgcgcccgttctacccggaaatggacctgacgtcggattctgatgattaggtttcactgtcattgtgtctcgtattaccggatggtaagcagctgggttttagtctgtgggaactagaaactgtgatgcagatgcagctacgccatgctgcgatgcattcctctggtctgtgttgaagggatgcagagtactggaaacgagatctgagagagcctgggcgtgtgaccgtgtcattcagcgctccgcatgtgatgcacgtgcatttgggcgacgacgcggacgtccgccgccatgggcagttgttgttgtaacattgtgcaatgatccagccctgatgcagatgtccagatctgtgctacacttacctgcaaaccacacagctaatgaaactaaagaacattctttct

SEQ ID NO: 35062 - DNA, 1286 bp, Zea mays subsp. mexicana
  Clone ID: UC-ZMFLTEOSINTE066H02_FLI
cacactcgtgcgtctctcctcctcctcccccgcgtcgcgtgcgcgctctgcttcccttgccgccgtgtgctgcgcgggtcgactgtcgagcgcgcgctgcttgctgctcgcctggccgtcgatgagcatggggcgcttcgtcaactccatggatccgacgtcggggctggaggtgatcagagactggaacggcgtagcccaggtcgtgctccgctcgcccaagggagcctccgcgcgggtgagcctgtgcggtgggcaggtcgtctcatggaggaacgaccgcggcgaggagctcctcttcaccagcagcaaagcaaccttcaagccgccaaatgccatgcgaggtggaattcagatgtgtttccctcagtttggatactctgggacattggagcgacatggatttgcaagaaacaggatatggtccctggatgatgagcagccaccactgaatcataatgataacggaagcaaagtttctgttgaccttattctaaagccatctgaagatgacctcaagtgctggccacattgttttgagttccgtctgagggcctctctttcaaaggatggggacttgtcattgatatcacgcatcaggaatgtcaatggcaagccattcagtttctcatttgcttatcacacatatctttctgtttctgacatcagtgaggtcaggattgaaggtctggagacacttgattatcttgacaaccttagccacaaagaacggtttacggaacaaggagatgccataacatttgagtcagaggtcgaccgagtctacgttagctcccgaaatgtagtagcagttattgaccatgagaagaaacactcgtttgtcataagaaaggaaggacttcctgacgttgttgtgtggaatccatgggaaaagaaatcgaagaccatggtagacttcggcgacgaggagtacaagcagatgctttgcgttgatgctgctgctgtggagagaacaatctcgctgagaccaggggaggagtggactgggaagctggagctttctgcggttttatccactaactgcagcgaccatcttgatcatcctgtcagcatctagcgtttattcccattgtagtgctatatatttgcctcacaagagaagtatgggccccttttgtaaatgagatcaataggtagctctgttatcagttagcagctcgacttgatcctggaaccggcacaatttgtgacctgtttatttaatgtgagtattgaatgatagcagcgccttgcttcatgcataatgcacacaaaatggcaagatt

SEQ ID NO: 35063 - DNA, 894 bp, Zea mays subsp. mexicana
  Clone ID: UC-ZMFLTEOSINTE066H09_FLI
gttctattatccattggccattaaagatgatgttggaactattcgaattcagcgaccgcacaaaggacccttttatgcatcatcaaagagcattgatcaacttattgtgaatcttgggaaatgggccaagttataccgaattgcttccatgggttttgcaacatttggtgtcttccttcttgcaaagcgtgcactacagcattttctagaaagaagacggcggcatgaactgcaaaaaagggttcttaatgcagcagcacaaaggcaagctagagaagctgaagggagcaaaggtacatcagacgcagagcctaacagtaaaaaagatcaattagtgttggacatatgtgtcatatgccttgagcaagagtacaatgctgtttttgtgccgtgtggtcacatgtgttgctgtgtggcatgctcttcacatttgacgaactgcccactttgccggagaagaattgaccaagctgtcagaaccttccgccattgatggtgatatatgatgcaaaaaactggcatggtaccaccacatgtactgcttctgaaaccaatttattcttggaacttggaagtgctggctgctatcaaccaacgacatgaactgcaatactggggcgaagcagcttcaatgagtttgctttttgaactgaacagtgagtgatgcaagttgcaagctcataattgacagttgagatactctcactccctacatagtgccaatgggtgctcttgcctgtaatgtactacaactctgtacaggacgctcttgtgtaagtgcacatagattagcagcttgcttattgacaacatcgatgccggtaatatgtactgttgcccatcgggcatttgtgcaaaggaataacaaaatcagctcgtttagttgtgataatc

SEQ ID NO: 35064 - DNA, 1359 bp, Zea mays subsp. mexicana
  Clone ID: UC-ZMFLTEOSINTE067A06_FLI
aagatatgccatgtcagtcgattcccatccctaataaaattaatttgtaccttaaatctgataggcgtacatattacagatccaatgaggttatacgtgggctatctgcttaatttcttttctcatccagagccagtgctcgtgcagagtgccagtggagtggcaggtgttcgatctgcagtcaggaccacaaggatgtggtgtgtaggaggaatcccaatgggaagctcagatgggagccggtgacttcctcctcttctcagggcactatcaacatgatgtcaagtgctgagcagcagttttcagttcctcttcctccacagcagctttatgtgcatgggacttctcagttcgtgccgatgcagggtttccctcagtatcaggtcgtgcctactcctgcaccgtctacccctgtgttgactcagtttggagctccgcgccagcctcctccggtggcgcagtggggttcttctgttaatttcactcgggagcttcctcttctgcgggtatttctggagcttatgtgctacccgctacggatggcagggagcaaggagacgtggtgacaggtacgatttcagttgattcatttgcagcccatgctctttttgactctggcgctagctattcgtttgtttcggaggattttgtgtcgcgggctggtctttcggtgcagaggttgggtcacccaattttggttagttctgctaatggctccattagtagctgttcagtttgtcaggggtgttccatcattcttgctgatgaggttttttcggccaatctggtggtgatttccttgggggcattcgatgttatcttgggcatggattggttatcccagtatcgcgcggttatatcctacttctggaagacagtgttattgcaggcgtcgtcgggtaaggaggtggtattcttgggaagttccccgaagttcacattatccttgttggcgcaattgcttcctgatcgccggtcaaggaagtcggggatctttttctctatggtggtggagggtgaggctgccttgcgggtgcaggacatccaggtggtgtgtgactttgctgacgtgtttccggcagagcttctaggcattcctccggagcgcgatgcagcttttgagattaagctgatcccgggtatgcagcctattcataaggccccgtatcgaatggctccaaaggagctgttggggacttgttctcaaatactatgaatcaagaacaaggcaacacaaaatgttaaatatcaaaaggcccttcgtccttcaaatcattatttcctttcggacataatgaatttaggacgaaggtcatgaaggtcataccttcatgatcatgataaaaaatagagaacatc

SEQ ID NO: 35065 - DNA, 1225 bp, Zea mays subsp. mexicana
  Clone ID: UC-ZMFLTEOSINTE067D09_FLI
agaagtattcagaagccttggacatccttcagtcaggcgctttggttcaattgaagcatggacaggttacctgtggtggtgaacttgctgtcctctttgttgacaccctcatcacaggagagcttccatatagtgaacaaatttttgatcgtatcagaaagatgtatgaggcattcccaagggtaactgttccacatttccttggagatgactatgatgatgagggacatcaattatctgaagctatttctgctgccaaagtgcgggcagagagttgctcatcattcatgaaagctgcaatcaggtggtctgctgagtttggaacatcaagaaatggttcttctgagcttcacgttatgttagcagaatacatatattcggaatctccagagacggacatgactaaagtctcaagtcattttgttcgtggaaatgatccaaaaaagttcgcttctatgctggtgaactttatgggcaagtgttaccctggtgaagatgatactgcaattgcacgtggggtcctaatgtacctatctcaagggaacttgagagatgcaaatttacttatggatgagatgaacgaacaactaaaatctgctaactcggaatttccgaaaacagatttgattcagttcatcaagtatcttttaccaacacttgagagagatgcttaccctctttttagaacacttcgacagaagtataagacaagtacagatcgtgatgctgtgtttcaggagttactggatgaaatagctgcaaaattttacaatatacaacgccagaaccctttagaaggccttttcagcgaaatgttcaagatataatgcacgagaaaagaattttatgtcgatgctttcatctaaaccattggctggaataatacaattggtcaacaaagttgtttgctcaactatgaatctccaaggccatacatttagcatcatgctgcatgaagatatatacttagctctgcagcaaaatcgtcgattagtgtcagattgttactgagcatgtgtaactgaattttgttttctattacttgtttctctttgttgacttgcccttgattgttattgaccatgcataactgaattttgttttcttttacttgtttctccttgtcctgttcacttttggagatgtattttgtgtacccacagatcaaaactataacctatttaaattcattgattttaatatattgtgttatcagtaaaaaaac

SEQ ID NO: 35066 - DNA, 1230 bp, Zea mays subsp. mexicana
  Clone ID: UC-ZMFLTEOSINTE067E05_FLI
ggacagctagctacatggactcctgctttcacgttctcatacaggcactcctgcactgtgctccttcgtctcctcctcccctgcctgccaccaactgccaaggtggcactgccagcagaagtgatccattgacttcagctatgggcaacctgtgctgctgtgttcaagttgaccagtcgactgtggccatcagggaacagtttggcaagtttgacagcgtgcttgagccaggatgccactgcatgccttggttcgccggcaagcgtgtagctgggcaactcacactcaggctgcagcaactggatgtgcgctgtgagacaaaaacaaaggacaatgttttcgtgaatgtggtggcatctattcagtaccgcgctctggctgacaaagcaagtgacgctttctacaaactgagcaacacaaggtcccagatccaagcctacgtctttgacgtgatcagagcaagcgttcccaagctccatttggacgatgctttcgagcagaaggacgagatcgcaagggcggtggaggaagagcttgagaaggccatgtcggcttatggctttgagatcgtgcagactctcatcgtggacatcgagccagacgagcatgtgaagcgcgcaatgaacgagatcaacgcagctgcgaggctcagggcggctgcaaacgagaaggcggaggcggagaagatcgtgcagatcaagcgcgcggagggggaggcagaagccaagtacctgtccgggctgggcattgcgcgccagcggcaggccatcgtggacgggctcagggacagcgtgctggggttctccgtcaacgtgccgggcaccaccgccaaggacgtcatggacatggtgctcatcacccagtacttcgacaccatgaaggagatcggcgcgtcgtccaaggcgtcctcggtgttcatcccgcatggccccggagcggtgcgcgacatcgccacgcagatccgcgacggcctcctgcagggatcctctgtcgccaaacactaagctgcctgccgttgccgttgctgctgaagaacaccaccaccactattatatatataatataatgatgatcttggtaccagagtgatgcttgtctatattgttcatcgtcgtcaccatcttctaggatggctatctttatgcttggggattggagaaaaccttatctaaccttttagggaaccggtaatatatatataatgcagcatgagtttgcagtatgttcatc

SEQ ID NO: 35067 - DNA, 958 bp, Zea mays subsp. mexicana
  Clone ID: UC-ZMFLTEOSINTE067E11_FLI
gcacgagatactatcgactccaagtacagaccagtccagtactgttgtacggcctggttccgtggaacagagatgggcaagcaaaagattgtgctcaagttgcccctggatgacgagaggaagaggaggaaggccttcaaggcagctgtgggaatgaacggtgtgacgtccgccacgatggagggcgacaagatcaccgtcgtcggcgatggagtcgaccccatcacgctcacaaccatcctccggcgcagcctcggctacgcggagctgctcagcgtcagctccggcgacgacaagaagaagggcgacgggtacggctacgggagcgccggtggcatgatgtacggtggcggcggatacggtggtggcaaagagggcaaggagagcaaagagagcagcggcggcaagagcagtggcggcggtgggggctacggcggccattaccaggcgatgccgtcggtctcgtaccctgccgcctaccagcagtacaacgccatgccgccctaccccgccgtctactcctatcctgcagcgtacccgcagcaagaacaggaccctggatgcagcatcatgtgaaaaaacatcctacaagttaatctgaggagttggttgaaggtggccgaagccgaacacatggagatcagattaacatggttgggttcgtccggacaagatgatccatgctgccttgagctgtgcaacagaggatgatgatccaggatgtgatgggcattatcatccgtgtaattatgtacagggttggccagcaaagttgacggattgatatgttggagttggaggtgttggtggaatgggaggcagagctgttccgcaagattatgattcaagtgcagactaagtagcagcaccgatgtttccttttcgtttctttcgtttttggtaaagttgtagtgtttgttgaagaaatggattgcaataaaattagtgtttatacact

SEQ ID NO: 35068 - DNA, 1136 bp, Zea mays subsp. mexicana
  Clone ID: UC-ZMFLTEOSINTE067H04_FLI
gttgtctataagacaaccagaaatttgccatgacctcgctcctgaccaagaaaaactgtcaagcacagaatcacagttgatatattgggattccaaggtatcagaggctgatatggatgcaatgtggaaacatcctgatgtgtataaggagtggataaaatctggtgagagacgtggaaatgtacgattctcccatgatgcaaagaacaggccttacctttctcgcgttgaggtgaaggctgttgccgaaataatcatatcacgccatttgagcacaagaggagtaaaaccagaagctctcgcagcacttgcagaggtttgcagtatgcgctttgttcatggagtaagtacccggactggattgatgggaatagactaccctactgctgtatggctttccagggattgtggctacagggcatatacactgatctctgtggatgatctctacaatccttttgcatcaatgtactttggtgcatcgtacttggcatggttgtctcagtacgaaggaagggagcaaagctacgaattcattgtccaagcttaccttgggggaccagagaatgttagtcttcaggagactggaccgttttggaaccaattcctggagtcattaacacaatatcaagatccaaagaaggacaataataatagctgctgtatcttgtgaagttatctgatacctcttccaactttggttactgaagtttctgctgaggatcatttatgaatgctcatcgacattcttgccaaatttcaaatccccttccgaagggttcgggtactggcaaacaattttgcttgctggacaacacgaggtacaggataaaaggggctgtcagttcgtacatacattttggtcgctggcgccttgctcatgtttaaatcatgattgatcccatctcggttcatagagctgccccccagttccatatgtttcttcttctacttttaccatcagaatgttaacgcccttcccgttctttccgcttattggtgtatggcatactgtacctctgttgtataataataggaaccttagaagaaaatggcctttgtaaaattatcgacgcttcatagtacatgtgctaccgttatagatgtaccaactgatactctgatagcagaaccgt

SEQ ID NO: 35069 - DNA, 241 bp, Zea mays subsp. mexicana
  Clone ID: UC-ZMFLTEOSINTE069B05_FLI
aggaacccagctggtgtttcccagttgagaccactgaacaattcagcaccagcagcgttatatgatagcttgctcctgatgcttatcttggtccacttggctgtaaattagtttggttcttaaaatagatactgtagagcttgactagaggtacaccatagagaacaatattgtttagtggttacacgtcctgtaatagagatacttagttgtgatgccgattttttatggctcattgtac

SEQ ID NO: 35070 - DNA, 1264 bp, Zea mays subsp. mexicana
  Clone ID: UC-ZMFLTEOSINTE070C06_FLI
tcagacttcctaattcatggaatcatcagccacctcattttcaaagtgcatttgatgatacccaggaggttattcctgtggtcagcagcctcaacttgcaataccagcatccagtgaatgtttctagtgtgccaccggctgcaaaccgtttcactggccatggagcttcatcatcgagagctggcagtttggagaacagaattcttggtagtcaagaggctcctagaaggaatgtggtgcctgccaactactctgatttagttcccccgtctgtagtagacccgagacgtttgctgccagaaccatctaattggagttctgatgtccgaggcactgcaatatcaggaagtattcctcctgtatcaagagctaataacagtgcaactgttaatccgccagcaggattcagtcaccaaaacctcacccggcgccatcctcgaaatttatcagaggagattggtcggctatctggagcacttcgcggccatcaacccccacgcttaaggccggggtttctgttggagcgccagggcgatggtgtttggggtgttcctttatcaacaaggggtagagaaggaagaaggttaatggagattcggaatgcacttgaaatgatccatagaggggagaatgtaaggcttgagtctatcttctatggcggtgttgacattcacgatagacacagggacatgcgccttgacattgacaatatgtcctatgaggagctattagcactcgaggaaagaataggaaatgttggcactggcctcagtgaggaagctgtgataaggttgctcaaacaaaggaaattttcatcttggacactaaaagcatctttggaccctgaaccatgttgtatctgccaggaggagtacgctgatggagacgacctcgggaggctggactgcgggcacgacttccacgctggctgcatcaagcaatggctggtggtgaagaacgtgtgccccatctgcaagagcaccgcattgaagaagacctgaaacccgaacgaaggctcgtgtcagagacccccccccccccccccatgtttctatgttcactcgatggttcgcgagatcatttgccgattcgtattgctacgctttttttttggtcgggaaaattttgccagccacctgcgattgggaaaggaaaagggagagaaaaagagagagagagaggatgcggttgcggtcctctgtaaactgctgctgcagtaaataatccctggaatgtctcccttgcattcaaccaaatatttagt

SEQ ID NO: 35071 - DNA, 1679 bp, Zea mays subsp. mexicana
  Clone ID: UC-ZMFLTEOSINTE070F06_FLI
ggttgttgtttcaataggcaagcactttatggttatgggcctccatctctgcctgcacttccaaagtcttcgatttgttcctggtgttgctgctgctgtcccaagaaaaaggttgaaagaagtgagagggaaatcaacagagactctcggcgagaagacctcgagtctgccatttttaaccttcgcgaaattgacaactacgatgagtacgagaggtccatgctcatctctcagatgagcttcgagaagtcttttgggctgtcctcggtctttattgaatcgacccttatggagaatgggggcgtccctgaatctgcaaacccatctaccctaattaaagaagccattcatgtcattagctgtggatatgaagagaaaactgaatggggaaaagagattggctggatctatggttcagttacagaggatattctgactgggtttaagatgcactgccgtggctggagatccatctactgcatgccggtgagacctgcattcaagggatcagccccaatcaatctttccgatcgtcttcaccaagttctccggtgggctcttggttctgtcgagatcttcttcagtcggcactgcccgctgtggtacggttacggtggcggccgtctgaaatggctccagaggctctcctacatcaacaccatcgtgtacccgttcacttctcttcctctcgttgcctactgttgcctgcctgccatttgcctgctcacaggaaagttcattattcctacgctgtccaacgctgcaacgatatggtttcttggcctcttcatgtccatcatcgtgacgagcgtgttggagctgcggtggagtggcatcgggatcgaggactggtggcgcaacgagcagttctgggtcatcggaggcgtgtccgcgcacctgttcgccgtgttccagggtatcctcaagatgattgccgggctggacaccaacttcacggtgacggcaaaggccacggacgacactgagttcggggagctgtacctgttcaagtggacgacggtgctgatcccgcccacaagcatcctggtgctgaacctggtgggcgtggtggctgggttctcggccgcgctcaacagcggctacgagtcctggggcccgctcttcggtaaggtgttcttcgccatgtgggtgatcatgcacctgtacccgttcctcaagggtctcatgggccgccagaaccgcacgccgaccatcgtggtgctctggtccgtcctcctcgcctccgtcttctccctcctgtgggtcaagatcgacccattcgttggaggaaccgagaccgtcaacaccaacaactgcaacacgatcatctgctgattcaccatcggtcagctgctgtcgtgccgcggcggacgtgtttctggtgttgcaaacgtgggttgcctgcctgatgcgggtctcctctgtctatctcgcatctgggcttttgccccaggatctgaagcgggttgtgtaggttagctttattttgcgtccaagtgttgattgatgttgtctgtgttatgaaaagttttggtggtgaaacctgaaatgttaaaactgggctcaattgtgagaaggcactgttttttaagtgtgtgtaaataataggaacgtgggaaaaaggaactgagaatcatttgcctaccaaaaggtgaaaccaattacattagtggatcttg

SEQ ID NO: 35072 - DNA, 1788 bp, Zea mays subsp. mexicana
  Clone ID: UC-ZMFLTEOSINTE071C04_FLI
gacgaaaactctcctctgactccgctccacccccttctctcacttgtctatcggggccgtcacctccgctgggctgctggcctccccactttgcagttgctgcacaggcaagacacggaggcaggcaccacgagtccacgacgcccgctcgcgcgctccgtgaatcccctcgtgactcgtgagggctcgaggcccgacgggaggacgaggaggcaagaaccctagcgccggcgccggcggcccgtaaggctgctgagtgaaaatgggagtggcaggtcacaacgatccattgttaggtgaaacgacatgtgggtctttgctgcagcaacttcagctgatatgggatgaggttggcgaaagtgatgaagatcgtgacaagatgttacttcagctagagcaagagtgcttagatgtttataggagaaaggttgatcaggcttctagctccaggtcatgtctcctccaacagctttccaactccaaatcggaactgactagactcctttctgcattaggagagtcatctatttctggtgctcctgacaagacatctggtacaatcaaggagcaactagcagctatatcaccatctttagagacactccgcaggaaaaaagagagtagggtgaaagagtttgctcatgtacaacttcagattcagatacttcgtgatgaaattgctggggatctacatattggtgaacagttggaaacaccccatgttaatgcggatgatctttcagtgaggagattaaatgaatatctttctgaactacaagccctgcaaaaggaaaagagtactaggctctcaaggattcttgaatccgtgagttcagtgcacgatctctgttctgtacttggcatggattttgtgggcactgttactaaagttcatccaagtcttgatgactctgttggtgtccaatccaagagcattagtggcgaaacaatatccaagctgtctaaaatggtgattgtacttgaagaagaaaaatcgaagaggtttgcaaagattcaagctctagcttcccagctatctgatctttggaacttaatggattctcctgtggaggaacagcaaccttttcgtcacgtaacatgcataatgtcctcaacattggatgatgtgatagttccaggagctctggctcttgatgtaattcagcaggcggaactcgaagttgaaaggcttgatcagctaaaagctagtaggatgaaggatattgcattcaagaaacagactgaacttgaagatatatatgcccgggctcatgttgcagtagattctagtgctgcaagagataggataatgtctattattgagtccagtagtttcgagccttcagaactactggctgatatggagaaccagatacttaaagcaaatgaggagtccttaagcagaaaggacatattggagagggttgataggtggatgtcagcatgtgaagaagaaagctggcttgaagactacagccgggacgataacaggtacagtgcaactcggggtgcacatctgaatctgaagcgtgcagaaaaggcccgtgttttggtcaataaaattccggctattgttgacacactgcttgcaaagacccgggcatgggaacaagagcatggcgtggccttcacctacgacggcgtccctcttcttgcgatgctggacgaatacaaaatcctgaggcaggagaaggaagacgagaagcgacgaatgagggaccagaaaaagatgaacgaacagctagccgccgaacaggagaagctgttcgggtcaaaaccgagccccgc

SEQ ID NO: 35073 - DNA, 1231 bp, Zea mays subsp. mexicana
  Clone ID: UC-ZMFLTEOSINTE071E07_FLI
tgtttagccaagctgtggccaacctctgcgaggaatggagatggagtcgactcctctcttgacaccatacaagatgggcgatttcaacctggcacacagggttgtgctggcgccgctgacgaggtgccgggcgttcgggaacgtgccgcagccggagcacatggctctctactaccgccagcgggcgacgcccggcggcttcctcatcgccgaggcctgcgccgtgtcggagagcgcgcgcgggtacccggacgttccggggctgtggacccaccaacaggtcgtggcctggaagccgatcgtcgacgccgtccacgccagcggtgccgtcttcttcgcccagctctggcacaccggccgggcctccccctcagaattccaaccaaatgggcatgcaccgatctctagcacggacaagcaaatcccagcgcaggtgaaccattccggtgacgtcaacacgttcgcggtgcctcggagactagagacagaggagataccacacgtcgtcaatgacttccgggttgccgccagaaacgccatcaaagcaggctttgatggagtggagatccacgcggcaaacgggtacctgttcgatcagttcatgaaggacagcaccaatgaccgggacgactcctacgggggcagcctggagaaccggtgccgtttcacagccgaggtgatggcagccgtcgcggacgaggtcggtgccaaccgcctcggtgtgcgcctctctccgttcgcggattatatggactgccacgactccaacccagaggcgctcgcgcttcatgtcatcgacgagacgctgaacccgctcggcgtgctttactgccacatggtagagccaaggatgcgggtgaacccagacgacggtattatgactctcgagcacatgctgctaccgttcaggagggcgtttcgcgggacgttcattgctaatggaggctacgaccgtgaggaaggcaatgacgccattgcccgtggctatgcagatctcatcgcatacggccggatattccttgccaacccggaccttccgatgcgttttgccaagaatgccccgctgaacaagtatgataggagcaccttctatacctctgatccggtggttgggtacacagattatccatttctcgatcaactctaggatgattggcttataaacaatttccccacctggagtactatcttgaccttaaaataaaatgactgtcactataatattaatgtc

SEQ ID NO: 35074 - DNA, 1727 bp, Zea mays subsp. mexicana
  Clone ID: UC-ZMFLTEOSINTE071F02_FLI
ctttctcattctgcggctctgctactgctagggcgctaggcataataagagcgcgcgccagcctcgtcagtccctagtcgcaacgcaacactggtggaactccaatactcacacggcatggcggcgaagcactaccagcagcaccacttcctgatcgtcacgtacccggcgcaggggcacatcaccccggcgcgtcacctcgcgcgccgcctcggcagcgcgtgccccggggcacgcgtcaccatctgcgccccgctctcggcgttccggaagatgttcccgggcgctgccggtgtgactgtgacggaggaggagtgtggcgacggcgatgcgaaggtcaagtacgtggcctactcggacggctacgacggtgggttcgacatcgccgtagacagctacgcgcggtacatggagcaggcaaggatggcggggtcgcgctcgctggccggggtcctccgccgcctccgcgacgacgggcgccccgtcacgtgcgccgtgtacacgctgctcctgccgtgggtggcgggcgtggcgcgggaccacggcgtggcggcgacggccgtgttctggatccagccggccaccgcgctcgccgcgtactaccactacttccgcgggcaccgggacgccgtcgtggccgccgcggcgtccggggacccgtgcgccgaggtggggctcccgggcctcccgccgctccgcgtccgcgacctgccgtcgttcctcgccgtcacctccgacgacgacccgttcgcgttcgtgctcccggagttcggcgagctcgtcgacgcgctcgaacgagacgacggctcctcggagcccccgacgtacgtgctcgccaacacctgcgacgccatggagcccgacgcgctcgcgtcgctgaggccacacgtggacgtcttcgccgtcgggcccgtgctctcgttcctgcacgaagcggatgacggcaggcgcgccccgtctcctcctcgtgacgtctttgaccatgacaagtgcgggtacctcggctggctggacaccaagccggccaattcggtggtgtacatctccttcggcagctcgtcggttatgtgcaaggaccaggtcgcggagatcaccgacgccatggcgcaggtgaagaggccgttcctcttggtcctgaggaaggacaaccgcaagggccacgacgacgacgcggcggcggcggccgatgcggacagcgccggcgggatggtgctggagtggtgcgaccaggcgcgcgtgctgtcgcacccggcggtcgcatgcttcgtgacgcattgcgggtggaactcgaccctggagagcgcggcgtgcggcgtgccgaccgtcgcggttccgcggtactcggaccagggcacggccgcgtggctcgtggcggagcggatgggcaccggcgtccgcgcggcggcgcgcgcggacggcgtcgtggaggcccaggagctgaggcggtgcgtggaggccgcggcgtcgggggcggtggcggcgcgcgccgcggcgtggaagcggaatgcgtgggctgccgtggccgacggcgggagctcgcaccggaacctgacggagttcctgagacagatcggccacggtcgcggcgactaaaccagagacgtcgtattgtattgtatcacctcgacctcgttgtggtggcgttgcagccagcttgcatttctagcgaaaccatgcatacagttgattgcaatttgagcgaggacgcaatccatgtctggtttctg

SEQ ID NO: 35075 - DNA, 918 bp, Zea mays subsp. mexicana
  Clone ID: UC-ZMFLTEOSINTE071G12_FLI
gctgtcacacacacacagaggcaagtggtttccaaagccaagtgtgtactagcaaccaactagctcgggcggcagcaggcagccatcatgtcggaggagaagcaccaccacttcttcaaccaccacaagaaggacgaggagcagcccgccggcgagtatgggtactccgagaccgttgtcacggccaccggcgagggcgagtacgagaggtacaagaaggaggagaaggagcacaagcacaagcagcacctcggcgagatggtgcagcgcctcacgtaccggaagcgtcacagctacgctacgaagtccaaccagacccgagtcgtcaagaccccaggcgggaagcttgtgtaccagtacaccaagaagagggcgagcgggcccaagtgccccgtcaccgggaagaaaatccaggggatccctcacttgaggcctgctgagtacaaaaggtccaggttgcctaggagccgcaggactgtgaaccgtccttatggtggagtactctctggaattgctgttagggagagaatcattcgtgctttcttggtcgaggagcagaagattgtcaagaaggtcctgaaaatacaaaaaaccaaggacaagacagctgcaaagtaaatctccaggaatggggaagcctagccctgttttgtacactgcgaaaagtaattttggtggatggaaaatctaggtgccttgttgagcatttagcatgtgagtttagagattctggacactgaatccctttcacctttgaattgttggaatatcgggaatctgttcccctagttgcttttattatgaattcagatcctatctatgcaaagatcaaccttctggtttgtaacatcttttgtccatgttgctcgttgttgctcttgatgcccattcatatctatgcaagcagtgtgcccgtgt

SEQ ID NO: 35076 - DNA, 1582 bp, Zea mays subsp. mexicana
  Clone ID: UC-ZMFLTEOSINTE071H02_FLI
ggcggactcaaattgctgcgtcgaatgccatcaattgaatcgagtaagaccaagagtaaggatctgcaatcaggaaagcctaccttacgtgtgccaaatggaactttggacaacaataaagtagtgtcccagcgccagcgtacaagattcgcaagtagtcaatcaccaccaaagataaacaagaagtatgataacaaggaaatgaaattggaaactgtgacagctgctatgtctgatggcaagttgctttcccaaaagcaacaacatggtattgaatctaaggtggaggaatgtggcattcctatgtctgaggaagaagctgctgcattcgctgctgctgaggctgctcgagctgctgctatagcagctgcacaggcatatgcatctgtagaggcagagataagtgtgcctcgtgagcttccaaagataccgtcgttccaatcttttgtgatgcgtgatcaccatttggacgaatctgatgcaagaaaaagaacattgaaggataattttgggagacttgagtgcatatcagaaaatgattccaagaatggcgaagttaaggatttgcctgaaaacaccaagtacgctgatggtgatagcttgaaaatgtctcatgataattttactcagcagagccactctaatgagacagcttgcctagcaaacgctcaggatcattcaacagatactggtgttgtagacggtcggtttacaagggcatgggtggatactgatacaatctgcattgatggtgtcaaggatcctctagccattgagaggtggcaggcacaggcgatggaggctgataaagaattctacagtcggatacgcatacctgatgaagatgattcaagtagtcagaagcacacatgccgtagttctgcttcacagggtgccgatagcaaacctgcatctgagcggcaatcaagaggtgtggagcatataaaacagggtctcgtgaactttatagcctcgctgctgatgccattatatagaggaaaaaagatcgaccgagaggggtacaaaacaatcatgcgcaaatctgttaacaagatcattgatacatgctcagaaggagagaaatcaatgactactcttgagtttcttgatgataaaaggaaaattaagattgaatcctttgtgggcaaaatggttgacaagcatttgcatgttgttagcaagtcggccaaaccttaagattcatatgtgtagtgaggtgttctctgcaaagggatctactctcttttaaaacacctatgaatcagtgattgttgatccaagtgaactaaaatctcacttcagaagccagcatgactcatcagtgttgccgcaagatcaacaagaacacatattacccagactatatgcgtggtccagaagagcattgaccagatcaacaccatgtaattctgtacttatataggcatcatttccatcttcgtagctatagctcagtcaaaggtttagacctctgtgcactcgacaagcatgttgggcatgcagtaagcttggatgccaagttaagtttctgtggcttgatgaagtggcgtatgaagatccgggattcagtgtggtctcaaat

SEQ ID NO: 35077 - DNA, 1633 bp, Zea mays subsp. mexicana
  Clone ID: UC-ZMFLTEOSINTE072C04_FLI
ccgatctccgatcccctcgtcgatccaaagatgcagatcttcgtcaagactctcactggaaagactatcaccctcgaggcggagtcctctgacaccattgacaacgtcaaggccaagatccaggacaaggaaggcattcccccggaccagcagcggctcatcttcgctggcaagcagctcgaggacgggcgcacacttgccgactacaacatccagaaggagagcaccctccaccttgttctccgcctcaggggaggcatgcagatcttcgtcaagaccctcactggaaagactatcaccctcgaggtggagtcttctgacaccatcgacaacgtcaaggccaagatccaggacaaggagggcatccctccggaccagcagcggctcatttttgctggcaagcagctcgaggacgggcgcacgctggccgactacaacattcagaaggagagcaccctccacttggtgttgcgtctcaggggcggcatgcagatcttcgtgaagactctgactggcaagactatcacccttgaggtcgagtcttctgataccattgacaatgtcaaggccaagatccaggacaaggagggcatccctccagaccagcagcggctcatttttgccggcaagcagctcgaggacgggcgcacgcttgccgactacaacattcagaaggagagcaccctccacttggtgctgcgtctcaggggtggcatgcagatcttcgtgaagacacttactggcaagacgatcacccttgaggtggagtcctcggacaccatcgacaatgtcaaggccaagatccaggacaaggagggcattccaccggaccagcagcggctcatctttgctggcaagcagctggaggatggccgtacccttgcagattacaacatccagaaggagagcaccctccacttggtgctgcgtctcaggggtggcatgcagatctttgtgaagacattgactggcaagaccatcaccttggaggtggagtcgtctgacacaatcgataatgtcaaagccaagatccaggacaaggagggcattccaccggaccagcagcgcctgatctttgctggcaagcagctggaggatggccgtaccctcgccgactacaacatccagaaggagagcaccctccacctggtgctccgcttgcgaggtggtatgcagatctttgtgaagaccttgactggcaagaccataaccctggaggttgagagctccgacaccatcgacaacgtgaaggcgaagatccaggacaaagagggcatccccccagaccagcagcgtctgatcttcgccggcaagcagctggaggatggccgcaccctagcagactacaacatccagaaggagagcactctccacctggtgctccgcctccgcggtggtcagtaagccatggttcatttaagctgctgctgtacctgggtatctgcgtcgtctggtgccctctggtgtacctctatatggatgtcgtcgtctaataaacatctgtggtttgtgtgtcatgaatcgtggttgtggcttcgttggtttaatggacctgttgtgtcctctgtgttgtacccaaaactcttctgcagcagtatggcttgaatccttatgaagtttgatatttgaactt

SEQ ID NO: 35078 - DNA, 1276 bp, Zea mays subsp. mexicana
  Clone ID: UC-ZMFLTEOSINTE072C12_FLI
actctacctcgctgtaaagcccctgcccctcgtcctcgtcctcgtcctcgtcctcgtccaccacagccgccccgcgccctcctccgcgctccgcctcccccgccgaaccgccagcgcctggctgccgcgcttcccctcctgctcgacctcagcgccgccgccgttcgcagccgtcgcatccatggacgcgccgccccagggttaccgcaccaacgtcggcatctgcctcgccgacccatccctcaccaagattttctcggcttctaggatcgacattcctagcgcgtggcagatgcctcagggtggtatagatgcaggggaagaaccaagggcggctgccttcagggaattgagagaagaaactggtgtcacatccgcagagatcgtggctgaggctcctgtctggttaacatatgatttccccacggatgtgagaaccaagctgaatgccaggtggggaaccgattggaaaggccaagctcaaaaatggtttttatttaggcttactggaaatgatgatgagattaaccttaatggtgatggatctgagaagccagagtttggtgaatggacatggatgactccccaggaagttattgaaaaggcagttgatttcaagaaacctgtatatgaggaagcattgaaacactttgccccctacctacagtcagatccagccgcttcatcatagaagatttggccaatttgcttgcatccctgctgtatctggacccccaataatttgacacgacgcaatgtagccatgaggtgtgctacaatttgatagtgtgtggcctgtttcagtcaattatatatgccagcattggatcgtcgccctctacttagtcacataagtatacaataagtggtggaaacagtttactgtaatgaccgctacagatgcaccgtcgcatgattgggcctgtggctctagtttcagccaatctggaacatggtggccagtgtatcttgtctgccaatgactgaatgctttaggttgaagcagtaccataattccagagagactgcggtacagcaacctcaggttatgtgggggatcatcggcaaaacgacgctcgtttggcattggctacggcagatactagtgtctggctggcatttgttgtgggaggagcacagagaaaaacaaattgttagttacacactgtactactgcgtcatgatattgtcggctttcgctttgtggcttttggaggaactggagatttatttggcagctttggctttatggttcttggaggaacaggagattcac

SEQ ID NO: 35079 - DNA, 1085 bp, Zea mays subsp. mexicana
  Clone ID: UC-ZMFLTEOSINTE072D10_FLI
accccccgagctcagcttagctccactccagctccaatcacagtcgtgaccagagcgagagctagctagagggccgtgaaaatgccgatcaataggatcgccctggggagccaccaggaggtgtaccacccgggcgccctcaaggcggcgttcgctgagttcatctccaccctcatcttcgtcttcgccggccagggctccggcatggccttcagcaagctgaccggcggcggcccgacgaccccggcgggcctgatcgcggcggcggtggcgcacgcgttcgcgctgttcgtggcggtgtcggtgggcgcgaacatctccggcgggcacgtgaacccggccgtgaccttcggcgccttcgtgggcggcaacatcaccctgttccgggggctcctgtactgggtggcgcagctgctggggtccaccgtggcgtgcttcctgctccgcttctcgacgggcgggcaggccacgggcaccttcgggctgacgggcgtgtcggtgtgggaggcgctggtgctggagatcgtgatgaccttcgggctggtgtacacggtgtacgcgacggcggtggacccgaagaagggcagcctgggcaccatcgcccccatcgccatcggcttcatcgtgggggccaacatcctggtgggcggcgccttcgacggcgcgtccatgaaccccgccgtgtccttcggccccgcgctcgtcagctgggagtggggctaccagtgggtgtactgggtcgggcccctcatcggcggcggcctcgccggcgtcatctacgagctgctcttcatctcccacacccacgagcagctcccctccaccgactactaaaagccgaagccgaccgacccagggatgcgcagcgcagcgcagctagcatccagctctctctccccgctcgccgtcgatcgtttagtttctctcgtgcacgtgcatgcattgtctcaggccgccgctgcgccggcgccgctcgcatcgtttgcttttccttggaccagcagtcgtcgccgtcaggttgaactgcttgtaaccgtgaattccggacccgtttgcttctgtaagatttgtgcatttgcctgagt

SEQ ID NO: 35080 - DNA, 1268 bp, Zea mays subsp. mexicana
  Clone ID: UC-ZMFLTEOSINTE072G09_FLI
gatcagcaacttaacaacaataatggccaccgccatagttcccacggacgccgagctgctgcaggcgcaggccgacctgtggcgccacagcctctactacctgacatccatggcgctcaagtgcgcggtggagctccacatcccgaccgccatccacaacctaggcgggtctgccacgctgccggacctcgtggccgcgctgtccctgccagcggccaagctcccgttcctcggccgcgtgatgcggctgctggtgacttcgggcgtcttcgcgtcgtcgtccgagtccgacgacgtgcaggtgcagtaccggctgaacccgctgtcctggctgctggtggagggcgtggagtcggaggaccacacctaccagaagtacttcgtgctgggcaccgtctcccgccactacgtggaggccggcatgtccctggccgactggttcaagaaggaggaggacgaggaccgccagctgccgtcgccgttcgaggccctgcacggggtgcccctcgtccacgagagcaccaagctgctggacgaggagctggacagggtcgtggaggaaggcgtggccgcgcacgacaacctggccatcgggaccgtcatacgggagtgcggcgccgacgtcttcagcggcctccgctcgctcacctactgctgcggcaggcaggggaacgtcagcgccgccgccatcgtcaaggcgttcccagacatcaagtgcaccgtgctcaaccttcccagggtcgtcgaggagaaggagacgaccaagaccatcaccatcccgcctgcgcaggccgtcatgctcaagctcgtcctgcacttctggagcgacgacgactgcgtcaagatcctggagctgtgcaggaaggccatcccttcccgcgaagaaggagggaaggtgatcatcattgagatactcctgggcccgtacatggggccggtcatgtacgaggcccagctgctcatggacatgctcatgatggtgaacaccaggggcaggcagcgcggcgaagacgactggcgccacatctttaccaaggctggcttctccgactacaaggttgtcaagaaaatcggagctcgtggtgtcatcgaggtctacccgtaagctagctgctgcatgatcgatgtgatgtgagtgactgtgagaggacgatactgtacgattaaataaacggggtatctagctactcagcttttgtacgtacctcgagatccatgcatgttaattacttgcttccatctgttttcaaaatgcagctatgtattgt

SEQ ID NO: 35081 - DNA, 1235 bp, Zea mays subsp. mexicana
  Clone ID: UC-ZMFLTEOSINTE073B02_FLI
tgctgctccggtcgttgcagccgcgactgggggccggaacgagcgcaacaagcgcccacggccacaggaaggcaacagcggctcatgccctttgcaccccacagtcaccacagtgccgcagagtgccgcgagatcatcaagctcgcgaagcgcgtcagcgagcggcgcgagcagacatccaaggatggctccccacctcgtcaccgacctggcaaggagagggtcgacgacggcgatgtgaccgcgggggaacgggacctcgcgtatcagtcccccgagcaggtcctcaaggacatcctcactagagactccgactccggtgatgataccgaccgccgcaagaagttgtacgtgatgtacagcggaagctgggagctcacctcctgtaggaacgtgaagtcactgcgtcgcgaggtcctgtcggcgaccctaggggtcccgaaggcggccccacaccagcggtggcggagcacaaccatctccttcggggcatccgactgccccgagaacatggcaagggtcggcatactgccgctcatcaccgcccctgtcattgccaacatcaagctgcatcatgtgctgatcgacggtggtgctggactgaacgtcatcagccacgctgcgttcaagcagctacaaatcccaccagttggtctaacagactctagagttgctcagttggtctaacaaattattagagcgtgattttcgtctaaaatcttattttgttaacaccggatctagataaataaaatcccaccatccaaactaatagttcacccagtttaacaatagtatacttttatttcaaggtgaacaacctaaacatatcacacaagcaaaacaaggtatatacatgcaaacatggatggaatccaaattgagataaagaaattacagactctagagttgctcagttggtctaacaaattattagagcgtgattttcgtctaaaatcttattttgttaacaccggatctagataaataaaatcccactccaaactaatagttcacccagtttaataatagtatacttttatttcaaggtgaacaacctaaacatatcacacaagcaaaacaaggtatatacatgcaaacatggatggaatccaaattgagataaagaaattacagactctagagttgctcaggtggtctaacaaatggttagagcacaattcttgtctaaagtcttattttgttaacaccaaatccagataaaataaaaaacc

SEQ ID NO: 35082 - DNA, 1896 bp, Zea mays subsp. mexicana
  Clone ID: UC-ZMFLTEOSINTE073B07_FLI
gacccgacccgcagagaaaatccacggtcagcgaagggttcttctcaccgggcgaggctctcatggcggcggctgaccccgagacggcggcggcgctgcggggggaggtcgccgcgctgcggatgcgcgtacaggagctggaggcagagaatcagaggctggcaaggattgcttcgacttgtacctgcggattcaaggatggcagtgttggatccattactgcacatcataatgtgaaatttcatcaaaatagcgctatggagaaagatttgagctctccatttgatcacacagtaatatccaatgcaaatgaaatgcagtgcaacagaaatgcagatgacaatggtttgcctgaggattcaagcaagcatactaaaagaacaggtcgcaaggtgggcattttaagtcactgcccaaagcgactagttgctctcaaagtcatgtatttcggccagagattctatggtttttcttctgaaggtaacattgaaccaacagttgagtctgagatatttaaagcactggaaagagcaaaactgatggttgccaataggaaagaatcatgctactcgaggtgtggaagaactgacaaaggagtttctgctactggacaggtgatttctttatatctgcgatcgaacataaaggatgttgggggggacatgttagatgaaagatccgaaattgattatgtgaaggtattgaatagaattcttccaagagatatacgtgtactgggttggtgtcctgttccagcagattttcatgcaagattcacctgtttgagccgggaatatacatacttattttggaaaggggacctggatatattggaaatgcagaaagctgcatccaaattcattggagaacacgactttaggaatttttgtaagatggatgcagctaatgtgagtaactacaggcggcacattacagaatttactatttctgcatgtgacaaaaggtccaacaatgatgagctgtgttccatgacgatcaggggtagcgcttttctgtggcaccaagttcgctgcatggtagctgtgttatttctaataggtcaaggccttgagtcaccatctgtagttgattcactattggatattatgaaaacttctaggaaacctcaatataaaatggcgccagagcttccattgattttgcaatcttgtctatttgataaagccaactttatgtgttcagcagatgccagccggtctctgactgagcacttaaatgatgaatatcgtcaccatatgctccaagctgaaatatttcacatagcgtcatcctgtttaccttttccagaaccaaattcatcagaaacgcttcagaagaagaggaaccatattcctctcctgtcacgagagacagagccttcttacgaggagcgcatattgaaagtcaaaacgaagctggctgataatctcaagtagagccaccgttttcaattgttacaccaatacttggaagagaatttatggaactgtagaaggtttcttccaaaagcctacatgaggcaatccctctttatgccggtcttcgccttcttaagcttggcaggtttatgatgtggtctttttttatggcaaaattggatctgttaacatgtggagatggaaataaccaggaaacatgagctgagcgtggattttaccattttgaggtgttagaaaagcgtgctgcctattttagctgttctagactagacatacagactaaaacatatggagccccacgtttcgggtattgtcatgttgtgcgtttcactttcaaaatagtgtaagagccttgtgttttttttttctttctgaatttgttgtaaaatagtctaggagctatgtaatgttgttgtcgcatgatggtgtaccaaaagtgtagtaaagcatcccttgc

SEQ ID NO: 35083 - DNA, 2251 bp, Zea mays subsp. mexicana
  Clone ID: UC-ZMFLTEOSINTE073B11_FLI
gcaacacagcaagcagcagaaaacatctccgggagtccgaaccacccacaggcggcaggccacaccacaggttccgcttccgcacagctgctagctagctagcgttcgcaagtagcagtagcgttccatcgaggtcgaggcaatggcggtgatggccgaagtagtgtcgaccaccggcgcggcgctccggagcccggcctcgcagccgctgccggccgcggtgaagaacgcagacgctgagaagctccagttcatcgaggagatgacctccaacgtggacgccgtgcaggagcgcgtgctgggggagatcctcgcccgcaacgccggcaccgagtacctcgccaagtacggcctcgccgccgctactacggaccgcgccaccttccgcgccaaggtgccgatggcgacgtacgaggacctgcagccgtacatccgccgcattgccgacggcgaccgctcgcccatcctgtcggggcacccggtgtccgagttcctcaccagctccggcacgtccgccggcgagcgcaagctcatgcccaccatcgaggacgagctcaaccgccgccagctgctgtacagcctccagatgcccgtaatgaacctgtacgtgcccgggatggacaaggggaaggctctccatttcctctttgtcaagtcggagacgaagacgccgggcggcctcgcggcgaggcccgtcctgacgagctactacaagagcaaccacttcaagaaccgcccgttcgacgcctacaacaactacacgagccccacggcggccatcctctgcgccgacgcgttccagagcatgtacgcgcagatgctgtgcgggctgtgccagcgccaggacgtgctgcgcgtcggcgcggtgttcgcctcgggcctcctccgcgccattcgcttcctccagctcaactgggagcagctcgcggaggacatcgaagccggctcgctcaccccgcgcgtcaccgacctgtcggtgcgcgaggcggtcgccggcatcctccgcgctgaccccgagctcgcggcgctggtccgctccgagtgctccaagggcgactgggctggcatcatcacccgcatttggcccagcaccaagtacctggacgtcatcgtcaccggcgccatggcgcagtacatcccgacgctcaagtactacagcggtgggctcccgatggcgtgcaccatgtacgcgtcctccgagtgctacttcgggctcaacctccgccccatgtgcgacccctcggaggtgtcctacaccctgatgcccaacatgtgctacttcgagttcctgccgatggactccgcggcggcgtccggcggcgacgcgagccagctggtggacctcgcccgcgtggaggtcgggcgcgagtacgagctggtgatcaccacgtacgcggggctgaaccggtaccgcgtcggcgacgtgctccaggtgaccggcttccacaactccgcgccgcagttccggttcgtgcggcgcaagaacgtgctgctgtccatcgagtccgacaagacggacgaggccgagctgcagcgcgccgtggagcgcgcgtccgcgctgctccgcccgcacggcgccgccgtggtggagtacaccagccaggcctacaccaagagcatcccgggccactacgtcatctactgggagctcctggccaagggccccgcgggcggcgccgcggtgggcgaggggacgctggagaggtgctgcctggagatggaggaggcgctgaacacggtgtacaggcagagccgcgtggcggacgggtccatcgggccgctggagatccgggtggtccggccgggcaccttcgaggagctcatggactacgccatctcccgcggcgcgtccatcaaccagtacaaggtgccccggtgcgtgacgttcccgcccatcatcgagctcctggactcccgcgtcgtgtccagccacttcagccccgcgctgccgcactggacccccggccagcgctccgactccgactagacacgcgggccggcgagcggcgaggcgtgtccggccgggtccggcgcgcttaattagactgggaattcgttccttgcgtatcgcagacgtagaatatgcccgtgaaattaaaatatttgttaattttggaattttgggtactgtcagttagcggctttgagggtaacctgacaacctgtgatgtgatgagagttggagtcactactgaaggctgagctggtcagctgaagcaacagtcgacgcctgaaagtgttttccggcagt

SEQ ID NO: 35084 - DNA, 1948 bp, Zea mays subsp. mexicana
  Clone ID: UC-ZMFLTEOSINTE073D06_FLI
caagtgcgcgctatggagaacgaaatgctgctgaggatcaagcagtgtggtcttgacatcacgccgaagatccttattgtcaccaggttgctccctgatgcaactggcaccacctgtggccagcgccttgagaaggtccttggcaccgagcactgccatatccttcgcgtgccattcagaacagaaaacggaatcgttcgcaagtggatctcgcgatttgaagtctggccgtacctggagacttacactgatgacgtggcgcatgagattgctggagagcttcaggccaatcctgacctgatcatcggaaactacagtgatggaaaccttgttgcgtgtttgcttgcgcacaagatgggtgttactcactgtaccattgcccatgcgcttgagaaaactaagtaccctaactccgacctctactggaagaagtttgaggatcactaccacttctcgtgccagttcaccactgacttgattgcaatgaaccatgccgacttcatcatcaccagtaccttccaagagatcgccggaaacaaggacaccgtcggccagtacgagtcacacatggcgttcacaatgcctggcctgtaccgcgtcgtccacggcattgatgtgttcgaccccaagttcaacatcgtgtctcctggcgcggacctgtccatctacttcccgtacaccgagtcgcacaagaggctgacctcccttcacccggagattgaggagctcctgtacagccaaaccgagaacacggagcacaagttcgtgctgaacgacaggaacaagccaatcatcttctccatggctcgtctcgaccgtgtcaagaacttgactgggctggtggagctgtacggccggaacaagcggctgcaggagctggtgaacctcgtggtcgtctgcggcgaccatggcaacccttccaaggacaaggaggagcaggccgagttcaagaagatgtttgacctcatcgagcagtacaacctgaacgggcacatccgctggatctccgcccagatgaaccgcgtccgcaacggcgagctgtaccgctacatctgcgacaccaagggcgccttcgtgcagcctgctttctacgaggctttcgggctgacggtggttgaggccatgacctgcggcctgcccacgttcgccacagcctacggcggtccggccgagatcatcgtgcacggcgtgtctggctaccacatcgacccttaccagggcgacaaggcgtcggccctgctcgtggacttcttcgacaagtgccaggcggagccgagccactggagcaagatctcccagggcgggctccagcgtatcgaggagaagtacacctggaagctgtactcggagaggctgatgaccctcaccggcgtgtacgggttctggaagtacgtgtccaacctggagaggcgcgagacccggcggtacctggagatgctgtacgcgctcaagtaccgcaccatggcgagcaccgtgccgctggccgtggagggagagccctccagcaagtgatgcgtgacggcggccacagacctgatcgatcgatgagcgagagggagcactcggagtgtcgtgtcttttcccttgccatttctttctttcttctttttccttcccggaggcgaaaaaaaagagtctgcttttgctaggcggcgggcgttcgttgctgctctttgcttcaagagttaaatttacctaccttgtcaaggtcttgttccatcattgatccgggtgtcgcttttttagtagtctgatggactgttagtagtttgcgttgcgtcggttgagagggaacggtggtggtggtggtggtggtgtgtgtgcagtcgggtgtggtgctcccgttgtttcctggatgggatgttgctccttgaataataatcgtagtggccttggagcccttttcctgaaataagagcagcatcctagtgcttcactttgcagctgt

SEQ ID NO: 35085 - DNA, 2225 bp, Zea mays subsp. mexicana
  Clone ID: UC-ZMFLTEOSINTE073G03_FLI
ggctgggatggcaatgcgaggcgcctccgccgcgctgctcgtgctggcgctcgtcgccaccgtggcgcgcgcggaggacccctaccatttcttcgagtggaaggtgacgtacgggacgaagaccatcatggggacgccgcagaaggtgatcctcatcaacgacatgttccccggccctaccatcaactgcacatccaacaacaacatcgtcatcaatgtcttcaacatgctcgaccagccgctcctcttcacctggcacgggatccagcagaggaagaactcgtggcaggacggcatgttgggcaccatgtgcccgatccagcccaacaccaacttcacgtaccactggcagcccaaggaccagatcggcagcttcttctattaccccagcaccggcatgcagcgggcggcgggcgcctacgggctcatcagcgtccacagccgtgacctgatcccggtccccttcgacacgccggccgacgacttcccggtcctcgtcggcgactggtacaccaaggaccacgccgtcctggccaagaacctggacgccggcaaggggatcgggcggcccgcggggctcgtgatcaacggcaagaacgagaaggacgcgtcgaacccgcccatgtacaacgtggaggccggcaagacgtaccggttccgcgtctgcaacgtgggcatcaaggcgtccttcaacatccgcatccagaaccacatcatgaagctggtggagatggagggctcccacaccatgcagaacgactacgactcgctggacctccacatcggccagtgcctgtcgttcctcgtcaccgccgaccagaagcccggcgactacctgctggcggcgtccacccggttcatcaaggaggtgaacagcatcacggccgtgatccgctacaagggctccaacgccccgccgccggccaaggtgccggagagccccagcgggtgggcgtggtccatcaaccagtgcaggtccttccgctggaacctgacggcgagcgcggcgcggcccaacccgcaggggtcgtaccactacggccagatcaacatcacccgcaccatcaagctcgccatgggccgcggcaaggtggacggcaaggagcggttcggcttcaacggcgtgtcgcacgtcgaccccgagacccccgtcaagctcgccgagtacttcaacaccaccgacggggtgttccagtacgacatcatcggcgacgtgccgccctccaagtccgcgcccaccaagatggcccccaacgtcatccgcgccgagttccgcaccttcatcgaggtggtcttcgagaaccccgagaagagcatcgacaccatccacatcgacggctacgccttcttcgccgtcggcatgggcccgggcaaatggacgccagcgtcccggagcacgtacaacctcctggacacggtgagccggcacacgatccaggtgtaccctaggtcgtggacggcggtgatgatgacgttcgacaacgcgggcatgtggagcatccggtccaacatctgggagaggcagtacctcggcgagcagctgtacgtgagcgtcatctcgccggagcggtcgctcagggacgagtacaacatgccggagaccagcctccgctgcggcaaggtcgtcggactgccaatgccgccgtcctacctctccgtctagagcatgcatgcatctcggtttccccttccttccttccatcacgtgcgcacggtgctgtatacacaatttaaaggagcgtgagggcagcggcttctctcgtttccttcttctctagctttgtcccccctagctcgtttcttctctcgtcgtcccgtcgtccggttcatttccgcttccgaggaataataatcaaccaaaggggctctgctctatctcaagaagacttcattcatgtgggcacaccagcagtcactcactgtcactgccaggggcgggcgaccagggaaattaagaggcgatggtcagctgcaaatgcatgcatgcgtaaacacatcgagacgccgtctcgaaccattgtaggagttaagtatatgatgattgatgatatatgagcctgtctatctaataagtccctcagccaaaatttgttcttttatatttatgtatatgtacatgcatatatgtctcctgattcaactttgatgtttattgtctctttcgctgtcgtactgaacttctccgtgtaagttgatatatggatcaatagattgttattcactat

SEQ ID NO: 35086 - DNA, 2064 bp, Zea mays subsp. mexicana
  Clone ID: UC-ZMFLTEOSINTE073G09_FLI
ggccatctctcagtctcacacgcgctgccatggacggatccatgtggtgcgctgccaactacgtgcctctgacgccgctcagcttcctggagcgcgccgcggtcgtgtacggcgaccgcgcggccgtcgtttgcggcgataggcggttctcgtggcgcgagacgagggagcggtgcctcgccggggcagccgctctcgctcgtctcggcgttggccgccgcgacgtggtcgcggtcatcgcctcgaacgtaccggcgatgtacgagctccatttcagcgtgccgatgaccggcgccgtcctgtgcacgctcaacacccgccacgacgcggccatggtgtccgtcctgctgaaacactcggaagccaaggtcttcctcgtggagtcgcagttccacgccgtggcccgcgacgcgctcaggctcctcgccgacgccaaagacaggcttcctctcgtcatcacggtttctgaccctagcagcagcagcaccggcggcggctgcggcagcaacgacggcagcgtcgcggtcgcggagtacgaagcgcttctgcggagcgcgccgcgcgacttcgaaatccggtggccggccgacgagcgcgacccgatatcgctgaactacacgtcgggcaccacgtcgaggcccaagggcgtcatctacagccaccgcggcgcgttcctcaacacgctggccacggtgcttgtcaacgagatggcgaccatgcccgtctacctctggaccgtgcccatgttccactgcaacgggtggtgcatggtgtgggccaccgcggcgcagggcggcacgagcgtctgcatcggcggcgtgtcccccggtgtggtctttgaccacatcgtgcgccacggcgtcaccaacatgggcggcgcgcccacggtgctcagcatgctcgcgaacgcgccggcggcggatcggaagccgctgccgaggagggtccgcatctccacgggcggcgcgccgccgccgccgcaggtgctggccaagatggacgagctcggcttcgacgtcgcgcacgggtacgggctcaccgagacgtacggcccggcgacgacgtgcgtgtggaaacccgagtgggacgcgctgccgcccgcggagcgcgcccggatgaaggcgctgcagggcgtcgctcacgccatggtccaggaggtcgccatcaaggacccggcgagcatggagacgttgccctccgacgggcgcgccgtgggcgaggtgatgctccgggggaacacggtcatgggcgggtactacaaggacgcggcggccacggaggaggccatgcgcggcgggtggctgcgcacgggcgacctcggcgtgcgccacccgaacgggtacatccagctcaaggaccggtccaaggacatcatcatctcgggcggcgagaacatcagctccatcgaggtggagtcggtgctgttcgggcaccccgcggtgctcgacgccgcggtggtcgcgcggcccgacgaccactggggcgaggcgccgtgcgcgttcgtcacgctcagggacggcgcgagagccaccgcggacgacatcatccgcttctgccgggctcggctgccgcactacatggcgcccaggacggtggtgttcagcgacctccccaagacttcgaccggcaagacgcagaagtatctgctccgggaaaaggcgagggccatgggaagcctgcgcaagccagatcgaagcaggcttagttgacctgttgctgggaacagtccactggctgcattcctggcagcctgctgatagttttatcttggtcaactacgcttagccatcatcgatcaggcctagtttggatactctagtaatgattgggattggagtggattaagatgtattgagagagtatttaatctattgagaatttgcaccatctctaatcccttcgaaacacttcaatcccaaagtatccaaactagccctgagcgctgatgggcacacccgggcattcagtcatgccctcgtgctttcacagtcagtacgttgcacatggacctgtacggtgaaatagtattgcaggacttggccattcatggaatgctttaaaaac

SEQ ID NO: 35087 - DNA, 1177 bp, Zea mays subsp. mexicana
  Clone ID: UC-ZMFLTEOSINTE075A11_FLI
gctgtttgttgggaatgtgccaaaggggctgagcgaggaggagcttaccaacactatcaaggggaagggtccaggtgttatcaacattgagatgtttaaggatcagcatgacccaaaccgtaaccgtggtttcctctttgttgagtattacaaccatgcctgcgcagactatgccaggcagaaactttcatctccaaacttcaaggttgatgggagccaattgactgttagttgggctgaacctaagggttcaacagatgcttcatctgcagctgctcaggtgaagactatatatgtgaagaacctacctgaaaatgtttctaaagagaagataaaggacctgtttgacaaacatggagaggtcacaaaaatcgttctgcctcctgccaaggctggtcataagagagactttggctttgttcactttgcagaaagatcaagtgcattgaaggcagttaaaggaagtgaaaaatatgaaatcgatggtcaagtactggaagtgtccatggccaaaccattggcagataagaaacctgatcattcacacaggcctggaggaggccctaattatccccttcctccctatggtggtggtggctacatgggagatccatatggtgcttatggtggcggcggtcctgcatacaaccagccaatgatatatggcagaggaccagcaccggcaggaatgaggatggtgccgatggtgcttcctgatggccgccttggctatgtcctgcaacaacctggtggaatgccgcctccgcccccaccgcggaggggtagtgaccgaagagacagtggcagaggtggcgaagggcacagccggcgatatcgcccttactagcttttcccttatgggctctactcccatcatgtggtatgaagcgtttaacttatgagatgagataggagcctgtgttcttgtcccagtataaggtctgcgatggcacgatgcttgtaccatctgtttcttcggtgacttatttttatcatgcagtgcatgtgacttgaaactgtgatggacttgtattgctttctgccttatggcacctgtagtagtgaactgatgaaggaagttcatgcggacactgaagctttgttggcttagaatggtaattttgctgtattctatttcacaggagataatctgtccggaccttagcaattgccgttc

SEQ ID NO: 35088 - DNA, 400 bp, Zea mays subsp. mexicana
  Clone ID: UC-ZMFLTEOSINTE076H08_FLI
ggcagattccatcggcgcaaagtacatccatggaaagttggaggagtggacaaagcggtatgggggcttcttcaagccctgctcttacctcgctgaaagagctgcaaaagggattcctctgagtgcaccaacaaagaaagttcaggctcggctataagatgatttccttgtggatggaggagacaataatggattccggtgaagcatttggaatgcgtagagctgtaggctaccactatcacatgcatgtaacgcaatatactactgtgaaaataaagtgcactgcacggcggtttttttatatataaatacaaggatttttttcttgtcacctgtaaaaatttaaacagattttttgtggaatctcatgagaactgaggcaccgctccaaattctaaac

SEQ ID NO: 35089 - DNA, 1195 bp, Zea mays subsp. mexicana
  Clone ID: UC-ZMFLTEOSINTE079B09_FLI
cagatggaagtgatagccttgagggttttgtcctttgtcattctattgctggtggaactggttcaggtatgggttcttatctgttggagacactgaatgatcgatacagtaaaaagcttgtgcagacatatagtgttttcccaaatcagatggaaacaagtgatgttgtcgtccaaccttacaactcacttttaactctgaagcgtctgacactgaatgctgactgtgtggtggttcttgacaatacggctcttaataggattgcggtcgagcgtcttcatttatcaaatcctacatttgcacaaacaaactctttggtctccacagttatgtctgcaagcacaactacattgcggtatcctggatatatgaacaatgatctggttggccttcttgcctccctgatccccactccaaggtgtcattttttgatgacaggctatactccactgactgttgagcgccaggttaacatgatacgcaaaacaacagtattggatgttatgagaagacttctgcagacaaagaatgtaatggtgtcatcatatgctcgaacaaaagaagccagccaggctaaatatatctccatattgaacatcattcaaggggaggtggaccctacacaggttcatgagagcctgcaaaggatacgtgaaaggaagcttgttaactttatagactgggcacctgcaagcattcaggttgccctgtcaagaaaatccccatatgttcaaacaacccacagggttagtggtctgatgttagctaatcatacgagcatccgccacctgttcggcaaatgcctgggacaatatgaaaagctaaggaaaaagcaggcttttcttgacaactataggaaattcccaatgtttgcagataatgatctctctgaatttgatgaatctcgagagataatagagagcctagttgatgaatacaaggcctgtgagtcgccagactacattaaatggggaatggaggaccctggagaggcaaacgttgcagcagatcttgactctaagttggtagtgtaaatataaaggtaccatttcatgaatcatgatcaggcactttatatgcggaaacaatttgatgtcctatcatattgattattgattgaattgacaatccacttgaacaccactctttcttttgatagccatgtggactacatcaattattataaatgatccac

SEQ ID NO: 35090 - DNA, 737 bp, Zea mays subsp. mexicana
  Clone ID: UC-ZMFLTEOSINTE079E09_FLI
tgagtggtgacatggatggatatagaataatagataaatcacaacgaacacaagctctcgatctcaccgacaccgaggaagaagagatcaatggcgtccgagcagggagtcgtgatcgcgtgccacaacaaggctgagttcgacgcccacatgaccaaggcccaggaagccggcaagctggtggtcatcgacttcactgccgcctggtgcggtccatgccgcgccatcgccccactgttcgtcgaacacgccaggaagttcactcaggtcgtcttcctgaaggtggacgtggacgaagtgaaggaagtcaccgcggcctacgaggtcgaggcgatgccgaccttccacttcgtcaagaacggcaagacggtcgcgaccatcgtgggtgccaagaaggacgagctcctggccctgatcgagaagcatgccgcgcctgcgcctgcgtctgcgtctgcctaaatgagatcagatcagccgtcgccgtcaataagggccagcacatatggctgtaaatgttgtcgttatcagttctggctttgtcgtttgtgggcgattgtgaactagtagtatgtttgtttctatccgagccggaggcgatacttaaccatggatacttgttgtgagttcgtttctgttcgcgtgtgactcttgaattgaatcaaccagctcaccactgcagccggggtgagtggtgacatggatggatatagaataatagataaatcacgttgcgctgc

SEQ ID NO: 35091 - DNA, 1924 bp, Zea mays subsp. mexicana
  Clone ID: UC-ZMFLTEOSINTE080A08_FLI
aaaactccgccacgcccgcccggaggtccgaccgacgcctagaccgttccaaagggaagggagcacgcgcgcgaggtagagcagcggcggcggcggcggcaggagtgaggcaggatgtcttcggtatacgtgcttgagcccccgacgaaggggaaggtggtggtgcagacgacggccggcccgctcgatatcgagctgtggcccaaggaggcccccaaggcggcgcgcaacttcgtgcagctctgcctcgagggctactacgacggcaccctcttccaccgcgtcatcaagaatttcctcgttcagggtggcgaccccactggctccggcactgggggtgagagcatctatggggctccatttgcggatgagttccactcgcggctgaggtttaaccacaggggtttagtggcttgtgccaatgctggcacatctcattctaatgggagccaattctttatcacccttgaccgttgtgattggcttgataagaagaacaccatctttgggaaggttactggtgattctattttcaaccttctttccttggccgacgttgagactgataaggatgatcgacctgtgtacgtgcagaagattctttcagtcgaggttctctgggacccatttgaggatattgttccaaggcaacttaagaaggctgaatctgttgctaaggctgatgctgaggtgaaacccaagaagaaggcagttaagcaacttaacgtcctctcgtttggtgatgaagtagaagaggaggagaatgaagcagctacctctgttcaggccaaaataaaaagtattcatgatgtgttggacgatccccgttttcttaaaggggaaccggaggatgtacagttgtccaaggagcaagaggagatgaaaaaggttactgttcaaactgtcagggatgctttgatctcaaagaaagttgaatcaagggagcaagagaatgctccattatctgatgattttcctgaagacgagaatgaagaggattttgataacaggatgcgcgcacaaatccttaaaaaacgtagagagcttggtgatgtttgccctcgtgaaacctctaaagcagataaacctcatcataaggataaggaattatcagaccgcaggtccaatattgaacataggagggacactgatgaggacgatgatcaggagcatgagctccaaaaagctaaaaaactatccttgaagaaaaaaggtgctggctcagaagcgagtgctgagaggatgtccaaagcagatgctaatttgcagctactaaatccagctgaacaagagagacatttgcaaaaacagaaaaaacgtcggctccaaggccgtgaagatgagactctagcgaagttacagaagttcaagtcttctttcctcagtaagaatcttgctaccaatcatgtcgaagaaaagaatccttctactggtaaggcggaaaaggaagatgaagaggaggatgactacaaagggtggcacacaaacctactgtctttcttacccagttcttccaaggatggaatggctaggaaagatgatccagatgactatgtagtggtagacccacttctggagaaaggaaaagaaaaattcaacaagatgcaagcaaagcttaagcggagagagcgcgaatgggcaggcagatctctcacctgattggaaagcttaactcaaattatgtcaatgctccttacgtccttacctaccctggacggttggaaacactggaaatgatgcagttttggcatggtcttgggactgcgcgcagatgattggtagcgaccgtttgtggactagtgttttcttttttggcatgtgtcatgattgcttacactgtaaatgcaattgtacaatagattggttataagctcactgtgaaagcagctctctgtatcactagctatttaatatccgtttcttc

SEQ ID NO: 35092 - DNA, 1644 bp, Zea mays subsp. mexicana
  Clone ID: UC-ZMFLTEOSINTE080B02_FLI
attggagggaggcccctgcccaaggcaagagaaaccgcggcgcgcggagagggaggaagggcagacgcagacgcagacgcagacgcagacgggcgaacaagatgagggagatcatcagcatccacatcggccaggccgggatccaggtcggcaacgcctgctgggagctctactgcctcgagcacggcatcgagcacgatggcaccatgcccagtgattcctcggttggcgtcgcacatgatgccttcaacacgttcttcagcgagactggttccggcaagcatgtgcccagggccatcttcgtcgaccttgagcccactgtcatcgacgaggttcgcactggctcgtaccgccagctcttccacccagagcagctcatctcggggaaggaggacgcagctaacaactttgcccgtggccactacacggttgggaaggagattgtcgatctatgcctggaccgtgtgcgcaagcttgcagacaactgcactgggctgcagggattcttggtgttcaatgctgttggtggtggtactggctctggacttggttcactgctgttggagcgcctttcagttgattatggcaagaagtctaagcttggtttcaccatttatccttccccacaggtgtcaacagctgttgtagagccatacaacagtgtcctctcgacccactccttgctcgagcacactgatgttgcagtcctcctggacaacgaggctatctatgacatatgcaggaggtcccttgacatcgaaaggccaacctataccaacttgaacaggctgatctcacagatcatatcatcacttaccacctccctgaggtttgatggggctatcaatgtggatgttactgagttccagaccaaccttgttccatacccacgtattcatttcatgctttcctcatatgcccctgtaatatctgctgagaaggcctaccatgagcagctctctgtgcctgaaatcaccaatgctgtatttgagccctcaagcatgatggccaagtgtgacccaaggcacggaaagtacatggcttgctgcttgatgtaccgcggtgatgttgttcctaaggatgtcaacgctgcagttgcaaccatcaagaccaagagaactgtccagtttgtggactggtgccccactggattcaagtgtggcatcaactatcagccaccctctgttgtccctggaggtgacctggcaaaggtccagcgtgccgtgtgcatgatcagcaacaacaccgccgttgccgaggtgttctcacgcatcgaccacaagtttgaccttatgtacgccaagcgtgcattcgttcactggtatgtcggtgagggtatggaagagggtgagttctcagaagcccgtgaggacttggctgctcttgagaaggactatgaggaagtcggtgcagagggtgccgatgatgagggtgacgagggagacgactattgagtagctggctaataagtagttctctggtggttaatggttgggttattttgagtatatactctatggttccactccattggatactgctgctgtgtgtttccattttgtactatgtagtaaattgttcgtagccccctattggccatgattgttcatatcatccttctttggtttgcaacgctattcgtcc

SEQ ID NO: 35093 - DNA, 1832 bp, Zea mays subsp. mexicana
  Clone ID: UC-ZMFLTEOSINTE080C04_FLI
cacgctgccctcggcgctgcgcctggccccggcacctacctcccccctccccacctcgccgccggcgggtggagtcgggctggagcagccgctctcctctgttaccccctaaccccctataaagaaaaagaaaaaaacagagagagagcgagcgaccggcggctcggcagccatggggcacggcgtcagctgcgcccgcaccggtgacgagcacgactacttccgcgcggcgcaggtcggggacctcgaggccctggaagcgctcctcgacgctgacccctcccttgcccgccgcgccacgctctacgaccgcctctccgcgctccacatcgccgccgcgaatggccgcctcgaggtgctgtcaatggtcttggatcacggggtgccgccggacgtggtgaatcggcacaagcagacgccgctgatgctcgcggcgatgcacggcaagaccgactgcgtgctgaagctcctgcaggccggcgccaatatcctcatgttcgactcccagcacgggcggacctgcctgcaccacgcgtcctacttcggccacgtcggctgcctgcaggccatcctcacggcggcgcggaccacgccggtggccaactcatggggtttcgctcggttcgtcaacgtgagagacgaccacggcgccacgccgctccacctcgccgccaggcagggccgccccggctgcgtgcaggcgctgctggagaacggtgccatcgtctccgctttgaccggctcatacgggtttcctggtagcacgtcgctgcacctcgccgctcgcagcgggagcctggattgcacccggaagctgctcgcctggggagcggatcgtctccggagggattcagcagggaggatcccttacgccgtggcgctgaagcgcaaccacgaggcgtgcgcggcgctgctgaacccgtcggcggcggagcccatggtgtggccgtccccgttcaagttcatcagcgagctggagccggaggccaaggcgctccttgaagcggcgctgacggaagccaacagggagagggaggagaagatcctcaggggcaccaagcactctccgcatcctcccacctgggaccacgcgagcgacgccgccgacgccgacgccatcgacgacgcgtcctcagatgccagcgccagcgacgcggagctgtgctgcatctgcttcgaccaggcgtgcacgatggaggtgcaggactgcgggcaccagatgtgcgcgccgtgcacgctcgcgctgtgctgccacagcaagcccgacccggtgacgctagcgctgccgtcgccagcctgcccgttctgccgcggcagcatctcgcggctgctgctggtggcccgggcaagcagcgacgacgcagacaccgagaagtcggcggcagcggctgcggcagcggctgcctcctccccgcagctcgtccggcggcggtcccggcggtcgcacaacctcagcgacggcggcagcagcagcttcaaggggctgtcgtccgccgtggccggttccttctccaagatcgggcgcgggtcgagccggacgatggccgacagcgacggctgcggcgtggacaagcccgagcacgacccgtgatcggcattggatcctgcgcatgtggagccgagcgcggggccatttgcggacatccaatcgaatccaagccaagcgtgactgcttgctgcgaaaataaccgcatccttttcttcttcttctccccatgtccctgtctgtcaatcctattcttgggcgtgccaggatttgttcacctggccattgccgtattccattgtcaccgaccggctatagtatatagtactagattccatttccattc

SEQ ID NO: 35094 - DNA, 907 bp, Zea mays subsp. mexicana
  Clone ID: UC-ZMFLTEOSINTE080D05_FLI
gtcaacatctcgatttcgaatttcacccagctccgcacgcgcctcaacccttcctctcgggcggcggcgccggcaaggcggcagccaaccggagcgggagctgcgatgaagaagatcttcggcgccaagaaggacaaggggccgcccccctccatccaggacgccaccgagcgaataaacaagcggggtgagacggtggacgagaagatcaagaagctggacgaggagctagccaggtacaaggagcagatccgcaagacccgccccggcccgtcccaggaagccatcaaggcacgcgccatccgactcctcaagcacaagcgcatgtacgaggagcaacgcaacatgttgtacaaccaaacctacaatctcgaccaagttggctttgctgccgatggcctcaaggatgctcagcagactatgaatgcaatgaaggcagcaaacaaggagctcaagggaatgatgaaaactgtcaaaattgatgaaattgataatatgcaagatgaaatgacagatctgatggacgtgagcaatgagatacaagaaactcttggtagaagctacaacatccctgatgacgttgacgaggaagaactgatgggcgagctagatgctttggagtctgatatggaatttgactcagctgcagtcccctcatatcttcaaccagattctgactttgatgctgacctcaacttacctgctgcaccaagtcgccctgcaatggtcccagcaggcgggctgcaggaggatgagctaggattgccagcggtgcctcgggcatcacttcgcagttagaaataatcttgtgtttcgattttaagttggtgtgaaaactctgtagtttgtgtctgagtctgaacaatctaatgcttttcgtcatggtaatgcttcagtttattgcact

SEQ ID NO: 35095 - DNA, 1249 bp, Zea mays subsp. mexicana
  Clone ID: UC-ZMFLTEOSINTE080F02_FLI
gccttccttcctgttggttgcttctttctactcgcgctcgcaccaaccagaggagcaaccgagcagtagcgactcctctgcgtgaggcctgccgtcatcccccgtgggccgtggccgtggccgtggccgtgcgcaaaaaaacaaaccatcctcgattcgaccggaggggaaggagacgcgccgggagaagggggaagagacgcggcgaccatgtctccgatctgggtgttcgggtacggctcgctgatctggaacccaggcttcgcctacgacgaccgcgtcgtcggctttgtcagggactaccgccgcgtcttctaccaagggagcacggaccacaggggcacgccgcagttccccgggaggaccgtcacgctcgagcaccagcccggagcgacttgcgtaggctctttctcatgttcaccctcctactctgtcaatgtaactgctaaggacagactgattactaggacacgcaaaccaaatgaattagtaaattcatggttgatgacatgtcactcccactacgtcatgttatcatgtagtacacctgttttacttatcgttttggatagcttggtaatcctcttagcagttcatgcgattgattttgcgagctaatctgtctattttacatcttttagtggggagttgcttacagaataaaggaggaagataaggagatagctttggagtatcttgaagtcagggagaagcaatacgatgagaaggtttaccttgacttgtatactgtaagataagagggctggatctatttccccttggataatgttcgatatgtaactattacggagtattaagttgtaataactttcaggattcatcacccaaagtaccagctgtcgaaaacgtgatggtatacttcgccaccagtaacaaggagaacaaccaaaactatcttggtcctgcacctctggaagaaatgaccaggcaaatttaccttgctcaaggcccatctggacctaacaaagagtacgtgttcaaactcgaggatgcgttacacaaaataggagttgtagaccaacatgtccaagaactggcaaatgctctgcgtgagtattctgacaccgagctatctaagtgaaagatcacatttaccccttgtttggagggtaaggatttataaataaagttagaattcattcatgcatgtcccaacatggatatattcttgtaagctgcgttttgagtgagtacattacgattatattcctgggcacatgtggtttgc

SEQ ID NO: 35096 - DNA, 1611 bp, Zea mays subsp. mexicana
  Clone ID: UC-ZMFLTEOSINTE080F06_FLI
gggtgcgcctccatttcggcctctgtcccttgcaagttcaatctcacctccaaccatgggtaaagagaagtcccacatcaacattgtggttattggccatgtcgactctggcaagtcgaccaccacaggacaccttatctacaagcttggaggcattgacaagcgtgtgatcgagaggttcgagaaggaggctgctgaaatgaacaagcggtccttcaagtacgcgtgggtgctcgacaagctcaaggctgagcgtgagagaggtatcaccattgatattgctctgtggaagtttgagaccaccaagtactactgcacggtcattgatgcccctggacaccgtgacttcatcaagaacatgatcactggtacctcccaggctgactgtgctgtccttatcattgactccaccactggtggttttgaggctggtatctccaaggatggccagacccgtgaacatgctctccttgcgttcacccttggagtgaagcagatgatttgctgctgcaacaagatggatgcaaccactcccaaatactccaaggcacgttatgaagagattgtgaaggaagtctcatcctacctcaagaaagttgggtacaaccctgataagattgcctttgttcccatttctggttttgagggcgacaacatgattgagaggtccaccaaccttgactggtacaaaggcccaaccctgcttgaggctcttgaccagatcaccgagcccaagaggccttcggacaagcccctgcgtctgcccctccaggatgtgtacaagattggtggtattggaactgtaccggttggtcgtgtggagactggtgtcatcaagcctggtatggtagtcacctttggtccaactggcctgactaccgaggtgaagtctgttgagatgcaccacgaggcacttcaggaggctcttccgggtgacaatgttggcttcaacgtgaagaatgttgctgtcaaggatctcaagcgtgggtttgtggcctccaactccaaggatgaccctgccaaggaggctgccagcttcacctcccaggtcatcatcatgaaccaccctgggcagattggcaacggctatgcccctgtgctggactgccacacctcccacatcgctgtcaagtttgctgagctcattaccaagatcgacaggcggtctggcaaggagcttgagaaggagccaaagttcctgaagaacggtgatgctggtatggtgaagatgatacccaccaagcccatggtggtggagacattctcagcgtatcctccccttggtaggtttgctgtccgtgacatgaggcagacggttgctgttggagttatcaagagtgtggagaagaaggacccaaccggcgccaaggtgaccaaggctgctgccaagaagaaatgatgcgatcctgcgcctgctttagcaatacctagttttcatcattacaagttttgtttgtggtcgttgctgttattgtgtgaactgttgagctctgttagcctgtgcacttttatctatttatttggtaccttcttgctatttcaccttctgcaatacaagaatgctgtaagagctatatgttaaccttttggcattgttaatttgattttagg

SEQ ID NO: 35097 - DNA, 837 bp, Zea mays subsp. mexicana
  Clone ID: UC-ZMFLTEOSINTE080G07_FLI
cccaaccgcagtaaggaggaaggagcaggaagatgccggcggggcacgggctgcggtcgcggacccgcgacctgttcgcgcggcccttccgcaagaaggggtacatcccgctcaccacgtacctgcgcacctacaagatcggcgactacgtcgacgtcaaggttaacggcgccgtgcacaagggcatgccgcacaagttctaccacggccgcaccgggagcgtctggaacgtcaccaagcgcgccatcggcgtcgagatcaacaagcaggttaacggtcgcatcatcaggaagcggatccatgtccgcgtggagcatgtgcagccctcccgttgcacagaggagttccgcctgaggaaagccaagaatgaccagctcaaggcggatgccaaggcccgcggtgaggtgatcagcaccaagaggcagcctgtgggacccaaacctggcttcatggttgagggtgctacactcgagacagtcactcctattccttatgatgtggtcaacgatctcaagggcggttactagagagaattcttgtaccttcagcagttcaaacgagctggcaaacttatctgaatctttttgataattggctagttcttctgttctggtgttatgaacccatgtggctattgctgttggcgtcaaaggattttttttattgccatggttgattgcaacctgttatttttaacttctgttttgagtttgtagattttactgagatccgtctgcattttcatttaccgatgccgaggctcaatccaagatggatttgttcagtgtattggtgttttcttgagtgctgtggttaatcggatgcggttgggcattg

SEQ ID NO: 35098 - DNA, 1653 bp, Zea mays subsp. mexicana
  Clone ID: UC-ZMFLTEOSINTE080H04_FLI
gcgtcttcgtactcgcctacctccgcggctcaaacctttcccccttctcccaattccctccgtcggccgccgctccatcccgtacgacgacaccatgagggagtgcatttcgatccacatcggccaggccggtatccaggtcggaaacgcgtgctgggagctgtactgccttgagcatggcattcaggctgacggtcagatgcccggtgacaagaccattgggggaggtgatgatgctttcaacaccttcttcagtgagactggtgctgggaagcacgtgccccgtgctgtttttgttgaccttgaacccactgtcatcgatgaggtgaggactggcacctaccgccagctcttccaccctgagcagctcatcagtgggaaggaggatgcagccaacaactttgcccgtggtcactacaccattggcaaggagattgttgacctatgccttgatcgcatcaggaagcttgccgacaactgcactggtctccagggcttcctcgtcttcaacgctgttggtggaggaacgggctctggccttggttccctcctcctagagcgcctgtctgttgactacggcaagaagtccaagcttgggttcactgtgtacccttccccccaagtttctacttcggtagttgagccatacaacagtgtactgtccacccactccctcctcgagcacactgatgtggctatactgctggacaatgaggccatctacgacatttgccgacgatcccttgacattgagcgcccaacctacaccaacctcaacaggcttgtgtcccaggttatctcatcccttactgcctccctgaggttcgatggtgctctgaacgtggatgttaacgagttccagaccaacctggtaccctacccgaggatccacttcatgctttcttcgtacgctccagtcatctctgctgagaaggcctaccacgagcagctctctgtggctgagatcaccaacagcgccttcgagccatcttccatgatggccaagtgcgacccacgccatggcaagtacatggcctgctgcctcatgtaccgtggtgatgtggtccccaaggatgtgaatgctgctgtggccaccatcaagaccaaacgcaccatccagttcgtggattggtgcccgactggcttcaagtgcggcatcaactaccagcctcctagcgttgtgcctggtggcgacctggccaaggtgcagcgtgccgtgtgcatgatctccaactccaccagtgtcgtggaggtgttctcccgcatcgaccacaagttcgacctcatgtacgccaagcgtgccttcgtgcactggtacgtcggtgagggtatggaggaaggtgagttctctgaggcccgtgaggacctggcggcgctcgagaaggactacgaggaggtcggcgctgagttcgatgagggcgaggatggcgacgagggtgacgagtactagagaagtttgctgatgacgcagcatcaggccagtgtgctgcccttatcccgtgatctgccgtgagttgctcctgctatcgtgttatgtgtgtctgttatgaagtattgtgtggtttacaacacctgatgttgtaagagtcgttaattcccctgcattgctaccgggttattgagaataattatggctgtttacgttgttgcttc

SEQ ID NO: 35099 - DNA, 2252 bp, Zea mays subsp. mexicana
  Clone ID: UC-ZMFLTEOSINTE082B09_FLI
gctcgccccaaggacaacgataacatcaaacaagagaaccaaaggaaacagagcaagagcatcgctctctaagcaaaacgcgcagcacgccggccggccacttcgcacgtacgtaggacgcgcacgcaccggtgcatatatggggctcctggaccagctgtgggacgacacggtggccgggccgcgcccggactccggcctcggcaagctccgcaagtacgcctccttctccccctcgtcgtcggcggcgccgggctccgcgccgcctcccggcgccgtgacgcatagcgtcaccatgctgcggcggccggcggcgctgtccgtcgtcacgtcgccccgcagcgagtccagctccgcgccgtcgtccccgtcgcccgcaagcggcgctccggattcgcccttcggcgcaggtgacgggctgtcgccaccatgtctctttttttttcccagctcttgctgtctgtgagtctatgtgtgtgtgtggtgtttcggtcttggccagccgaatgaatctttgggatagttagtagatgataccgtagatccgaaacaaaaaacgaagcacggcgttttaacacccggccagctgatttttgttgtatctctctgcacggtcgccatcgtgtcatgatgctagctgcagcgacgacgcccaggggagagggctggaagaagctgcgcgggaaagccaggatgggcggcggcggcggcgacgcccccggcacgccgaggagccccaccgtgtacgactggtgcgtagctatagatggccaaaaatcacgaggcccgtgagcccggcacgaagcccggtttttgggcccggtccgaacccggcacggtagaataagcgggcgggcttggacaggaaactaggcacggcgggctagcccggcacggcccgtttacctctaagcccgttaagcccggtttttttacactaaaacgtgcttaccggcccgtttagcacgttttcggcccgtttttttcgtgctaaacgggccggcccggcccgtttaggcccgctgcgggccgggcttggacagaaacttgagcacgatggcacagcaggcccggcccggtttttggccgggcttcaccgggcccgggccgggccgggccgggcggcccgtttggccatctctatgcgtagccatcctctggcccgcctgggctccctataacagcgaccaccacctctagttctaatttataaaattcattcacacgcacatatacatgtattatatttatgatatgcatatacatgtattatattatgatgatgatctactacttgctactactaccttggtttatttatcgcactgtaatcgcgtggtaccacagatatttctgaacgtaccgtacgtgctgctacaggattggtgaaaatttcaaccgctattttgatagcaaatcttaatataaataattatgtttatatgtttaatctgcattcttcatctactagccatatgtaatttacaaatagatctgagtagctatgtttcatgttttcgtttgctggaattgctactgtttattaatgttataattatatatatatagtatttatctgagttatatctttttttattcgaaattgaaatatttaatatatttaaatatgttgaaagcatgttacttatttctctataattacaacaaaaatgactagcagggacacgcaaggatcttgcttggatttgatctgacatcatctgatgtgtgtgtcgctctggttctccctcccaacggctgcagggtggtgatcagttcgctggacctctaaagcccaaggccaactgcgcgcccaagccaagacgagaactgcacaaggaaacccaccaccaccaacacagctagcgaactgaaggagggagagggcagaggggccatggcccatggccatgtaatgtgacgaccaatctctttcagagcttctggtgacgtgtccagttactatatacatacatacgttaacggtgtactgtgtgtcttgttgtaaatgtcccccctgcgaggtgttgccgattttgtaagctacgtacgtaactactacgctcggcatcagctcgtgcatgtcaccgtgtgcaagtgcaacacaaggttgtgaaaatgactagctagtagtagcaatgctgttgctgtacgagtaggcctccctctgctttgtacagggtactccaacaagtatggtttgctgtcaatctgtcatgtaaaaatgtatatagaatcctacgttcacgccc

SEQ ID NO: 35100 - DNA, 1262 bp, Zea mays subsp. mexicana
  Clone ID: UC-ZMFLTEOSINTE083B10_FLI
cgacactcgacacaggcccgcgatccgctcccctttcttccttccccggattcgcggcgatctagccggcggcgggcggcgcagcgatggcggggcaaaaccagcggctcaacgtcgtgccgacggtgacgatgctcggcgtcatgaaggcgcggctcgtcggcgccacccgcggccacgcgctgttgaagaagaagtccgacgcgctcacggtccagttccgcgccatcctcaagaagatcgtagccgccaaggagtccatgggcgagacgatgcgcgcctcctccttctccctcgccgaggccaagtatgtcgccggcgacggcgtccgtcacgtcgtcctccagtccatccgcgccgcctccgtccgcgttcgatcccaccaggagaatgtcgccggggtcaagctccccaagttcactcacttcgtcgaccccgccgcggcatccggggggccctccaacgcgtctccgagccttacgggcctcgcccgcggcgggcagcaggtcgccgcctgccgcgccgcgcacgtcaaggccatcgaggtgctcgtcgagctcgcctcgctccagacctccttcctcacgctcgacgaggccatcaagaccaccaaccgccgcgtcaacgcgctcgagaatgtcgtgaagcctaggatcgagaacaccatcagctacatcaagggggagctcgacgaactcgagcgcgaggactttttcaggctcaagaagatccagggctacaagaagagggagatcgagcgccagatggccaacgccaggcttttcgcagaggaacagctcgccgaggatctcgcgctcaagaggggcatctccgtgggggctgcggcaaatctgctggctgctggaggggagaaggacgacgacatcatcttttgatcgcctctttccatgctcatccaatcattcaatcgccctggaaacaataagttgatgctggagctccagaactgtacctgtttatagagtgatggcggtttttttttgtttcagtgagtagtctggtgcctggtcatccaagaccgatgaataatctgtacttgttgggaactaaagattgccaatgaactttaagcacgcagtggttatgtgcagttggtgtagtaaattcaattgtgctctgttttccctgtttgtgttcattatagttgtatttatatttattgagaggtgtgcgactctgaagtggcgaccaatgtatttgctgttggatatgcatgctattgaggttgtagctcgctatat

SEQ ID NO: 35101 - DNA, 1592 bp, Zea mays subsp. mexicana
  Clone ID: UC-ZMFLTEOSINTE083C05_FLI
cctcgcccagcgcagcagccgccgcagcacatcgctatctcgatctcagccatggcggaggtggagcagcaacaggacacgccgaagctcttcaaccgctggaccttcgatgatgtccaggtgaacgacatctcgctgaacgactacctcgctgtgaacgcgacgaagcacgcgatgtacctaccgcacaccgcggggcgctactccaagaagcggttccgcaaggcgcagtgcccgatcgtcgagcgcctcacaaactcgctcatgatgcacgggcgcaacaacggcaagaaggtcatggctgtccgcatcatcaagcataccctggagatcattcacctgctcacagatgccaaccccatccaggtcgtcgtcgacgcgatcatcaacaggtacagtcttaatctcggctaataaccgttaaacctactcgttactatatgttgattccattcagtatgctggagttcccccctgaaccgtgtgtgtatttctgtgcaattgaactttttcctatgaaactcatctataacttctgtgttccaaagggtatttttctttgattgccttatatattagttccatgctggttgctgctactcttttatatctgatagcatggtcctgtataaatgcctagttgctgaaattcaaattgaatgctatgacagtttcccatcatatcagagtgtgctgttgtgcaacctggtatgtctttaagctgtgtcatgctagtttaaccactagtttaaccatatggcgatgcactgcactgtttcaagttccatttaaaatgtggatatgtagtctggtgtattatctcagagtgcttttgtgcccatctgttttcatgactcatgttagttcccttcaattgtcattctttatgtcaagaatgctctatgtagccatttacatatttgagctgccaaattatcatgcaccatgcaccacaaaagtgatgtgcttttgatatgccaaattatagctcaatatatagcttacatgttgggtcgtgagatgtgaaactgttgtgatgtgctgctattgtcttgcagtggcccccgtgaggatgccacccgtattggttccgctggtgttgtgaggaggcaggctgtggatatctcacccctgaggagggtgaaccaggccatctacctcctcaccactggtgctagggagagtgctttccggaacatcaaaaccattgccgagtgccttgcagatgagctgatcaacgctgccaagggctcatccaacaggtacatatgttgcctgtttgcttcttgtctatctgtgattccacacgatgtgaaattgttctcattcgtggcaattcttgttaccagttacgccatcaagaagaaggacgagattgagcgtgttgccaaggccaaccgttgaacggagcttgtatcctgttgcactctgcgctggaaacttttatgttgctggcagtcgtatcggttcctgttttaccaatgtttagagttttttgagacctatatgcggttttggttttcagtgcacaattaaaattactgagtaatgtagttgattgggaacagaaatgtttggtgcctggtttactg

SEQ ID NO: 35102 - DNA, 1092 bp, Zea mays subsp. mexicana
  Clone ID: UC-ZMFLTEOSINTE083C11_FLI
ccacaccccccgagctgagcttagcttcactccagctccaatcacagtcgtgaccagagcgagagctagctagagggccgttaaaatgccgatcaataggatcgccctggggagccaccaggaggtgtaccacccgggcgccctcaaggcggcgttcgctgagttcatctccaccctcatcttcgtcttcgccggccagggctccggcatggccttcagcaagctgaccggcggcggcccgacgaccccggcgggcctgatcgcggcggcggtggcgcacgcgttcgcgctgttcgtggcggtgtcggtaggcgcgaacatctccggcgggcacgtgaacccggccgtgaccttcggcgccttcgtgggcggcaacatcaccctgttccgggggctcctgtactgggtggcgcagctgctggggtccaccgtggcgtgcttcctgctccgcttctcgacgggcgggcaggccacgggcaccttcgggctgacgggcgtgtcggtgtgggaggcgctggtgctggagatcgtgatgaccttcgggctggtgtacacggtgtacgcgacggcggtggacccgaagaagggcagcctgggcaccatcgcccccatcgccatcggcttcatcgtgggcgccaacatcctggtgggcggcgccttcgacggcgcgtccatgaaccccgccgtgtccttcggccccgccctcgtcagctgggagtggggctaccagtgggtgtactgggtcgggcccctcatcggcggcggcctcgccggcgtcatctacgagctgctcttcatctcccacacccacgagcagctcccctccaccgactactaaaagccgaagccgaccgacccaggggtgcgcagcgcagcgcagctagcatccagctctctctccccgctcgccgccgtttagtttctctcgtgcacgtgcatgcatcgtcgactgtctcaggccgccgctgcgccggcgccgctcgcatcgtttgcttttccttggaccagcagtcgtcgccgtcaggttgagctgcttgtaaccgtgaattccggacccgtttgcttctgtaagatttgtgcatttgcctgagt

SEQ ID NO: 35103 - DNA, 1128 bp, Zea mays subsp. mexicana
  Clone ID: UC-ZMFLTEOSINTE083E02_FLI
ctctcttccggcgactgggcagtgagctaccgccgccgccctacgccaggtgctgaggtcttcgtcgatctcgagctcccacaagggaagctgtccaggatgggatacaaccgccacaggcgtggccggggatcatcctcatcgtcttcgcgccgcaccaagcaagaagcctcgtgtgatgatggccttgggacatcacttccaaggcaagaagaaggcacagaagacgaactcaaaggttcaagaattcagcttgcaatgtgggactttggtcagtgtgatgtaaaaagatgcactggtcgtaaactttcaagatttgggcttttgaaggagttgagagtgaccaatggttttggtggtgttgttctcagccctgttggaacacagtgtgtatccaaggaagatcatcctattgtgcaaagaaaaggattggctgtggttgattgttcctgggcacgtttaagtgatgtcccttttgtgaaactacgttgcggtgctcctcgtctcttaccatggttggtagcagcaaatcctgtgaactatggccgcccatgtgaactgtcatgtgtggaagctttatcagcagccctcataatatgtggggaggaagatacagcgcatttgctgcttgggaaatttaaatggggtcacgcattcttgtctctaaacagagatctcctgaaagcatactcccaatgtgaaaatggagctgagattatcaatgtgcagaagtcctggttatcaagtaactcgagtgttccaaagccacctgtaaacggggcagaggaatcacggcaaaacacggaggagggatctgaaggtgattcagacgatgacttaccccctctcgagaagaatatgaaccacctaaacctcgacgaagacgaagaaagcgaagaagagagtgaaagcgagtaaaattgtgggctgaaagtgctgccatggtaactttacgactgttttacaactgaatttcagttgccttgcctgctacgaagcaaccgatgtaggtgcttcagtgttgaataagcttcagtgaccttttcgcccagatgttgaatgcatggttcgaaaagaaatccttgtacgcctttagtagtgtgtatctatagcactatctttgaagat

SEQ ID NO: 35104 - DNA, 1990 bp, Zea mays subsp. mexicana
  Clone ID: UC-ZMFLTEOSINTE083G01_FLI
tttgatcttgaattcttgatccactatttcgaggagaaagagggagagagatgactagctgtagttgaagccttgcaggtccaccgtcacctcgcgccgcccggcgagtcgcaggcatttgtttaagggaagggattctcttccgccgcggctgcctctgcctggctggctgcgtcgccacaccccgcgcacatcgcgctgcccagctctgctgctgctgccgctgcgtgcgcatcactggaaagatgggcctgtggggacgggctccttctttccttcaccgcgccatgaatgatgcgccttttttttgctgctttgcttccatctggctcagctctgtgcctctgtcgcccttctccttcctctcggtctcccctctgtcggtccatgctcgtctgctggctcctgcttgttgcttaggcgttcttggtcaggtgagcagcactggcggcgatggcgaaggagacggagtactacgacgttctcggcgtctgccccgccgcatccgacgaagagatccgcaaggcctactacatcaaggcgagacaggtgcatcctgacaagaatcccaacgacccacacgcggccgagaacttccaggctcttggagaggcttaccaggtgctgagtgaccctctgcagaggaaggcctatgacggctatggcaagaacagcgtatctagggagaacatactggatggtactgtggtgtttacccttcttttcgggagcgagctgttcgaggactacattggccatcttgcaatggcaacaatggcttcctccgagttgacaagcgataacgacacccccgaaaagcttcaggataggctcaagaatgtacaaagggaaagagaagaaaagctagctagattcctcaaggaattcctctctcagtatgttcgtggagacaaagaaggatttgctaatcgtgccgaagctgaggcaaagaagctctcatgcacttcatctgggttggatattcttcgcaccattggatatgtctattctcgacaggcagcaaaggagcttggcaagaaggccatgtacctaggagtgccattcgtagctgagtgggtcaggaacaagggtcatctgtggaagtcacagatcaccgcagcgaaaggggccttgcagctgttgcagttgcaagaggaggcctgccggcagagtagcaaggatggcaatgccaccgagcaggatgtcgacttgcagatgaggatgaacaaggacctgatgatgagctcactgtggaagctgaatgttgtggatattgaaatgactctgttgcatgtttgtgaaatggtgctgtctgaaaacaatgtcaagaaagatgatctgaaggcccgagcaacggccttgaaatttcttgggaaaatatttatgagggaaaaggaggcattgccagggccagcaccagcgccaggtccatcaggaccgtcgaaacgaacggttcttgacgacgacagcagctcagatgacagttcagatgatgacctgactcggacagcgccataccggactcctgcatttacccagggaatcggcaggctgttccgatgcttatgcaatccggcttatgatgttgatgatgattttgagccccacaaatgagtcctaaagaggaaggtaccaataccaatggattttccaaaggttggtgacttttgtcaagcgtatgattcagaacagtgtgaattcggatcatacgttgtgatcctttgcttgccttgaggatacacgtgtagatgctatttcatctctggtgaccagaccaacagctcagagatcctcatttttttcctcccatgaacagtagacctcctctccgtttttttaaatagatccaactgaatggtgttgagcttatgtaatcgcttgctattgttgttgtcaaaaacacaaagaagtgaaagaacaagtgcctgtaaaaatccatttctgatcctgaatcgggaattcagtgtgatgaacatcaactttttgatcc

SEQ ID NO: 35105 - DNA, 1074 bp, Zea mays subsp. mexicana
  Clone ID: UC-ZMFLTEOSINTE083G10_FLI
ggccccgagggtttagagcccaacttctctcttcacatcgccgcgaagccagctcccgacctgagatccgattgaatcgggtttcccgtcagcggcttctgcggcgggcgccatgaacagcagcaagcaggcgctgatttacagcttcgtggccaagggctccgtcgtgctggcggagcacacggccttctccggcaacttcagcaccgttgccgtccagtgcctccagaagcttccccccaacagcaccagatccacctactcctgtgacggccacaccttcaacttcctcgtcgaccgcggcttcgtgttcctagtggtcgccgatgaggcggccgggaggagcgtccccttcgtcttcctagagagggttagggaagacttcatgcagcggtatgggtccagtatcgatgaggaggggcagcacccgctcgctgatgatgctgatgaggatgactttctgttcgaagaccggttcagcattgcctacaaccttgaccgtgaattcggcccgaggttgaaggaccatatgcagtattgtgttaatcatccagaggaaattaacaagctctccaaggtgaaagcccacctatcggatgtcaaagggatcatgatggacaacattgagaagatattggatcgcggggagaagattgagcttttggtgggtaagacagagaccctacagtcacaggcggacagcttccacaggcatggcagagagttgaggcgaaagatgtggcttcagaacctgaggtttaagctgatggtgggtggcggcattgcggctctgatccttatcatttggctgatggtctgcaggggattcaaatgttagagcacaccaagttgctcgccttttttttttcttttcaggcgtttgatatgcacagactttcaaccaaattgtgttttcagtgtcacgatatcgcaatgtagtggacttcaatccccgcagtctttcccatgttccattacttccatatgataatggtaaaaggtaggaagctggagtacgcggtcagaactgtttggaggagatatgacatcacgacttaaatatctgtacattcc

SEQ ID NO: 35106 - DNA, 1603 bp, Zea mays subsp. mexicana
  Clone ID: UC-ZMFLTEOSINTE083H02_FLI
gacaggcgtcttcgtactcgcctatctccgcgactcaaagctttccccaattcccccccttctcccatttctcaccaccgccgccgccccccccgttcaacaacaccatgagggagtgcatctcgatccacatcggccaggccggtatccaggtcggaaacgcgtgctgggagctgtactgcctcgagcatggcattcaggctgatggccagatgcccggtgacaagaccattggtggaggtgatgatgctttcaacaccttcttcagtgagactggcgctgggaagcacgtcccccgtgctgtttttgttgaccttgagcccactgtcatcgatgaggtgaggactggcacctatcgccagctcttccatcctgagcagctcatcagtggcaaggaggatgcagccaacaacttcgctcgtggtcactacaccattggcaaggagattgttgacctgtgccttgaccgcatcaggaagcttgcagataattgcactggtctccagggcttcctcgtcttcaacgctgttggtggaggaacgggctctgggcttggttctctcctcctggagcgcctgtctgttgactatggcaagaagtccaagctcggtttcaccgtgtacccatccccccaggtgtccacatccgtggttgagccatacaacagtgtcctgtccacccactctctcctcgagcacactgatgttgctgtcctgctcgacaatgaggccatctatgacatctgccgccgctcccttgacattgagcgcccaacctacaccaacctcaacaggcttgtgtcccaggtcatctcatccctgactgcttccctgaggttcgatggtgctctgaacgttgatgtgaatgagttccagaccaacctggtgccctaccctaggatccacttcatgctttcgtcctacgctccagtcatttctgctgagaaggcctaccacgagcagctgtccgtggccgaaatcaccaacagcgccttcgagccatcctccatgatggccaagtgcgacccccgccatggcaagtacatggcatgctgcctcatgtaccgtggtgatgtggttcccaaggacgtgaacgctgctgtggccacaatcaagaccaagcgcaccatccagttcgtggactggtgcccgactggcttcaagtgcggaatcaactaccagcctcccagcgtcgtccccggcggtgacctggccaaggtgcagcgtgccgtgtgcatgatctccaactccaccagtgttgtggaggtcttctcccgcattgaccacaagttcgacctcatgtacgccaagcgcgccttcgtgcactggtacgtcggtgagggtatggaggagggcgagttctccgaggctcgtgaggatctggctgcgctcgagaaggactacgaggaggtcggtgctgagtttgacgagggtgaggacggcgacgagggtgacgagtactagacgctctactggcgcggcgtcgtcgggcttgtgtttctgtcggttcttatctatctgtcgttgtgtggtttacaacttacgttgtaagactttattcccccgctttgctactgggttattaagtttggcgttattgtttt

SEQ ID NO: 35107 - DNA, 730 bp, Zea mays subsp. mexicana; identical to SEQ ID NO: 22228
  Clone ID: UC-ZMFLTEOSINTE083H07_FLI

SEQ ID NO: 35108 - DNA, 825 bp, Zea mays subsp. mexicana
  Clone ID: UC-ZMFLTEOSINTE084D02_FLI
gtggaatggttggaggccttggtttcagtttatcaaacttaattatgtatctcacatatgctctttgtttctatgttggtgcactgttcgtacacgaaggaaaaacaacttttaaagacgtttttagggtctattttgctctgattttcacagcttttggagtttcccaaacaagtgcaacggcaacagattcaacaaaagcccaggaatccacaatttcaatactaactattatagacaggagatctaaaatcaactttgtgacccgcgacgacgagcggatgctgttcgacatccagaagttctacaacgtgttgattgaggagctgcctgccaatgtcgctgaccttctgtgatcattttgaagaaaaacagaactaaaagaaaggtagtgggggtgatctggtaaggcttggttttgccgaaatattgtgggggaggagtgataaggtcggtggggtttctatgttaaagtcgtggtctcgggcaatatgcgatttttctttatgccatgttttgggaaattttgtagctgcctaggcctcgtgctgttgtggtggttcattagtacgaagacgaaggctctgctggcgatgggagtcctttttctttttgttagtattttgtttaaaactatgtatgaccgaattatttgtcatccttgactcaattctgctgcaaccagttgtatcgtgccatgtgtctgcagcaccggtcgttgctgttctgagtaaaaatctgtttactctgctttcacctgttaatgtacgatgtctaggataattttaagagagtaatctatactatacttaaagcaccagtttc

SEQ ID NO: 35109 - DNA, 2216 bp, Zea mays subsp. mexicana
  Clone ID: UC-ZMFLTEOSINTE085A05_FLI
ggcggcactttgctctcattgaggagagcgagcgtctcgttgatgagctccagttgcaactccaggctgctgtttatagagaagactacaggactgctcataaactgaggctggctattgctgctacatcaaaaaatgacgctgtgggcagagctatctcggacttaaatatggccatagatgaggagcgctacaaggatgcagcatatatcagagatcatgctggcgcaggactgctggggtggtggtctggaatttctggaaatttgtctgatccatatggtcttattattcgtataagtgctgaacatggtcgatatgtggcaagaagttatgatacaagacagctggcttctgacagccctggtctccctatatttgaaatatactttgcagaggcaaatggtggatacaacctacaggcagtgcatctgaaaccagatggtagcgattctgaccaagtgccaaacatgttaagggagaaacttggcattgacagtataaacatatctagcagtccattagggtctaagcatgaagaatttgatggaagtgtaaacatggatgataaagatagtgatgatagcaacatcgctgctggccctggttcgaaaaacttgtcaagcgatctaactgcagttcccaggattaaaatcttgaaagtggtacccatgcagaatgttgatcatgactacataatcaatatctttgatcagatttcagaggaagatgatgacaatgataatcatgaagttgaaaatgaatcttcagaagatgttgataatgatgataacagtggagtagcagaaacagtttctgcagaagagaatggtgatgaatctggtgacgaaagtgatattgaaaccttggtttcatttgattttgtcagtgagaataacgtctatgcttctcgtccatctgctgaagcttttgaacgaatgccggctagattagaaaaaagagatcgcttctcattttccttctatactgaagaatacagtaaaaagctagatgctggaaaggcccggcagacttcaaaggaaacagttggtttgcatgccgatcagcaggattatgatggttttgtccagcttgatcgtgtaaagttgagtggcagcaacaaaaaactatcgatactacaacttggcatcaagcaaaataacaaggttcagcaaaaactgcatggagttacccactttagtcgtattcagatgcctatatcttcagatcctcttaccggtttatatgtgaccacatcaggatttgactcagaaattcttagtttgcaacgaaaatttggtcaatggcgggatgatggttcatctgaggagcatagtgacctattgttctatgagcatgttgaagctgtaaaagtaacaggggacaatctcatgccagctggtcaggttgtcttccgtgcaaaagttggtgaacgctatcagctccctcataagggaattatccctagagaacttggagtgattgctaggtacaaggggcaaaggaaaattgcagatcctggtttccaaaaccctcgatgggttgatggagaacttttgataatagatggaaagttcatcagagatggtcctgtgatagctttcttttactggacatctaattttcatcgtttcgaattctttagacggttgaggcttcctgaatagttcccatctaaaagtagttaaagttgcatttggagccaacaggagttgcctggcattacattttccgaggacagattctgatgtgaagagggcgcatggcatgaatcaaggggcatctccacccactaaaggctgccataagggtggaaaatagctcacagtcgcaggaagaggaatagcatcctgccaacatgggtgagctgcggggcgcatcatactaattccgcttctgctatgctccgtccaccaggtcaacaacttgagaccgaggcatcaaaccgccagattttgtgtttctcagagcaagtagaactaaagcacctcaaagatgtaaatatatgcattcccaaatttaggattttgagcgcaatcttggcagttttcatacatgcgaagtgaactagtacgagcaatagttttgtatagcgtgatcaaacagtggcagcaatcagtagcagaggcgtacagcccaacacggtcatacagatttgttaatatatctaagtttgtttaaccttgcccatttcttaagcaagaactccatttttt

SEQ ID NO: 35110 - DNA, 1524 bp, Zea mays subsp. mexicana
  Clone ID: UC-ZMFLTEOSINTE085C07_FLI
ccaccgcagcccgaaccgcatctcccccaccactggcatccccccctaccgcttacaaatacgcgacacatcccacctcgacggtctctttctcgcatcgctgcgccgctccatccgctcggctcccacccgtccgtcgtcgcctcgccgtcgagccaccgccctccttgtcaacctcggttgctgctcgagccgggcgggaggagaaaagatgggggtgtacctcagcacgcccaagacggacaagctctcagctgatggggagaacagccgcgtccggttcggcctctcctccatgcaggggtggcggaccaccatggaggacgcgcatgctgccttgccagaccttgatgaatgcacatccttttttggtgtttatgatggccatggaaaagctgtatcaaaattttgtgcgaggcatttgcataaacaagtgcttataaatgatgcaaattcatctggtgatttgccaacctctctccataaagctttcttaagaatggatgaaatgatgaaagggcagaggggttggagagaactaactgagctgggagataagggaaacaaaatctcaggtatgatagacgacataatatggcctcccaagggtggtgattcagataagataagggaagattgggataccgaggagggtccaaattcgaactttcctggaccaacatctggaagcacagcttgtgtggctgtcataagaaatgacaaattaattgttgcaaatgctggggattctcggtgtgttatctcacggaagggtcaggcttacaatttgtcaacagatcacaaaccagatcttgaggaagagagggagaggattttgggtgctggtggatttgttgttgccggacgggtcaatgcaagtctgaacttatctagggcaataggtgacatggaactgaagcaaaatgacctcctgccagtggagaggcagatcgtgacagctgaacctgagttgaaaacagtccagctctcggaggatgatgaattcattgttttagcttgtgatggaatttgggattgcatgtcaagtcaagaagtagttgattttgtacataaacagctaaagaccgaggataagatatctagtgtgtgtgagaagttgctcaaccgctgtgtggcacctacatctggtggcgaaggatgtgataacatgacggttattgtggttcaattcaagaaaccagctttagctgttgctacttctagcgctgagcagtctgctaccactgcagaagggatgcggcccaacgaggtcgatggcccagattaccccccgaagtaggcgttaagtggcacaccgtgctgtggagctctaaccggtggataatagacaaaaaaggatagtgaggtggtgtatataagaaaagggattctattcgacaatctcttatagggtttgttgcttccttctttctagtgttcagagtcgtcgcaacctgtaatacatggcatgttggtgcttaaattggttttttgtgaaatgcattgatgagttgtcagaagggt

SEQ ID NO: 35111 - DNA, 666 bp, Zea mays subsp. mexicana
  Clone ID: UC-ZMFLTEOSINTE085D03_FLI
agctccaatcaggattatccttaattgatgtgaataataagccacagtatacaaggaccaagggatcaccgtaattgctggtgtggaagctagagggttcatttttggtcctcctatcgctctagccatcggtgctaaatttgtacctttgaggaagccgaagaagttgccaggcgaggtgatctccgaagaatattctctggaatacggaactgacaagatagagatgcatgttggagctgtacaggccaacgatcgggctcttgtagtcgatgatcttattgccaccggtggaacactctgtgcagctgtcaaacttattgaacgtgttggagcaaaggttgttgagtgtgcttgcgtcattgaattggcagaactgaagggccgagacaaacttggggacaggccagtttttgttcttgtcgaagcagatgcttgagcggaacttgggacttctcttctcagagagttagagttggtgctgttgatgctacctctctggaaacaacaaagtttcccatgttggctatattctggctgacacgtaataaagtttcattccaaattgtgatcccctgaatgatttgtcaatgtagacatgattgctggtccttgtatactgtggcttattattcacatcaattaaggataatcctgattggagct

SEQ ID NO: 35112 - DNA, 1915 bp, Zea mays subsp. mexicana
  Clone ID: UC-ZMFLTEOSINTE085D05_FLI
cacaagtcgtcgtaggcagcgagcgtctctcctctcccacgcatcgcgccaaggaagagagagagatcgccgctccccttctcggcgtcggtggtgcgggtgccctcccttctcgagcgagatctgtctggtcacagatctatctgacaaaatggtgaagatctgctgcatcggtgctggctatgtcggtggcccaaccatggccgtcattgccctcaagtgcccagacattgaggtcgtcgtcgttgacatctccaagccccgcattgaggcctggaacagtgacaccctgccaatctacgagcctggtctcgatgatgttgtgaagcagtgcaggggcaggaacctcttcttcagcactgatgttgagaagcacgtcgctgaggctgacattatctttgtctcggtgaacacccccaccaagacccgtgggcttggagctggcaaggctgccgacctcacctactgggagagcgctgcccgcatgattgccgatgtctccaagtctgacaagattgttgttgagaagtccactgtccctgtcaagaccgctgaggctattgagaagatcttgacccacaacagcaagggcatcaactaccagatcctttccaacccagagttccttgcggagggcactgccatcgaggacctgttcaagcctgacagagtgctcatcggtggccgggagactcctgagggcaggaaggccgtccaggctctcaaggatgtgtacgctcactgggttcccgaggacaggatcctcaccactaacctgtggtctgctgagctctccaagctcgctgccaacgcgttcctggcacagaggatctcctctgtgaacgccatctccgccctctgcgaggccaccggcgcgaatgtgactgaggtggcttacgccgtgggcaaggacacgaggattggccccaagttcctgaacgccagtgttgggttcggtgggtcttgcttccagaaggacatcctgaacctggtgtacatctgcgagtgcaatggcctgcccgaggtggccaactactggaagcaggtgatcaagatcaacgactaccagaagagccggttcgtgaaccgcgtcgtgtcgtccatgttcaacaccgtcgccggcaagaagatcgccgtcctcggcttcgccttcaagaaggacaccggcgacactagggagaccccggccatcgatgtctgcaagggcctgctgggtgacaaggcccagatcagcatctacgacccccaggtgacggaggaccagatccagcgggacctggccatgaacaagttcgactgggaccacccgatgcacctgcagccgacgagcccgacggccgtgaagcaggtgagctgcgtgtgggacgcgtacgaggccaccaagggcgcccacgggctgtgcatcctgaccgagtgggacgagttcaagaccctggactaccagaagatcttcgacaacatgcagaagcccgccttcgtcttcgacggccgcaacatcgtcgactccgagaagctgagggagatcggcttcatcgtctactccatcggcaagccgctcgacgcctggctcaaggacatgcccgcggtcgcctaatccccccctcacccatggattggattcggggaaggaagagaagaggagctggttgaccgttctttattacagtttgtttttgcaggctacgctaccaattttctcttgtgtcaggcataaaaaaaaggttggatggcgctgctagtattccctgctgtttggtgttttcgtatcggaggacgtctgtagatgtacaattcctcaggcccttgtgttcggcttgaggaagtttccgttgtaccctggacctgctatagccggttgattcttcaattgtattcctaaaagttactacacaatcgatatgttctttttcctttt

SEQ ID NO: 35113 - DNA, 764 bp, Zea mays subsp. mexicana
  Clone ID: UC-ZMFLTEOSINTE085E05_FLI
gctgtacctgcaagtgagcatcatcagccaggcgctcatcttcgtgacccggtcccggagttggtccttcgtggagcggcccggcgcgctgctggtgatcgccttcctggcggcgcagctggtggcgacgtgcatcgccgtgtacgccaactgggagttctgcaagatgcagggcatcggctggggctggggcggcgccatctgggcgttcagcgtcgtcacctacttcccgctggacgtgctcaagttcgccatccgctacgcgctctccggcaaggcctggaacaacatcaacaacaagacggccttcaccaaccgcaccgactacggcaagggcgagcgagaggcgcagtgggccacggcacagaggacgctgcacggcctcaaccaggccaccgccacctccgacctcttcggcgacaaccagggctaccgcgagctgtcggagctcgccgagcaggcggccaagcgcgccgaggtggccaggctcagggagctgcacacgctcaagggacacgtcgagtccgtcgtcaagctcaagggcctcgacattgacaccattcagcagagctacaccgtgtaaactcgactcagtttttttatttgctttttttttgcagacaaatacaaaccacacacatatatatatttgtaaagattcgttcgtattttcattttcaccgggaagatttgtaactgtcctcctccctccttgtaagttgctcctgtaaactcttcctgaattcatggcgtgtcgttgtagc

SEQ ID NO: 35114 - DNA, 1128 bp, Zea mays subsp. mexicana
  Clone ID: UC-ZMFLTEOSINTE086D04_FLI
gcacgcgaacgccctccctgccgctccgccgtttcgcgtgggagtcgtttcgaaaaagtctgtttcgcgagcggtgaggagtggagtggagtgtggtgtggaggcctaaaaccatggcggcgagcatcgggatcatggacggcgcctacttcgtcggcaggggcgagatcctgcactggatcaatgcgaccctccagctctccctcgccaaggtcgaggaggcagcgtctggcgcagtgcagtgccagctcatggatatggttcaccctggagtggtgcccatgcataaggtcaatttcgatgcgaagacagaatatgacatgatccagaactacaaggttcttcaggatgtgttcaacaagctgcggattggcaagaatattgaggtcaacaagcttgttaaaggacggccattggacaacttggagttccttcagtggttgaaaagatattgtgattctgtgaatggtggaattatgaacgaaaattacaaccctgtagaaaggaggtcaaagggatgcaaagaacgtgtctcaaagggttccaataagccatctaaatcattgcaagccaataggctttctggtgctgatccaacagatggaggccatggagttgggaaagtatgtaacactttttctgaagagcattacatagaacagattcagaagttgtctgaaaagattgcagacctgaaagtttctgtcgatagtactgaaaaagaaagagacttctacttctcgaagttgcgtgatattgagatactgtgtcaacggcctgagttagagcatctaccgatgactaaggcggtccggaagatactttatgcagctgatgcaaaggattcaccgctacctgaggcgaatgatataatcacaaagtcaccaagcttgttctcaaatgaaaccgagtgagatgtgcggctacatgagctaattttccatgattgatcgtcttagttctgagtctgtaaatgcgtaaaataacatttgacacaagtctttttgctgtcaaaaacagttttcctgtaagaacttgagtggggttaagtagttattacgcattcatgcttgatgtgactgtccctgtatggttcctctggagaatatagggtctgttcacttgact

SEQ ID NO: 35115 - DNA, 1481 bp, Zea mays subsp. mexicana
  Clone ID: UC-ZMFLTEOSINTE086E06_FLI
cctccgccacctccaccctcgaatcgttccccaccatggcgtcgcagggatcctccgtcttcgccgcactcgagcaggccccggaggaccccatcctcggagtgaccgttgcctacaacaaggatcccagccccgtgaaggtcaacctcggggtcggcgcctaccggaccgaggaagggaagcccctagtgctgaacgtggtcaagcgcgccgagcaaatgttgatcaataatccgtcacgtgtcaaggagtacctaccaatcaccggtctggctgaattcaataagctgagcgctaagcttatctttggcgctgacagccctgctattcaggagaatagggttgctaccgtgcagtgcctatcgggtactggttctttaagagtcggaggtgaatttcttgcaaggcactatcacgagcgcactatctacatcccacaaccaacctggggaaatcacccaaaagtcttcaccctatctggcttgaacgttaggagctaccgctattatgatcctgcaacatgcagccttcacttcgaaggactcctggaagacctcggttctgctccttcaggttcaattgtactgctgcatgcctgtgcccacaaccctactggagtagatcctaccatcgaacagtgggaacagattaggcagctgatgagatcaaaatcactgcttccgttctttgacagtgcctatcaaggctttgcaagtggaagtcttgacaaagatgctcagtcagtgcgtatgtttgttgctgatggtggtgaacttctcatggctcagagctacgctaagaacatgggattgtatggagagcgtgttggcgctttgagcattgtatgtaaaagtgccgatgtagctgttagggttgaaagtcaactcaaacttgtcatcaggcctatgtattcaaaccctcctcttcatggtgcctctatcgttgctactatactcagggacagcgagatgttcaacgaatggactctggaactgaaggccatggctgataggatcattaacatgaggcaacaactatttaatgcgctgaaatccagaggaacccctggtgattggagccatatcattaagcaaattgggatgtttactttcactgggctgaatagcgaacaagtcgcattcatgaggcaggaataccacatttatatgacatctgatgggaggatcagcatggccggtttgagcatgaggactgtgccccatcttgcagatgccatacacgctgcagttactcaactgaaatgaggatagtatcgcagctttcgtgaataaaacctgaatcacccacaacaatgttctaagtactcagccagtggtatttactggttgacctactgtagtttgcgtcggaatagatgtttttttactcttcgtggggcagttttgtactggtggattcataaggactctgattatggtgcgttcggaacttataataataagcacatgaaattttgcttc

SEQ ID NO: 35116 - DNA, 1201 bp, Zea mays subsp. mexicana
  Clone ID: UC-ZMFLTEOSINTE086E11_FLI
gttttctagggtttaggggtcaggccgcccggtgttgtgtcgtcaggtagccgcctccccacctcttctgcttgttctccgcggcggcggcttggatcggagcggaggaagaagatggtggcatcgatcagggtgcccaagacccaacgcgccaggcgggagcttctcaagcacgcgcccaagcttgttgagaccagcaagaagacactgatcctccatggtaccaagactagtgctgtgttgaactctgtgctgtcagatatttaccacctaaagcgtgataatgctgtgaaatataccaagaagaatgacaacattaggccttttgaaagtggtggagaatcttctctggaatttttctcccttaaggcagactgtagccttatagtgtatggttctcattcaaagaagaggcccaacaatctgattttgggtagaacgtatgaccaccacatatatgaccttgttgaagtaggagttgagaactacaagtcaatggaatcttatgtttatgataagaagctagcaccattacttggatcgaagcctttctttgctttcataggggaacactttgagagtgctgaagagctgaaacatttgaaagaagtgctgcttgatcttttcagaggagaggtcgtagagaatctgaatcttgctggtgtggatcggatctatgtgtgcactactgcaatctctcccactactgtttacatgatgcactgtgctctccgtctaaaaaggtcaggtacatctattcctaggatggaactggtcgaagttggaccttcaatggatctggttgtaaggaggcacagacttccagctgaaagtttaaagaaagaagctatgaagaccagcaggttggaaagttgaccttatcaaacgacataaagggactaaagagggagcgccgtgaagccaagaaaaaccaggactcaaagaagcaaaaggtcaaccccgagtaaagatcactgaagtttacctttgcattggatacaggtcaggttaagaaaccccggtttgtatctgttcccatctgctgtgttatccaattagaagttgctcgttgtcagatagtgttaaatagtttagggccatcttgttaggctaaagacatgtgcacgactttcacaacaatattgcgtaccaattcatgttaagacgtaagcatggaaaaatttgagagtgttatcctatc

SEQ ID NO: 35117 - DNA, 1544 bp, Zea mays subsp. mexicana
  Clone ID: UC-ZMFLTEOSINTE086F05_FLI
ctcaggtcgccgtcgcgactcacgccgcctcctcggctcgctagccgctacgctatctacgcggccccggcacctcccatgagatgagagccgcagccgcagccacagccgccgcgctcctcgcccccggtctaaagctctgcgcgggcggcgcccgcgcgcgcgtctcctgtccctcccgctcccgcctcccactccaccgcatcgccgccatggcctccgcccccaacccctccttccgcccggaggaggcacgctcccctccagccctcgagctcccgaccccgccgctctccaagttcaaggtggcgctgtgccagctctcggtgacggcggacaagaatcgcaacatcgcgcacgcgcgcgcggccatcgagaaggcggcctccgagggcgccaagctcgtccttctcccagagatatggaatggtccgtattcaaatgacagctttccagagtacgcggaggacattgaagctggcggagatgcggccccttcattttcaatgatgtcggaggttgctcgcagcttacaagtcactcttgttggtgggtccatagctgaacgttcgggaaacaacttatacaatacatgctgcatctttggttcagatggcaaacttaagggtaaacatagaaagatccatctttttgacattgacattccaggaaagatcactttcaaggaatcgaagactcttactgctgggcagaatcctactgttgtagacacagatgttgggcgaattggtattggtatatgttatgacatccgtttccaggaattagcaatgttgtatgctgcaagaggtgctcatttgttatgctatcctggtgcattcaatatgactactggaccactgcattgggagttgctgcaaagggcaagggctacagacaaccagctgtttgttgcaacatgcggcccagctcgagataccagtgcaggttatgttgcttggggacactccactcttgttggaccttttggagaggtgattgcaacaactgagcatgaggaggcaactataatagcagaaattgactactcactgattgagcagaggaggcaatttcttcctctgcaacaccaacgccgtggcgatctctatcagctggttgatgtccagaggctgggttctcattagcgagcctggatgcagctgtgagtgcctgtgacctgtgacgaagcaggagagcagttgactctgcaagcttgctcgtactacttcgttcatgagatgcatgcccatgcccatctagagatcgatcaacttgatgtgtgaaggtggagaggacggaataagtcgattatagtttgtaccttgagggcaactctattttctcaagagatttttatttttccaaaagaaaatgatttaatttttcttaggaaaatggaaatcccttggaaaaatatgattgccaaactagccctcagtgtaaatgtctccagctgccgaataaattgattactttaacctatgaagaaaacctttctccatgaaacaaagataaacggaggatcttctccgatttccttt

SEQ ID NO: 35118 - DNA, 1669 bp, Zea mays subsp. mexicana
  Clone ID: UC-ZMFLTEOSINTE086F06_FLI
gttcttgggcgtacgcggacacagccccgatccgaatcgtcctcctcgcgagcctcgtcgatcccccactcccctcccctcgcttcaagatgcagatctttgtgaagaccctcaccggcaagactatcaccctcgaggtggagtcttctgacaccattgacaatgtcaaggctaagatccaggacaaggagggcatccctcctgaccagcagcggcttatcttcgccggcaagcagcttgaggacggccgcacacttgctgactacaacatccagaaggagtcaacccttcatttggtgctgcgccttaggggaggcatgcagatctttgtcaagaccttgactggcaagacaatcacccttgaggtggagtcctcagacaccattgataatgtcaaggctaagatccaggacaaggagggcatccctcctgaccagcagcggcttatcttcgccggcaagcagcttgaggacggacgaacacttgctgactacaacatccagaaggagtcgaccctccacttggtgctgcgccttaggggaggcatgcagatctttgtcaagaccttgactggcaagacaatcacccttgaggtggagtcctcagacaccattgacaatgtcaaggcaaagatccaggacaaggagggcatcccaccggaccagcaacgtctcatctttgccggcaagcagttggaggatgggaggacccttgctgactacaacatccagaaggagagcaccctccacttggtgctgcgtcttaggggtggtatgcagatctttgtgaaaacccttactggcaagaccatcactcttgaggtggagtcttcagataccattgacaatgtcaaggccaagatccaggacaaggagggcatcccgccggaccagcagcgtcttatatttgccggcaagcagctggaggatggacgcacccttgcggattacaacattcagaaggagagcaccctccacctggtgctgcgcctcaggggaggaatgcagatcttcgtgaagacattgaccggcaagaccatcaccttggaggttgagagctccgacaccattgataatgtgaaggccaagatccaggacaaggagggtatccccccggaccagcagcggctgatcttcgccggcaagcagctggaggatggtcgcaccttggctgactacaacatccagaaggagagcacccttcatttggtgctccgcctgaggggcggtatgcagatctttgtgaagaccttgactggcaagaccataaccctggaggttgagagctctgacaccatcgacaacgtgaaggctaagatccaggacaaggaggggattcccccagaccagcagcgcctgatcttcgccggcaagcagctggaggatggtcgcacccttgcagactacaatatccagaaggagagcaccctccacctggtgctccgtcttcgcggtggttattgagccatcagtcgttgaagctgctgctgtatctgggttatctagtgtctctgccattgcccatggatggtgctgtctttcaaagtatttgtatggtttgtgtcgtgagtcgtgactgagctggtttcatggaccagttgtgttctcgttacccaaaactatcgtgcgaccgcatatggcttaatcatgaataaatgttgtttgaattt

SEQ ID NO: 35119 - DNA, 223 bp, Zea mays subsp. mexicana
  Clone ID: UC-ZMFLTEOSINTE086H02_FLI
gataattctgagccacattgagaaacaaaggtattactcaagctgtttcatctcatcaggatggagtcactcctgcctagtaataacagcactgcagattagtaataacctgaaactatacctcgagtctgatttttcccttttcacatgagtcataaacactgttatgactggtattttattttcccttttcacgtgagtcatgaacactgttattactggt

SEQ ID NO: 35120 - DNA, 1630 bp, Zea mays subsp. mexicana
  Clone ID: UC-ZMFLTEOSINTE087C04_FLI
ccgctttctagctacacccttccttataaaatacgcaagagtgcagctgcgcagccgccgtcgcgcagccagccatggccatcaaagatgagccgaagccgctgcacatcctcttcttcccgttcctcgcgccggggcacctcatcccgatcgccgacatggccgcgctcttcgctgcccgaggcgtcaggtgcaccatcctcaccacaccggtgaacgcccaactcatccgctcggcggtagaccgcgccaacgacgcctcccgcggcaccgagggcgccctggccatcgaaatcgcggtcgtgcctttccccgacgtcggcctgccccccggcgtcgagtgcgccccggcgcttaacaccatggacgaccgcgaaaagttcttccacggggcccagttactccgcgagccgttcgaccggttcttggcggagaaccgcccggacgccgccgtgaccgacagcttcttcgactggtccgccgacgccgccgcggagcacggcgtcccgcggatagcgttcctcggcagcagcttgttctcgcgggcctgcagcgagtctacgctgcgcaacaaccccgtggaggccgcccccgacgacccggacgcgctcgtgctgcttccggggctgccgcgccgcgtcgagctgaggcgcagccagatgatggagcccaagaagcggccggagcgctgggccttcttccagcgcatgaacgctgcggaccagaggagctacggcgaggtgttcaacagcttccacgagctggagccggacttcatggagcactacaccacgacgctggggcgccgcgcatggctcgtcgggccggtggcgctcgccagcaaagacgtggcgacgaggggcgccaacaacgggctctcgccggacgcgggcgcctgccagcagtggctggacgcgaaaccagagggctcggtggtgtacgtgtccttcggcacgctcacccatttctcgccgcccgagatgcgcgagctcgcgcgcggcctcgacctgtccggcaagaacttcgtctgggtcgtcggcggcgcggacaccgaggagtcggaatggatgcccgatgggttcgcggagctggtggcgcgcggcgaccgcggctttatcatccggggctgggcgccgcagatgctgatcttgacccacccggcggtgggcgggttcgtcacgcactgcgggtggaactccacgctggaggccgtgagcgccggcgtgcctatggtgacgtggccgcggtacgccgaccagttctacaacgagaagctggtagtggagctgctcaaggtcggtgtcgccgtgggatccacggactacgcgtccatgctggagacccggcgcttcgtgatcggtggtgaggtgatcgcgaaggccatcgggagagtgatgggcgacggcgaggacgcggaggcaatacgggagatggccaaggagctcggggagaaggccaggcgcgcggtggccaacggtgggtcatcttacgatgatgtcggacgcttagtggacgagctgatggctcgtaggagctccgtcaaagtctgattgcagcatgttcgtcctcgtgtgcacaatattaatctggaactcgtatacataaatttaatctcgattttttgttcaac

SEQ ID NO: 35121 - DNA, 1911 bp, Zea mays subsp. mexicana
  Clone ID: UC-ZMFLTEOSINTE087D05_FLI
gtctctccctcagctccctccagccgccgattaatcgatcgatcacctattcacctagctagccggccagttgctggttctcttcttcgcatgctgccgattaatttattccacgctcgattgcggtggcggctttagttaatagttatagggagcttcaagatagcaagcaagaaacggtgcaggattattggaggaatagagcttcaattcagatagcagctgcaggctgctgttgattcggcgatcggtcgatcgaggatgtgcacgaggggccactggaggccgtcggaggacgagaagctgaaagagctcgttgcgctgtacgggccgcacaactggaacgccatcgccgagaagcttcaagggagatcaggtacgggtgctgtgtgctgatgctactatgtctgtatgattatcaaaactaaaaatcgtatattattaagcatgtatatacatgtctgagtttttttttcgggttggatttggtgagctatatatatccaccaagagctaatttccttccttctcgttgatccaccaatattgttcgcgttggggtttgactttgcaattggggcatgcatgcatatgggtttagttagttaaaggaagtttagatctgttagggtgtcatatcagagagaggtgccattttttagctccactatatactctcgccttgatgtgcatgtcatatccgtgtcacttgtagagcaattttgtctagaaatataccctctctatatatctaccgagttcagcttttcttgctttctaatttacctgagtacgtggccgtgttccttctcgcacgagctactggccatggagtagctaagctagctagcttgcgcatgcacgccccaagagagaacagctagctagctagcgtgattgaggagctgtataataacctaattaaaatgaaaaattgaatcttttcagggaaaagctgcaggctgcggtggttcaaccagctggacccgaggatcaaccggagccccttctcggaggaggaggaggagctgctcctcgcctcccaccgcgtccacggcaaccgctgggccgtcatcgccaggctgttcccggggcgcaccgacaacgccgtcaagaaccactggcatgtgatcatggcgcggcggtgcagggagcggatgcggctgtcgaacaggcgtgccggcggcgctgcttccggtgctggtgctggtgccgtcgtcgccaccggtgctgctgccgaagatggcagtaaccctaggagcgccaataagaagccgaggcctgacgcgagcggcatggcctccttgctagacaagtaccgaagagaattttccgccgccgtcccgtttgccattaaccatgatagcaatcagcagcagggctattgttcaaatactaacgaaggtgaatactgctactactacgtactgcatgtatgctagctactaccatatatacaagacaaatttttcatcaactttactaattacatgccatttcgaatctgatctgcagacgcaaacaaatcagtcgaattctacgatttcctccaagtgaacgcgaactcgagcgacaccaagtgtggttcgagcattgaggagcaagaggcggagagccgggatgacgatcaagccgaagggcaggtgcagttcatagatttcctggaggttggggcttcccatcgccgccggtgatttttatctatatatttaactagggatgcatccaaagcaggttgtaatgctttgtgaaagaggcaggcatgctgcaaatagcaatcgtcgtctaacaccaaacgtacttgtagaggaagcaaaatgcaccgtgcatatgacatattgtaatttattgttgtatacatatatctgtccatatatatccaccgttggggggacatgtgcaaaattaaac

SEQ ID NO: 35122 - DNA, 1526 bp, Zea mays subsp. mexicana
  Clone ID: UC-ZMFLTEOSINTE087F11_FLI
attgaatcacctgaggatgaaacggaactctcccagtggaaacagctattgggtcgtgacattgaaattcttaaggcaaaggctaattttttgaaaatacaatcttttctaacccgccatggtatggaatgtactgatttagaatcagtggtttgtgtcaaagatcgtaatctgacaagcgaatgtgttgataaaatagttggttatgctttgagttatcaactcaaggatcaccctattcaaactcctggaaaggatgcgagagttgtcctttctggtgtaagccttaagtatggaattgatttgttggaaagtatccaaagtggccctaagaagaagagcacaaagaagtcactcaaggatgttgtcacagagaatgaatttgaaaaacgtcttcttccagatgtcatccctccagatgagattggtgttacctttgaggatattggagcattagaaaatgtcaaggaaactttgcaggagttagttatgcttcctttgcaaaggcctgagttgttctccaaaggacaacttatgaagccatgtaaagggatattgctttttggtccacctggcaccggtaagaccatgcttgccaaagctgttgcaacagaggctggtgctaattttatcaacatatcaatgtcaagcattgcttcaaagtggtttggagagggagaaaaatatgtgaaagctgttttttcacttgcaagcaaaatttctcctagtgttattttcgtggatgaggttgatggcatgctgggtagacgtgagaatccaggggaacatgaggccatgcgcaagatgaaaaatgagtttatggtgaactgggatggtcttaggacaaaagacaaagaacgtgttctggtacttgctgccactaataggccatttgatcttgacgaggctgttgtcaggaggctccccaggaggttgatggttaacttgccagatgcacccaacagaaagaagattcttagcgtgatactagcaaaagaagatttggcagatgatgtagatctggaggcgctagcaaacctgacagatgggtattcaggcagtgatctgaagaacctgtgtataactgcagcacatcgtcccataagggaaattcttgaaagagagaagaaggagagaaccttagctgaagcagaaaataggccagccccacctcagtgctgtagcggcgacgttcgctccctaaagtttagtgatttcaagcacgcacatgagcaggtttgtgcgagtatatcatcggattcaaaaaatatgaatgagctcgtccaatggaacgacctctacggagaaggcgggtcgaggcacaagacaccgttgagctactttatgtagcctaacgtttttttagatgatttgtacatacagaagcagcctttgtataggtgtgtttccagttaaatttgctggaaacatttattcatgtcgggtttcgtttctataatcaactcagcttgtgtctgcatctagtgtagcctgagcttctgattagttattaatttatttcagtc

SEQ ID NO: 35123 - DNA, 1361 bp, Zea mays subsp. mexicana
  Clone ID: UC-ZMFLTEOSINTE087G02_FLI
gttcgaagaactcggccctttgggagcgagcaggagccggagcaggaccaggaagatcattatcaggagaagctaggggatatggcgaacgctggcggcggggcggccggggaaggggagtggctcaaggtcgcccagctcagggccctcgtccaggaggaccaccgcgccaaggaggtggacaacctgacgctgcgccggttcctgcgcgcgcgcggccacaacgtggacaaggcggcggccatgctgctcaagttcctcaggtggcgggcggaggcggcgcccggcggcggcaccgtgcgggaggagcaggtgcgcggggagctggagcaggacaagatctacatgggcggcgtcgacaggaccggccgccccatcatcgtcggcttgctggctaagcactactccgccaaccgcgacatggcggagttcaagagtacgtcgacgacgtggccttctttctgcttcatcaatcaaaaaaatgcgtgtgtacgtacgtgcggaggttttctttcttatttcttggccgttgagcgcgtgcgtgtgtgtgccctctctctcttgttcttgtgcaggttttgtggtctacttcttcgacaagatctgtgccaggatccccagaggccaggagaagttcctcgccatcatggatctcaagggctggggctacgcaaacttcgacgtccgggcctacatcgcggccattgagatcatgcagaactactacccggagcggctgggcaaggcgctgatgatcaacgtgccctacatcttcctcaaggtgtggaagacgatgatctaccccttcatcgacgccaacaccagggacaaggtgatgagcatgagctgccatgccgcgcgcgttcgtgttcgtggatgacaagagcctgcgggagacgctgcggcgggagatcgacgagagccagctcccggagttccttggcgggaagatgcctctcgtctccctcaaggactacgcccagcagcctcagcccgtttgcgagtgagtctgtcgtagcgatggtggccggccggtgccgtgagcgagccaaagccgaaagctgattcgatctggactaagctaatacagcctacaagattagggaggaagagaggccctatcggtggaattaagcacactagtttgtgatccaattcaataaagaagtcaatatggtgtgtagaaatggtatgacatgagtctttaatctcatattgtctatctagatagaaaagaaaaccaacttaaatatggtagcgttccatacttttcagagtctgccacacgcacgctctcgctcacgtttcatgtttttttgcgttatttatcttgtaacttgttctaaacggcaatttaattt

SEQ ID NO: 35124 - DNA, 1143 bp, Zea mays subsp. mexicana
  Clone ID: UC-ZMFLTEOSINTE088C01_FLI
gccttaggggaggcatgcagatctttgtcaagaccttgactggcaagacaatcacccttgaggtggagtcttcagacaccattgataatgtcaaggctaagatccaggacaaggagggcatccctcctgaccagcagcggcttatcttcgccggcaagcagcttgaggacggacgcacacttgctgactacaacatccagaaggagtcaaccctccacttggtgctgcgccttaggggaggcatgcagatctttgtcaagaccttgactggcaagacaatcacccttgaggtggagtcctcagacaccattgacaatgtcaaggcaaagatccaggacaaggagggcatcccacctgaccagcaacgtctcatttttgccggcaagcagttggaggatgggaggacccttgctgactacaacatccagaaggagagcaccctccacttggtgctgcgtcttaggggtggtatgcagatctttgtgaaaacccttactggcaagaccatcactcttgaggtggagtcttcagataccattgacaatgtcaaggccaagatccaggacaaggagggcatcccgccggaccagcagcgtcttatctttgccggcaagcagctggaggatggacgcacccttgcggattacaacattcagaaggagagcaccctccacctggtgctgcgcctcaggggaggaatgcagatcttcgtgaagacattgactggcaagaccataaccctggaggttgagagctctgacaccatcgacaacgtgaaggctaagatccaggacaaggaggggattcccccagaccagcagcgtctgatcttcgccggcaagcagctggaggatggtcgcacccttgcagactacaatatccagaaggagagcaccctccacctggtgctccgtcttcgcggtggttattaagccatcagtcgttgaagctgctgctgtatctgggttatctagtgtctctgccattgcccatggatggtgctgtctttcaaagtatttgtatggtttgtgtcgtgagtcgtgactgagctggtttcatggaccagttgtgttctcgttacccaaaactatcgtgcgaccgcatatggcttaatcatgaataaatgttgtttgaatttaaact

SEQ ID NO: 35125 - DNA, 1040 bp, Zea mays subsp. mexicana
  Clone ID: UC-ZMFLTEOSINTE088C04_FLI
gcagagcagaggtcgacaagacgagacaagagaatgcctgtgagcaggatcgccgtgggtgctccgggcgagctgtcccaccccgacaccgccaaggccgccgtcgccgagttcatctccatgctcatcttcgtcttcgccggctcaggatcgggcatggccttcagtaagctcacggacggtggcgccgccactcctgccggcctcatcgccgcgtctctggcgcacgccctcgccctcttcgtggccgtctccgtgggtgccaacatctccggcggccacgtgaaccctgccgtgaccttcggcgcctttgtgggcggcaacatcagcctcctcaaggccctggtctactgggtggcccagctcctgggctccgtcgtcgcctgcctcctcctcaagatcgccacgggcggcgcggcccttggcgccttctcgctgtcggcgggcgtcggcgccatgaacgccgtggtgctggagatggtcatgaccttcggcctcgtgtacacggtgtacgccacggccgtggaccccaagaagggcgacctcggcgtcatcgcgcccatcgccatcggcttcatcgtcggcgccaacatcctggcggggggcgccttcgacggcgcctccatgaaccccgccgtctccttcggcccggccgtcgtcaccggcgtctgggagaaccactgggtgtactgggtcggcccactcgcgggcgccgccatcgcggcgctcgtctacgacatcatcttcatcgggcagcgcccacaccagcagctgccaaccacggcagcagactactgatgaccatcatcatcatgcgctgaataattaagaccagaccactcaatatatatacatatgaagaataacatgccaaatctcatctcctagagctagcaacttgattctccatatatttcttaaatacaaactaaactcgattgagtatagcttggtatgaaaccacatgtgtgtgatgttattttgtccttgtggtaatttgtacatctctatctctaccatattaaagcatcaatttcgac

SEQ ID NO: 35126 - DNA, 1556 bp, Zea mays subsp. mexicana
  Clone ID: UC-ZMFLTEOSINTE088F02_FLI
ctgatctaatcactagtgtaatcgtatgcatgtattatgcctactaacttccctttttggcaaggacttatcgggcgtagagcagcgcgaagcgagagatccaatggcggcggcggaggggcagtgggtgctcatggcaacggggcggacgccgactaacattgcggtgatcaagtactgggggaagcgggacgaggcgctcatcctccccatcaacgacagcatcagcgtaacgctcgaccccgaccatctctccgccaccaccactgtcgccgtcagcccctcattcccttccgaccgcatgtggctcaatggcaaggagatctcgctattaggaggaaggtttcagagctgcctcagagaaatcagaaagcgtgctcgtgactttgaggacaaggagaagggcgtcaagatcaagaaagatgactgggacaagttgcatgttcacatagcctcgtacaacaacttccccactgctgctggtttggcctcttcggctgctggccttgcctgtttcgttttcacccttggaaagctgatgaatgtgaaagaagattatggagaactttcttcaatagcaaggcagggatctgggagtgcatgccgcagtatatatggtggttttgtgaaatggtgcatgggagaaaaagatgatggaagtgacagtattgccgtgcagcttgctgacaaaacacactggaatgatcttgtaattattattgcagtggtcagttcaaagcagaaggaaaccagtagcaccagtgggatgcgagatagtgttgaaacaagtcctctcttgcagtacagggcccagacagtggtgccaggtcgggtgttgaaaatggaagaagctatcaagaaccgtgactttgaatcatttgccaaattaacttgtgcagatagcaaccagtttcatgctgtatgcttagacacgagccctcccatcttctatatgaatgacacgtcacaccggataattagccttgtggaaaaatggaaccactcagaaggaaccccacaggtcgcttacaccttcgatgctgggccaaacgctgttctaatcgcccaaaaccgtaaaactgcagcacatttcctccagaagctcctatactatttccctccacaggataatgatttgagcagctatctggttggcgataaatcaattctaggtgacgccggattgcattccatgaaagacgtcgaggctcttccagcacctccagatacgaagataccggatcagaaattcaagggcgatgttagctacttcatctgcagcaggcttggggcaggtccaaaggttgtcgctgacgaaggtcaagcactgatcgattcagtcaccggacttccaaaaggcgtgtagttctagatttaggttggaataatggtttaagctggggattaaagacaatggtatcatacaagcaacctgggccggccaataaagatagaacacgttctcgccttttgtttttctccctcgcctagtatgtggctgaaatatttgtttcgctattttattgagcacttcagctgagacgcaagcggagaat

SEQ ID NO: 35127 - DNA, 740 bp, Zea mays subsp. mexicana
  Clone ID: UC-ZMFLTEOSINTE088G03_FLI
gagagacccgcgagaggctgccgtgtagggaccaccgtagactcagctactgcgaaggagggataaggggatggccgggatcggaccgatcaggcaggactgggagccggtcgttgtgcggaagaaggcacccaccgccgccgccaagaaggatgagaaggccgtcaacgccgcgcgccgcgccggtgcggagatcgataccatgaagaagtacaacgctggtacgaacaaggcggcatccagcggtacatccctcaacaccaaacgcctcgacgacgacaccgaaaacctcgcccatgagcgagttccaagtgatctgaagaagaatctcatgcaagcaaggctcgataagaagctgacacaggcacaacttgctcagatgataaatgagaagccacaggtgattcaggagtatgaatcaggcaaggcaatccccaaccagcagatcattagcaagctcgagagggccctgggaaccaagttgcgtggcaagaaatagctttcctacgagtttgtgtaccggagcatcataatagggaagacaaggcaaactgtctgcttatttgtctatgtttggtatctcaagtcctgcggactgtttctgttggcacaagagggaataaatgtgttcacggacctgtaatgcttgctccttgtcatatgaccttgctctaaacatttgtgatgaagctgtcaactgaattctgtcaggtaatatatttgctctaaatatttagcct

SEQ ID NO: 35128 - DNA, 1298 bp, Zea mays subsp. mexicana
  Clone ID: UC-ZMFLTEOSINTE088G06_FLI
gtcgaattgtaagaattatgcgcaagcgacttgtcagaaagacctttgatatgattgaagagattgcggaaaaggaagataaggaggactataagaagttttgggagagctttggcaagtttatcaagcttggttgcatcgaggacacagggaatcacaagcgccttgctccattgttgcgcttccactcttctaaaaacgagggagatttgataagtcttgatcaatatgtagagagcatgcctgaaagtcaaaaggcaatctactacatcgctacagatagtctccagagtgcaaagactgctcctttcctggaaaagctggtccagaaagatattgaagttctctaccttattgagccgatagatgaggttgccattcagaacttgcagacctacaaagagaagaaatttgtggatatcagcaaagaggatctggaattgggtgatgaagaagaagagactaaagaaaccaaacaggagttcactctcctatgtgattgggttaaacaacagcttggcgacaaggttgcgaaggtccaaatatcaaagcgtttaagttcatctccatgtgttctcgtatctggcaagttcggttggtccgccaatatggaaaggctcatgaaggctcaaacacttggtgacacatcaagtttggaattcatgaggggaagaaggatcttcgaaatcaaccctgaccacccaattatcaaggatttgagcgctgcttgcaaaaatgagcccgaaagcacagaagccaggagggctgttgagctcctatacgaggctgctttaatctcgagtggatatactccggagagtccagcggagttgggtggcaagatctatgagatgatggcgattgccctcggcgggagatggggaaggtccgacatggaggaggccgaagcgtcgacgggtgaggccagcgcagaggcagactcatctgaaggcaccgtagcagaggtgattgagccctcggaagttagacccgagagcgatccgtggagggaccagtgagttctcccacgggcatcctttgttagaactccatatttagcagtgccggggaaaaaaactaagccatgggcaagaacatatttggtcacagttgcttctatatgggttcttgccgtggcaattttttgtaggcttagactttgccggccactaaaatcttattgaggaggtagtggccttagaaaagaataataaagcatgaagactgatgattacatagcaaaattgtgctgtccctctcaataatatttataatgaaaagaacttatttctgcaagc

SEQ ID NO: 35129 - DNA, 1719 bp, Zea mays subsp. mexicana
  Clone ID: UC-ZMFLTEOSINTE088H10_FLI
ttcacctccgccgccgaatccgagactctgatctcgggttcaccgcagcgcacagagcacccccgactcccgtcccgatccgcgctctcctctacgacgcttcagtcatggcaggaatggcacccgagggttctcagtttgatgctaagcactatgattctaaaatgcaggagctgctgagcactggtgagactgaggagttcttcacttcatatgatgaagtttttgaaagttttgatgacatgggccttcaagagaatcttctgagaggcatttatgcatatggttttgagaaaccatctgcaattcagcagagaggaattgttcccttctgcaaggggcttgatgtcattcagcaagcacaatctggtacaggaaagacagcaaccttctgttctgggatcttgcagcagcttgactatggtctggttgaatgccaggccctggttcttgctcccacccgtgagcttgcacaacaaattgagaaagttatgcgcgcacttggtgactaccttggtgttaaagtccatgcatgcgttggaggaacatctgttcgtgaggaccaaaggattctcgccagtggtgtgcatgttgttgttggtacacctggtcgtgtgtttgacatgctgcgtagacagtccctccgccctgataacatcaagatgtttgttcttgatgaagctgatgaaatgctttctcgtggtttcaaggatcagatttatgacatcttccagcttctgccatccaagattcaggttggagtcttctctgctaccatgccacctgaagcccttgagattacccgcaagttcatgaacaaaccagtgagaattcttgtgaagagagacgagctgacccttgagggtatcaagcagttctatgtgaatgtggacaaggaagactggaagctggacacactgtgtgacctgtatgagaccctggccattacccagagtgtcatctttgtcaacacccgccgcaaggtggactggctcactgacaagatgaggagcagggaccacaccgtttctgccactcatggtgacatggaccagaacactagagacatcatcatgagggagttccggtctggctcctcccgtgtgctcatcaccactgacctgcttgctcgtggtattgatgttcagcaggtgtccctggtcatcaactatgatcttcccacccagccagagaactacctgcatcgtattggtcgtagtggtcgttttggtaggaagggtgttgccatcaactttgtgacccgcgacgacgaacgtatgctgtttgacattcagaagttctacaacgtgttgattgaggagctgcctgccaatgttgctgaccttctgtgatcaatttgaagaaaaaacaaaacaaaaaagggtggtgagggaacctggtaaggattggttttgtcgaaataccgtgggagagggggtgataaggacggtggggggtttctatgttgaagtcgtggtcatggacaatttgtgattttttctcctttatgccatgttttggaatttttgtagctgcctaggccttgtggtaatgtgctgctgtgggggttcattagtatgaagaggaagacgctgctggcgcggagtctttttctctttattagtattttgtttaaaactatgtatgaccgaatggtggtatttatttgtgtcatccttgactcttattctgctgcaaccagatgtatcgtgccaaaac

SEQ ID NO: 35130 - DNA, 1309 bp, Zea mays subsp. mexicana
  Clone ID: UC-ZMFLTEOSINTE088H11_FLI
tatggcgcccatcaaggagcaaaaacacacgacaagcgcagaacagcaggtgatgctggatgccgagctccagctgtggaaccacaccttcggctacgtcaagtccatggcgctcaaggccgcgctcgacctcggcatacccgaggccatccaccagcacggcggcacggccaccctcccacaaatagtcaccagggtcaagctccacccgtccaagaaaccatgcctgcggcgcctcatgcgcgtgctcaccctcaccggcgtcttcggcgcgcaggaggcgcacgacgacgacggcggctgtgacgacgagctcgtctacacgctcacgccggcgtcccgtctcctcgtcggctcaccggggcagaacgtgggccctttcctgaccgtgatgctcggccccatcttcgtgtcgtccttcctcgacctccgcgggtggttccagcacgagacgccggacccgtcccccttcaagatgacgcacgggcgggacatatgggagctggccgcccacgatgccgccttcggcaggctcttcgacgccggcatggtcgctgacagcagcttcatcatggacgtcgtggtcagggagtgcggcggcgtctttgaggggatcagctccctcgtcgacgtcgccggcgggctcggtggcgccacacagaccatcgcgaaggcgttcccgaacctggagtgcagcgtgctggatctcccaaacgtcgtcgccagcgctcccgctgataccgccgtgaagtatgtccccggtgacatgttcgagagtgttccgtcggcagacgctgtcttcctcaagtggattatgcatgactggggtgatgccgactgtgtcaagatactgaagaactgcaagaaggccataccggctcaaggaggcaaggtgataatactggatatcgtggttggagcagggtcgtcatgcgaccggaagaatgtggagacgcaatgcttgtttgatctcttcatcatgtttatcaacggtgccgaacgagatgagcgacagtggaagaagatcatctttgaagccggctttacatcttacaagatcatacctgtcctgggcattagatccataattgaagtctgcctatagaaactaatatagttaaagatgaaaacgggtcagcttcgggttgagttgagcaaaattctacccgggaccgcatccttaaagtctacataaacccacccaacgatcgtacccacaagtgcaattctaaacatgcacctgaaccgtcaggtttgaggtattgtatacttttaaataataattcaactatctctactactgtacgtc

SEQ ID NO: 35131 - DNA, 1991 bp, Zea mays subsp. mexicana
  Clone ID: UC-ZMFLTEOSINTE089A07_FLI
ctttctccccctcccctcccctgcgggcttctctcacgagctcccccggcctcgccgccgccgccaccgccgccgccgccgccgcctgctccggcgggcgggacccagctcgcagcgtctcccctgcggcgaggtacacgatggagggagcgggaagagatgccaaccctttgagcggttacagaattggcaaaaccctgggaattgggtcgttcggtaaagtgaagatcgcagaacatatattgactggtcataaggtggcgatcaagattctcaatcgcaagaagatcagaagcatggatatggaggagaaagttaagagagaaatcaagatactgagattatttatgcatcctcatatcatacgcctttatgaggtgatagatacacctgctgatatttatgttgttatggagtatgttaaatctggagagttgtttgattacatcgttgagaagggaaggctacacgaagaggaagcccggcacttttttcagcagatcatatctggtgttgaatattgccataggaacatggttgctcaccgtgatttaaagccagagaatcttcttttggattcaaaatacaatattaagattgccgattttggcttaagtaatgttatgcgtgatggtcactttcttaagacgagttgtggtagcccgaattatgcagcacctgaggtcatatctggtaaactatatgctggtcctgaagttgatgtctggagctgtggagttattctttacgctcttctttgtggcactctcccatttgatgatgagaatattccaaaccttttcaagaaaataaagggtggaatatatacccttcctagtcatttgtcaccttcagcgagggacttgattcccagaatgctggttgttgatccaatgaaaaggattacaatacgtgaaatccgtgaacatgtgtggttcaagatccgacttccacgctatttggctgtgccgcctccagacactgctcaacaagttaaaaaggtcgacgaggaaactcttaatgatgttattaagatgggttttgacaagaatcagctaattgaatctctgcaaaacagattgcagaatgaggcaacagttgcctattatttactcttggacaataggcttcgcacaaccagtggttatcttggatctgagtttcaagaatctatggactcatctttctctcaagtaatcgctgaaacaccaacttcagcaactgaacttcgtcagcatgggttttcagaatctccggggtctggcttgaggcagcattttgcagctgaaaggaaatgggcccttggtcttcagtctcgagcacatccacgagaaataattagtgaagtgcttaaagctctgcaagaactgaatgtttactggaaaaagattgggcactacaacatgaaatgcagatggagtcctggctgccttgagagtatgatgcataacagtgatagcttcagtgcggagtctgctataattgaaactgatgttttcatggagaaatcaacccctacagtgaagtttgagattcagctttacaaaacgagggatgagaagtaccttcttgacctgcaaagggtcagtggatcacatcttctctttctggacttgtgttccgcctttctaactcagctgagagttctttgagcctgacatgcttggcttcccaagcactccttgatgcacccagtggagtttcaagttacatttgagatgtacataatgaccatatataatcctccagtagattatattttctggagcatgtaatgttgacgttagaggcttgtcctggtttgccaagatggttgttacctaaggtcttaacaagaggccgcaggcgagcccagttcaattagatgatgtgaaaaatttttggcctttttttagtctttggacatgttatcaaattaagggggtcgtgctagcacgataccaaaactaagaaataccccattgaaaactgaaaacaaagcttgctcgttc

SEQ ID NO: 35132 - DNA, 851 bp, Zea mays subsp. mexicana
  Clone ID: UC-ZMFLTEOSINTE089E04_FLI
ctccggtccgcgcgagacgagcagcttctcccagacgctagacacgccaccgcatcgtctgcgccgcgatatcgagaatgtccatctctatgcggctggcgatccctgctcctgccgtcaccgccgccgcgccgacgcggctgagggtgcgagcggcagcggcggggaacggcgcctctctccccgtcgcgcgcgccgccgtgcgggcggagacggtcgcgctcaggggatgcgcctggctgccaccgaagccgctgggagcggcccagccgtgccggagcaggggggccgccgccgtgtgtcactcgtcggcgcacctcagcgcgcgcaccatccagtggatctccgccggagccagcgcagtgctattagttgctaaaggcactgccatacacaaatctttccttgtgccattttttgctcttcaggcaccttgcagcataatctcatggatcaagggtgactatggtcagtggactgcttttcttgctctgttggtgcgtctattcttcttcattccaggtgaactggagcttccactgtcaacaatgctgcttgtgagtgttgctccttaccaattcatggatctgaggggaactcaaggtggtgccgtactgtcactggccatagctgcgtatctcgccttccagcacttcactagggtgggcggcccaggcaaagccttcgagcagggatccattgttgcgaccttggccatcatctgcatcatgattgtgcccttgatgctgctattctgatttgcattaagttgaaatgaatttgcttctcattatgtgcgtatagaaggacaaataaatttaaccttgtaatgcagcatccgagttctcttt

SEQ ID NO: 35133 - DNA, 1550 bp, Zea mays subsp. mexicana
  Clone ID: UC-ZMFLTEOSINTE090C12_FLI
ggaaatggaagacggaattcagtctgtcgataccatctcaagtactccaactggtgttgaaacacctgatgttatcgaccttcggaagctgcagaggaaggagactgacaagcaggcagaacggccgctgtaccaggttcttgaacaaaaggaagaaaggatcgcccctgggacactatatgggtcaagccatacgtatatgctgggaacacaagataaatcatcagctccgaaaagggtggatctgcttaagaatcaaaagtcagacaaggtggacgtcaccatccaacccgaggaactggaagccatggatgatgttctggcagccaagtatgaagaagctcgagaggaagagaagcttcggaaccaaaaggaggacttcagtgacatggtggcagagaatgctcacaagaagaagaggaagaggaggaagaggaagaaccaatggaagacgaggaaatggaagacggaattcagtctgtcgataccatctcaagtactccaactggtgttgaaacacctgatgttatcgaccttcggaagctgcagaggaaggagactgacaagcaggcagaacggccgctgtaccaggttcttgaacaaaaggaagaaaggatcgcccctgggacacaaggacttcaagacaaacaatgtgctggttgatgaaaatttcattgcaaaggtggctgatgctggacttgttaggttaattagaggatctgacgatgccggcccatcgcgtgggttcagtaacagtgtttaccaagatccagaggtacagtcgatgactcagttctctgaaagcagttcaaatggcatcagaaatgtcaaatcaagaactcattagcaccggaaggaaacaaatggaccaaactgatcaagctattgagcgctcaaaaatggttgtagcacaaactgttgaagttggagctcagactgctgcaactctgacacagcaaacggaacaaatgaagaggataggcaatgagctagattctgtccacttttcactgaagaaggctagtcaaatggtgaaagagattggccgtcaggttgctactgacaaatgcattatggcgtttctgtttctgattgtctgtggtgtcattgcaataattgttgttaagattgtcaacccgcataacaagaacatcagagacattccggggctagcacctcccgccatgaacaggaagctgctgtccatcgacgctgcaggactctgagtgttgtgaatggctgcttcccgcagcacagcgcagcgcagcgcgtcattgttctcttatgagccacgatacatggcttcgcgattcttttgtgcttgtagtttacgtccgcccattctttccctattgcattggtgagtagtggcctcaggtttgtagcgggactcttgttgtttatcgcttgcgagctcctagctttctggttgtttgtgtatatgcggtagtgatgtgaatgtgagagtcgagtggagattcttcatggttcgttcttatgagttgtgactggtttgtgaccttgtggtgaaaggttcgcagcttgcttgg

SEQ ID NO: 35134 - DNA, 1141 bp, Zea mays subsp. mexicana
  Clone ID: UC-ZMFLTEOSINTE092G10_FLI
ggagagcaccctccacttggtgctgcgcctcaggggaggcatgcagatcttcgtgaagaccctgaccggcaagactatcaccctcgaggtggagtcttcagacaccatcgacaacgtcaaggccaagatccaggacaaggagggcatcccaccggaccagcagcgtttgatcttcgctggcaagcagctggaggatggccgcacccttgcggattacaacatccagaaggagagcaccctccacctggtgctccgtctcaggggtggcatgcagatctttgtgaagacactcactggcaagacaatcacccttgaggtggagtcttcggataccattgacaatgtcaaggccaagatccaggacaaggagggcatcccaccggaccagcagcgcctcatcttcgccggcaagcagctggaggatggccgcaccctggcggactacaacatccagaaggagagcaccctccacctggtgctccgcctcaggggtggcatgcagatttttgtgaagacattgactggcaagaccatcaccttggaggtggagagctctgacaccattgacaatgtgaaggccaagatccaggacaaggagggcattcccccagaccagcagcgtctgatctttgctggcaagcagctggaggatggtcgcaccctcgcggactacaacatccagaaggagagtacccttcaccttgttctccgcctcaggggtggtatgcagatctttgtgaagaccctgactggaaaaaccataaccctggaggttgagagctcggacaccatcgacaatgtgaaggcgaagatccaggacaaggagggcatccccccggaccagcagcgtctgatcttcgccggcaaacagctggaggatggccgcaccttagcagactacaacatccaaaaggagagcaccctccaccttgtgctccgtctccgtggtggtcagtaagtcatgggtcgtttaagctgccgatgtgcctgcgtcgtctggtgccctctccatatggaggttgtcaaagtatctgctgttcgtgtcatgagtcgtgtcagtgttggtttaataatggaccggttgtgttgtgtgtgcgtactacccagaactatgacaaatcatgaataagtttgttgtttg

SEQ ID NO: 35135 - DNA, 1402 bp, Zea mays subsp. mexicana
  Clone ID: UC-ZMFLTEOSINTE094A04_FLI
agcaagcacacgagaaaaaaaaaatcacaatgagctcatgggttaccaagtcgctgccttttctcgtggctccggcagtggcctcgcccactgccgccctccagctcacctccatggacagagctctggtttccctgcccgtgtcagcgatgttcgtctacgagaaccccatcgatcgtccggccgagaccattagaagagctctgtcccgtgcgcttgttccctactacccaatggccggccgcctcgccgtcactggggaccagctgaagctcgcgtgcaccggcgagggcgtagcgttcgtcggtgcgtcggcgagctgcaccctgcaggacgccaggctctgcgaccggcgtcccgtggtcagtgtcgaggacctcagtatcagctatgccggccagtacagcgaggaccctccacttctgctggtgcaggtgaccgagttttcctgtggcggcttcgttgtcggggtgacgtggaaccacgtcctcacggacggcgccggcatggcgcagttcttgcaggccgtcggcgagtttgcccgaggttccccttccccttccgtcttgccgatgagggtggacgacaccctctctgaactccccccgccaataaccaccatgactaaggcactcgtcagcagcaagcccagagacatgccgtcctcctacatcacagttcccctgagcttcgtcgaccgcatcaagggcgagttccgtcgtcgcagctacggcagcggcagcggccaggtgtcgacgtgcactgcgttcgacgtgttcaccgccgccatatggaagtgccgtgcccgcgcgacgatcggcagcgccgccagcccggacgcccccacggcgctcgccttcacggtgaacgtgaggaagccggccaaggccaaggacggctactacggcaacgtcttcgccttcggcctcgctgcctcgacgctgcgcgaggtcgcggacggcgacatcctggaccttgtgacgctggtcagggacgccaaggcacgggtcccgttcacgttcgctgacggagccgcgcacatcgccgacgagatgggcggtcggctcaagggcctcgacggctacgacaccctgtacgtcacgagctggtggaacctcggcttggacgacgttgacttcggcagcggcggcgctgagcgagtcatcgggtgcatggagcgcaaggtggtgccgggctgcttcctgtgcgggaaaaaagacaaggccgagggcgtcgccgccatggcgctctgcgtcaagcaggagcacgctgaggctttccatgcggagctacgaagcctcaagtgacgcggagaccttacatgtttgtccgtgtttcaattttaataagagcattttgaactcatgtgttgcaatgaaaatatataatactatgataattt

SEQ ID NO: 35136 - DNA, 852 bp, Zea mays subsp. mexicana
  Clone ID: UC-ZMFLTEOSINTE096A11_FLI
gggaagtcttcttcggcgacgagcacccgccaggccatatctctgcaatgggtgactacacaatccagattagcaccaagctcattgaccagcttgctcgtgatgacgagaaggtaaaacggaaagccaggaagcccaagcctaagaagaagcccaccgtccagccacatgaagagcccctggaattcccgagagaaccaaagacgacaagccttgctactgctcctgggtggcctctgcagcctccccctatgtttctgccagtgacccctgctcccccgccacccccggccacaatgccggaggtggaagccattcgttccgtcctgaaagaaagtgaggcgcttctcaagaagctggagaaccaggaaactggggcacgccaagagctcagcaagagagcaaaggagctgcacgacaaggagttcaagctaccataccagaaacccatgccctgcacccaggagagggcaggctgccttgagtgttacaagaccaatacaaaggacccgctcaagtgtgctgaagcagtcaagagatttgaggcatgtgctctcatggccatcaaaagtactgccgcaaaagctgattagtatgtagtccgtgaagctttgtgagttggggcgagctgatacgcggactctgttttttatcttttgaggcaattcaaataaccaaggattttcatgggacccactgtagatttctaatgccactgcactgggctacctgaggcagcgcaccttgagcttagcgatattgcatatgtttgttaaaattggtatatcaagttgctggtgcaaaggttttttctgaaatatatattgatcttgtgttggattggtatccact

SEQ ID NO: 35137 - DNA, 2959 bp, Zea mays subsp. mexicana
  Clone ID: UC-ZMFLTEOSINTE096D04_FLI
atcatggccatcgcgctcgcgaatggaggaaacaagccgcccgactggcaggacttcgtggggatcatcactctgctcattatcaactccacaatcagcttcattgaggagaacaatgctggcaatgccgctgccgctctcatggcacgcctcgcccccaaggccaaggttctcagaaatggccggtggaccgaggaggaatcggctatccttgtgccaggagacatcatcagtgtgaagcttggggacatcattccagccgatgctcgtctgcttgaaggggatccactgaaaatcgatcagtctgcactcaccggcgaatcccttccggtcaccaaaggccctggtgatggagtgtactctggctccacttgcaaacagggtgaaattgaggccgttgtcattgccactggtgtgcacacattctttggcaaggccgcacatcttgtcgattcaacaaaccaagttggtcattttcagaaggttctcactgccatagggaacttttgcatctgttcaattgctgtgggaatgcttgtggagcttgtcgtcatgtacgctatccaacacagggcttaccggcccggaatcgacaatctattggtgcttcttattggaggaattccaatcgccatgcccactgtcctttctgtgaccatggcaatcggggctcatcgcttggctcaacagggagcaatcactaagagaatgacagcaattgaagaaatggctggcatggatgttctttgtagtgacaagactgggacattaaccttaaacaagttgactgtggacaagagtcttgttgaggttttccaaagaggtgttgaccaagatacagtaattttgatggctgccagagcttctcgcacagaaaatcaggatgccatagatgccacaatagttggtatgctggctgatccaaaggaggctcgtgctggtgttcaagagatccattttcttccatttaacccaactgataaaagaactgctttaacctaccttgatggagaggggagaatgcatcgtgttagcaagggagcaccagagcagatccttcatcttgcccacaacaagtcggatattgaaagaagggtcagagctgtgattgacaaatttgctgagcgtggtctgcgggcacttggtgtggcttaccaggaagtgccagatggtaggaaagagagtcctggaggaccatggcagttcattgggctcttgcctctttttgaccccccgcgccatgatagtgcagaaactatcagaagggcactcaatcttggtgtcaatgtcaagatgattacaggtgatcaacttgctattgggaaggaaactgcacgtcgtttgggaatgggtactaatatgtacccttcttctgctttactcggacagaataaggatgagtcaattgcttccttgccaattgatgatttgattgagaaggctgatggctttgctggtgtctttccagaacacaagtatgagatcgtgaaacgcttgcaagcaagaaaacatatatgtggcatgactggggatggtgtaaatgatgccccagctttgaagaaggctgatattggtattgcagtagcagactctactgacgcagctcgtagtgcttctgacattgtcctaactgaacctggccttagtgtgattattagtgctgtgctgacgagtcgggcaattttccaaaggatgaagaattacacgatctatgctgtatcgattaccatccgtattgtgcttggttttatgcttcttgcgctgatatggaagtttgacttcccaccatttatggtcctgatcattgccatcctcaatgacggtaccattatgactatctcgaaggacagagtaaaaccatctccacaaccagacagttggaagttagctgagatttttgcaactggagtagttcttggtggttatttggccatgatgactgtcattttcttctgggctgcatacaagactgacttctttccgcggctgttccacgtcgaaagccttgagaagaccgcccaggatgactttcagaagctcgcctctgccgtgtaccttcaagtcagcacggtcagtcaggcccttatcttcgtgacgcggtcgcgcagctggtcgtttgtggagcgtcctgggttcttgctggtcttcgctttcttggtggctcagctgatcgccactctgatcgctgtatatgccaactgggcgttcgctgcgatcaagggcattggatggggctgggccggtgtcatctggctctacaacatcgtcttctacttcccgctggacatcatcaagttcctcatccgctatgcgctgagtgggagggcatggaacctcgtccttgagcagaggatcgcgttcacgagcaagaagaatttcggcacggaagaaagggagcgcaagtgggcgcatgcccagaggactcttcacgggctccagccgccagaggcatccatcttcgagaacaagacaaccttcaatgagctgaaccagctcgcggaagaggcccgcaggagagctgagatggcgaggttgcgagaagtgagcaccctgaaggggaggatggagtcagtggtgaagcagaagggtctggacatcgagaccatccagcagtcctacaccgtgtgactgactgacgacgacggggtttatagaggtttcttcttcttatactatacaatctgtactaggtagcaataaggatcaaggaaggaacccctatatattggctgtggttggcgggaaatgaatgatggtaatatttatgatgtcggtgtggtgcttctgtcgccaactctcggccatactaccctcaactcaccccttgtatgctgttgcattaaccacccccggcaccaccggcaggcattgatattgagagatgaggtatagtagtctgtagcctctagtagatgatgatgaattgatgatatagtacatttttgcttgctttcttgct

SEQ ID NO: 35138 - DNA, 607 bp, Zea mays subsp. mexicana
  Clone ID: UC-ZMFLTEOSINTE096H07_FLI
cgcgatttgttctgttgttcggtccccaatcttcgcctccgctccgcccgccccgacccagatcaggagctgagagatggacgccaacaggcgccaaggtgggattcagcagttgctggctgcggagcaggaggctcagcaaattgtgaatgcggctagagctgctaagtcagcaaggcttaggcaagcgaaagaggaggcagagagggaaatagccgaataccgtgcccagatggaggctgagttccagaggaaggtcgcagagagcagtggtgactctggtgcgaacgtcaagcgtctcgaggaagagacaacggcgaaaatcgaacagctcaaccagcaggctgcaagcatctccccagatgtcattcagatgcttctgaggcatgtcaccaccgtgaagaactgagaagtgctgctcccaaactatgctcatcggtctatttatttttgtcagagcaggtgaggaataataatatggcccttgtaccagtaattctttttttaactacggaataagccgcagcagctttagcggcaaccgtgactgttactaccagaacttgccattatttggtataatcggcaaattaaataatattgtttt

SEQ ID NO: 35139 - DNA, 587 bp, Zea mays subsp. mexicana
  Clone ID: UC-ZMFLTEOSINTE097A11_FLI
gattcttgaagagatcgagcttcttttgcaccacaaggtcgaggatgtcttgcaactgcggatcaagctgcggctgcggctcaagctgcaagtgcggcaagaagtaccctgacctggaggagacgagcaccgccgcgcaggccaccgtcgtcctcggcgtggccccggagaagaaggccgcgcccgagttcgtcgaggccgcggcggagtccggcgaggccgcccacgcctgcggctgcggtagcggctgcaagtgcgacccctgcaactgctgatcacatcgatcgacgaccatggatatgattattatctatctagcttgtggtggtggttgaacaataataagcgaggccgagctggctgccatacataggtattgtgtggtgtgtgtgtgtgtgagagagagagagaaacagagttcttcagtttgctatctctctctgcatgcttggcgtcagtctttgtgctcatgtacgtgtgtctacatgcatgttggttgatccgattgcatctgctgtaaccatatattaattggtccacgatgatatgatttgatactatatatatactaaaaccggacttagtat

SEQ ID NO: 35140 - DNA, 1118 bp, Zea mays subsp. mexicana
  Clone ID: UC-ZMFLTEOSINTE097B04_FLI
tccaaagccagcgaagaagagattccgccggtgccgtagccgctgagctaaccaccagccggttcttgtcgcgttgtctgcaactttgcaagtaagcaactcgtcaccggtcagccaccaacaaggcaccttggttaggctgtttgcccatccatccatccatcgtcttgcacgtccaagaaatcgagaactcacgcaggcgtcgctcacttgccctcctcgtcctcctcccgtcgtgaattccacgctggttcagggatgtcgatcgagctcctgacgaaattcctcacattgctgttcgggtatgccatgccagcgctggagtgcttcaaggcgatcgagcagcggcccggccgggcagatcagctccgcttctggtgcgagtattggatcatcctagtcctcctcgtcatgttcgacgaaattgctggggttctcatttctaagatcccaatgtactacgagctgaagctagccttcctcgtctacttgtggtacccaaagacaagggtatgtgctagaaacactctgtctgcagctacaccaacgaaaagttttagctgtgcatatagtacttgcgagctgttgatcaaatctctgaaccggatgctgttgcgctctgagctagggaacggacatcgtgtacgagaccttcctccagccgctggtgatgcagtaccagcccaacatcgaggccaggctccagtacctgcgcgccaacgccggtgacatcctcgtcttctacctcaagaacttcaccgagagaggctacgagctcttcctccgagtgctcgactacgtccggtcgcaggcgtccagagggacaagaacgcggagtttcttctcgttccgaggtgaacgttcggagaggccaagcttcaccgatgactatgccactggcggcgaccggagggacgggggaaggcaccgtcgaccacgcagtggctactagtagaccaagtagtcactggatgtataggatgtgcacagaaacatacacgattactggtatagtgttaggtaggagtaggatcaaatcaagcaaaccttacggacagaacttgtaggatccactggaaaaacagatagcttcttataaattttctattcatattgtc

SEQ ID NO: 35141 - DNA, 1900 bp, Zea mays subsp. mexicana
  Clone ID: UC-ZMFLTEOSINTE097B09_FLI
ctgtgttcttgggcgtacgcggacacagccccgatccgaatcgtcctcctcgcgagcctcgtcgatcccccactcccctcccctcgcttcaagatgcagatctttgtgaagaccctcaccggcaagactatcaccctcgaggtggagtcttctgacaccattgacaatgtcaaggctaagatccaggacaaggagggcatccctcctgaccagcagcggcttatcttcgccggcaagcagcttgaggacggccgcacactagcgactacaacatccagaaggagtcaacccttcatttggtgctgcgccttaggggaggcatgcagatctttgtcaagaccttgactggcaagacaatcacccttgaggtggagtcctcagacaccattgataatgtcaaggctaagatccaggacaaggagggcatccctcctgaccagcagcggcttatcttcgctggcaagcagcttgaggacggacgcacacttgctgactacaacatccagaaggagtcaacccttcatttggtgctgcgccttaggggaggcatgcagatctttgtcaagaccttgactggcaagacaatcacccttgaggtggagtcctcagacaccattgacaatgtcaaggcaaagatccaggacaaggagggcatcccaccggaccagcaacgtctcatctttgccggcaagcagttggaggatgggaggacccttgctgactacaacatccagaaggagagcaccctccacttggtgctgcgtcttaggggtggtatgcagatctttgtcaagaccttgactggcaagacaatcacccttgaggtggagtcctcagacaccattgacaatgtcaaggcaaagatccaggacaaggagggcatcccaccggaccagcaacgtctcatctttgccggcaagcagttggaggatgggaggacccttgctgactacaacatccagaaggagagcaccctccacttggtgctgcgtcttaggggtggtatgcagatctttgtgaaaacccttactggcaagaccatcactcttgaggtggagtcttcagataccattgacaatgtcaaggccaagatccaggacaaggagggcatcccgccggaccagcagcgtcttatatttgccggcaagcagctggaggatggacgcacccttgcggattacaacattcagaaggagagcaccctccacctggtgctgcgcctcaggggaggaatgcagatcttcgtgaagacattgaccggcaagaccatcaccttggaggttgagagctccgacaccattgataatgtgaaggccaagatccaggacaaggagggtatccccccggaccagcagcggctgatcttcgccggcaagcagctggaggatggtcgcaccttggctgactacaacatccagaaggagagcacccttcatttggtgctccgcctgaggggcggtatgcagatctttgtgaagaccttgactggcaagaccataaccctggaggttgagagctctgacaccatcgacaacgtgaaggctaagatccaggacaaggaggggattcccccagaccagcagcgtctgatcttcgccggcaagcagctggaggatggtcgcacccttgcagactacaatatccagaaggagagcaccctccacctggtgctccgtcttcgcggtggttattgagccatcagtcgttgaagctgctgctgtatctgggttatctagtgtctctgccattgcccatggatggtgctgtctttcaaagtatttgtatggtttgtgtcgtgagtcgtgactgaactggtttcatggaccagttgtgttctcgttacccaaaactatcgtgcgaccgcatatggcttaatcatgaataaatgttgtttgaattt

SEQ ID NO: 35142 - DNA, 774 bp, Zea mays subsp. mexicana
  Clone ID: UC-ZMFLTEOSINTE097H03_FLI
agagaaacagaagaggaaaaggaatccatggcggcgacgctggcgaggagggcggggcgctccgcggcaacgacgctatggggcgcggcgaggggcttcgcatcggtggggtccgacatcgtctctgcggctcccggcgtgtcgctgcagaaggcgcggtcctgggacgagggcgtcgccaccaagttctccaccacgcctctcaaggacatcttctacgggaagaaggtggtcatcttcggcttgcccggtgcatatacaggggtttgttcacaagcgcacgttcctagttacaagaagaatattgacaagttgaaagcaaaaggaatcgactctgttatctgtgtagctgtgaatgatccgtatgtcctggatggatgggcaaaaaagctagaggctaaagatacaattgagttctatggtgactttgatgggagtttccacaaaagcttggatttggagatagacctttctgctgctttgcttggccgccgttctcacaggtggtccgcctttgttgacgatggtaagatcaagtctttcaatgttgaggaagcaccgtccgactttaaggtttctggtgcggaggtgatcctggaccagatctgagctcctcaatgaacttcggccatcttcagtttgtgcggcatacttcctctgcagcagccgaataaaattaaatctcttacgacccgtgtaagatgttaaagatacgatgcgcccagactgtatggcctcggcctcggtttttctggaatgaattgatcagtgttc

SEQ ID NO: 35143 - DNA, 1111 bp, Zea mays subsp. mexicana
  Clone ID: UC-ZMFLTEOSINTE098G04_FLI
ctcattcgattacacacacacacacggagagaacaaattgatacactgcgatctcaatcaaacaaatcaaaaaaaatcttgcgagacattactgaccgatgaagttcggcaagcgcctcaagaagcagatcgaggagagcctgccggagtggcggagccagttcctcaactacaaggagctgaagcggcgcgtgaatgccgtgtcctcccgcgggtcggcggcggatccgtcgtcgtccagcgccgcggaggccgacttcctgacgctcctggacgcggagatcgacaagttcaacgccttcttcctggagcgggaggaggagttcgtgatccggcagagggagctccaggagcgcatcgggcgtgcgggcgggcccgaggccacgctggcgcgcgtccggcgcgaggtggtggacttgcacggcgagatggtgctgctgctcaactacagcagcgtcaactacacgggcctcgccaagatcctcaagaagttcgacaagcgcaccggcggcgtgctccgcctccccgtcatcgcgcgggtgctgcggcagcccttcttcaccaccgacctcatctccgagctggtcagggactgcgaggccgcgatggaggccgtcttcccgcccgccgccagcagggacctccacgggcgccaggcgctggccgtcgccgggcagggcatcttccgcaacaccgtcgccgcgctgctcaccatgcaggaggtgcgcagcgggagctccaccgtcggccatttctcgctgccgcccatgcagccgctgccggagtccgactggctcgtccagtccgttgacagcacgccaacggcgtcgcccctcatccccacccagtgactgacgacaccatggtccacttacagttccatgatccattgcactacagtgctacaccacagcggggcgtattatatagtatgcaatatatatatatatatatgagaaggcacaataatctacatactgtagtggtgctctgtatgcggctgatgtgtacagtagtagtatttttttctctccttttgttgatgagacttgagaggtgtcctttttgctctctttcttattttaccattaataataataataattagtac

SEQ ID NO: 35144 - DNA, 1686 bp, Zea mays subsp. mexicana
  Clone ID: UC-ZMFLTEOSINTE098H03_FLI
cgcagagacaggcgtcttcgtactcgcctatctccgcgactcaaagctttccccaattcccccccttctcccatttctcaccaccgccgccgctccccccgttcaacaacaccatgagggagtgcatctcgatccacatcggccaggctggtatccaggtcggaaacgcgtgctgggagctgtactgcctcgagcatggcattcaggctgatggccagatgcccggtgacaagaccattgggggaggtgatgatgctttcaacaccttcttcagtgagactggcgctgggaagcatgtcccccgtgctgtttttgttgaccttgagcccactgtcatcgatgaggtgaggactggcacctaccgccagctcttccatcctgagcagctcatcagtggcaaggaggatgcagccaacaacttcgctcgtggtcactacaccattggcaaggagattgttgacctgtgccttgaccgcatcaggaagcttgcagataattgcactggtctccagggcttcctcgtcttcaacgctgttggtggaggaacgggctctgggcttggttctctcctcctggagcgcttgtctgttgactatggcaagaagtccaagctcggtttcaccgtgtacccatccccccaggtctccacatccgtggttgagccatacaacagtgtcctgtccacccactctctcctcgagcacactgatgttgccgtcctcctcgacaatgaggccatctatgacatctgccgccgctcccttgacattgagcgcccaacctacaccaacctcaacaggcttgtgtcccaggtcatctcatccctgactgcttccctgaggttcgatggtgctctgaacgttgatgtgaacgagttccagaccaacctggtgccctacccgaggatccacttcatgctttcgtcctacgctccagtcatttctgctgagaaggcctaccacgagcagctgtcagtggccgaaatcaccaacagcgccttcgagccatcctccatgatggccaagtgcgacccccgccatggcaagtacatggcatgctgcctcatgtaccgtggtgatgtggttcccaaggacgtgaacgctgctgtggccacaatcaagaccaagcgcaccatccagttcgtggactggtgcccgactggcttcaagtgcggaatcaactaccagcctcccagcgtcgtccccggcggtgacctggccaaggtgcagcgtgccgtgtgcatgatctccaactccaccagtgttgtggaggtcttctcccgcattgaccacaagttcgacctcatgtacgccaagcgcgccttcgtgcactggtacgtcggtgagggtatggaggagggcgagttctccgaggctcgtgaggatctggcggcgctcgagaaggactacgaggaggtcggtgctgagtttgacgagggtgaggacggcgacgagggtgatgagtactagacgctctactggcgcggcgtcgtcgggcctgcgtgcctctgctatcctgtgatctgccctgagtggctcctatcgtgttatgtttctgtcggttcttatctatctgtcgttgtgtggtttacaacttatgttgtaaagactttattcccccgcattgcaactgggtttaagtttggcgttatggttatcttgatctctgagatgcttttctttcacc

SEQ ID NO: 35145 - DNA, 939 bp, Zea mays subsp. mexicana
  Clone ID: UC-ZMFLTEOSINTE099C08_FLI
ctggctcttcctcgcgcctcgcgcgcccacccaccttcacgcgctctcccagctagatcgaccccactggcaatcgcgcaggctcccatatcccttcctgttccttcaaaaagactggactggatcttcccagagttcctgttcggagagccgccggatcttcttcgacgaggcttcgatctgctgctctccgtcggcgtgttggggacttgcaccttatccgaagatgtcttttcggagcatggttcgtgatataagggaaagttttgggaatatatcgaggcggaactttgaggtgagaattcaccacagagggaagtctcttgggtcttcaggtgacttgcaagacaggcctgctgaagttcagcaaagcaggtgggctagccttcctcctgagttgctctgcgatgtgatgaaaaggttggaggaagatgacagtagctggccggatcgcaaggatgttgtttcctgtgcatctgtttgtacaacctggagggatatgtgtaaggatattgttagaagtccagaacattgtgcaaagctcacatttccagtatctcttaagcagcctggaccccgagacggggtaatccaatgtttcataaaaagggacaaatcaaagctaacgtaccggctctacttgtcccttagctctggtgtgcttgatgagaacgggaagttcctgctagcagcgaaaaggagccgcaggatggcgcacacggagtatgcaatttttatggattatggtgagctgaaagtgcggaaatgcttgttagattaataagtagcttgggcaaatatttttagtcgggatgaatctcgtgtttggtcataatgcattgtgtgatgtcgtctgatccatgcttgttgcatatgtattattcgtgacggtgtcttaaaaatagcatcatctggtaatcgtcaattttcgtaggttcc

SEQ ID NO: 35146 - DNA, 1625 bp, Zea mays subsp. mexicana
  Clone ID: UC-ZMFLTEOSINTE099E06_FLI
gtggatttaatttaagaagggcttccttctgaagttgcaaagagaatgacattcgaagagcagttaacaagagaaacttgagtataaagaaagagtagcaccaacacaccttccagcaccctccaagggacgctacctaaatctcgggacgagattcctttaaggggggagggctgtaacaccccaggtgttactcagggtgtccataccagagtttccccttttacccattatcacatgaagattaaattgggcaaagtgtaccacacttgagattctaggtcctaagcaagagtaatccactttggatgtcatgccctagcttatcatgcacatctaagtggggatctcccaaaaccctagagcaaaacccccataggtaattataaccctaattgaagccatgatcaaaagagcatgtaaacatcaagaccatggcttggacccaatataaaggttgtaatacactcaataacctaccattaatagtaaggaagtacccacaaaaagtttgcagaaaagtcctaaaaagatcaccaaaggttgaaaacaagggagaaatgcagattttgcctaagttaaaaaccaacccttgagcaaagatccctcatgttcaccttgatccccttttcaaaatctgtcgacccaattgacaaaaaggcgccaaactaaccctagaacaccctggaaagagatgacacctaccctagggcgctagacacgacttgacaccccttttgtctcggtttggaccctgctgacacagcaaacttctcccctctctatctctctgtccagaccaaatctcgacttggaacccacaacaaaaaggtaggatttggagcagagaagtgaccgtacacagtgaccttgccgagatatgcacgccatggcgctcaaaccggccgttgaaccttggcagacgcaaccatccacgtgttcgacgcatgctggcacccgggggcgcgctcagtgcacgccggtgcgcgaacccccgcgcgcccgcggccacccgtgaccacgcccgcgccaaggctataaagcccgccccagcgctcggttgcttcccccgttgcctcgtccgtacttcgccggacttgcccgagccagccgttgcctccggcgacctccccgcgacccgccagtgccgcccgaacgccaccgccgtggccaacccctctccagccatcctccgttcgatccaagcccccagaaagtttcctggtgaagccgtgaaccttgctcaagctttacccgggagcccgcgtcaccggagaggccaaatcgcgctcaccggagttaaagaactcgccggcgcacgtggaccgggtaaaccccttcgccattttccgattcctcgcgcgtatggcctctgtgtcatcccgtggagctcctcgtgcccattaattgaactcccccgccgtggtttggccggagcaggcatcgccgtcgacctccgccgcctgcgcacgtggaccgagcagctgctcgcaccatccccgtcgcctgtttcgtttcagactcccccccagtatattccttcccgatcagagaccccccgcacgtaatgtcatttgtattgccgtcatatttgtagctgatatatatagtgtatatttaagatc

SEQ ID NO: 35147 - DNA, 1545 bp, Zea mays subsp. mexicana
  Clone ID: UC-ZMFLTEOSINTE100F10_FLI
gctttaggtaatgttgctggtgactccccaaagtgccgtgatctggtacttggtcatggtgggctataccctttgctgcagcagcttaatgagcatgctaagctttcgatgcttaggaatgccacatggactctctccaacttctgtcgggggaagccacaaccaaactttgatcaggtcaaaccagcattgccagcactacagcaccttattcactctcaggatgaggaggtcctaactgatgcctgttgggcgctctcatacttgtctgatgggactaatgataaaatccaagctgttattgaatctggcgtgttccctcgccttgtggaacttctgatgcatccttcggcctctgtactcattccagctcttcgcacggtgggtaacattgtaactggggatgacatgcagactcagtgtgtcattgacaatcaagcacttccatgccttttgaatcttctgactaccaaccacaagaaaagcatcaagaaagaagcatgctggacgatctcaaacatcacagctggtaacaaggagcagattcaggctgtgatcaatgcaaatataattgcacctctggtgcaactcctgcaaactgctgaatttgacatcaagaaagaagcagcctgggcaatttcaaatgccacttctggtggcacacatgatcagatcaagtaccttgttgcccagggttgcattaagccactctgtgatctgcttgtttgcccggatcccagaatcgtaacagtttgcttggagggtctcgagaacatcctgaaggttggcgaggcagagaaaaaccttggtgcaggtgatgtcaatgtctatgcacagatgattgatgatgctgagggcctggacaagattgagaacctgcagagccatgacaacaccgagatatatgagaaggctgtgaagatgctggaatcctactggctggaggaggaagatgatgccatgccctcaggcgacaatccccagaatggcttcaactttgggaaccagccctctgttccatcaggtggattcaactttggctgaagatgcccatttggaatggccgctgtgccattatgccttggctagtgctctgggctagtcagaggtgtggggtagcggcgtcaaccaagtcatggttgagtcccattggtctggtctcagggagttgtcatgtcagtcccagtcagcagggtcagtccttgggctgcattaccagtggtgcagcttggtcggtggtcagtcttgaaggtcagccggttggatcatttgggctcttgctcccaccagcaccacctctggtgggaggcatcaggcatggagtcgcgggtgttgtcgggagttgggttttgcctcctatacagcataaatgaattatattgttttacctgttggtagaaagaaccttgaaagatagggaacgtgtcgttttttgtcaaagcggttcctgtgctgtataacatgttgcatgagtattggcgcaacttataagacaatgtcaaatgggtttttgggagtcccattctggtttcttgagtcttcttc

SEQ ID NO: 35148 - DNA, 1702 bp, Zea mays subsp. mexicana
  Clone ID: UC-ZMFLTEOSINTE100G06_FLI
ctcaacggtccaaccctccggttcgacgtaggcgccggcggcgaaatgaaggtctccgtgaagacgctcaagggatccagcttccatatcgaagtggatcctaccgataaggttgccgacgtgaaaaaggttatagagagtatacaagagcaggcctcctatcctgctgaccaacaagtgcttatacaccaggggaaggtgctcaaggacgacacaacattggaggaaaaccaagtagttgaaaataattttcttgttataatgctcagacaggtaggctacttgtttattattctggttgacacatgggcacatgacaaatcacgggtgtatgacttggtatgataagaaagttattactgagatatgaataactgataatgttaactgaataactttcatagtgcattggattgtttgaaagaatttgtgcttcaatttctatggctagcttattaggcagtattttatatatggatgcaaaggctgctgtgaatttggaatgtctacgatagcatcagaaatgttctatatatcttatcaattgtaacctttcacagaacaagggatcatcaagtgcagcaccagctaaggtaaccgcgaatcaggcaccctctactcagacagtgcctgctactccacctcaaacgtcagcagccccagatgcaccggcacctattgtacctgtcagtgcaccggctgcaactgctacagcctcagcagctcctgctgttgctgtctccactgaggcggatagttatggtcaggctacctcaaacctagttgctggcagcaacttggaagaaacaattcaatccattcttgaaatgggtggcgggacatgggatagagacactgtactacgtgctctgcgggctgcgtacaacaatccagagcgtgctgttgagtacttatattctgggattcctgaacaaatggaggttcctgcaccgcctccgagttcccaaccagtcgaccctgttcaggcggtagtagcggtacaaccagctcaagctggaccaaatgctaaccctctcgacctctttccccaatctcttccgaatgattccgctaatgccaacacaggaaaccttgatgttttgcgtaataacgcacagttccaaaacctacttggtttggttcaggctaaccctcaaattttgcagcccttgcttcaagaattgaggaaacaaaatccccgggttatgcagctaatccaggaaaaccaagcagagtttatgcggttgattagtgagccactagagggagacgaagagaatgaaatgatgctggatcagatggcagatgcaactgagaccattgcagtcactccagaggagaatgaagctatacttcgccttgaagggatgggctttgaccgggcactcgtcctggaagtgttcttcgcctgcaacaagaacgagcagctggccgccaactacctcttggatcacatgcacgagttcgacaacgatgacgggctcggagggcctccattgtgatgcgatgcgaaggctgtagggcagaaaataggaaaacgttttgggatttgtctcgtctgtccgctccgctccccctacatttctttgctgtttagtacataattctagatttacagaaaagacaaagtttactcttttctggatcatatgttttgtgctacttattgccgttctggccggcattgggccagcatgcagtt

SEQ ID NO: 35149 - DNA, 1064 bp, Zea mays subsp. mexicana
  Clone ID: UC-ZMFLTEOSINTE101C07_FLI
caacccactcatcactcctcactcactcactcaaaacgaaagccagctcagctctgctcagctgctcacacctcacacccacaggccggccgccacagcaccacggatagcagagcagagcggtgagctgcagagcagggcagccgaggtcggtcgtcgtcgtcactcgtcagccatgagcaaggacaagcaccacaagcacgagcaccacctgcggcgttgctgcgggtgcatggcgtcgtgcctcctggcgctggtcctcatcgtggccttcgtctcgctggtggtgtacctggcgctgcgcccctcgaagccgtccttctacctgcaggacctgcagctgcgcaggcccatctcgctgggcgacccgtcgctgacggcgtcggcgcaggtgacgctggcctcccgcaaccccaacgaccgcgtgggcatcttctacaagcgcctggacgtgttcgtcacctaccgcgacgaggccgtgacggtgcccgtgtctctgccgccgcagtaccagggccaccgcgacttcaccgtctggtcccccgtgctgtcggccgagtccgtgcccgttgccgcctacgtcgccgacgccatgaagcaggacgtcgccgcgggcttcgtcgcgctgcaggtcaaggtggacggccgcgtcaagtggaaggtcggcagctgggtctccggcagctaccacctcttcgtcagctgccccgccgtgctctccgcgggctaccccggcgtcaacaacaccgtgtcgtcgctcaagttcgcccagcccacaggatgcagcgtcgaggtgtgatgagtttgtgaccaaacaagtgccctgccctgccccctacgtattgctgcgtgctactcaaatttcatcttttgggtgcgagtgcgacggccgccgttaactgggctcttttaatttggttcatgtctcgttgtcaattctcattctcttgtgggccgggccgggggaataaattatttaatttgctttagccagacggctgtccagaaacttcaactcagttgtaccgtgacgtgtattaattatttgatttcgtccttttatt

SEQ ID NO: 35150 - DNA, 2184 bp, Zea mays subsp. mexicana
  Clone ID: UC-ZMFLTEOSINTE101D11_FLI
gttcaaacatccatttgatgtgatagttgagtttatctctgaagaaattcggcatggccctttaatcctttttctgaaggacacagagaaaatttgtgggaataatgattcctattatggtctgaagagcaagctaaaacattttccagctggcgcttttataattggatctcaaatccagcctgacaatcgcaaagagaaggcaaatgttagttctccttctctttcgaagttccggtacagccaagctatacttggcctcacattacaggacattgatgggggaaatgataataataaagaaacatcaaaggcaatgaagcatttgatcaaacttttcccgaataaagtgacacttgaggcaccacaagctgaaatggagctttcacggtggaaccagatgttaaaccgagatattgaagtccttaaaggaaatgcaaacatttcaaaaatacgctcttttctaacaaggcttggattggaatgcactgaccctgaagcgatattggtcacggatcgcattcttacaaatgagtgtattgataaaataattggttttgctttgagccatcaacttaagaactgtacaaatccagacccccctttgggtagtgtgcagtttgctctatccagcggaagtcttaagcatggcgttgacatgttgaaaagtatccagtctggctcgaagagcagcaccaaaaggaaatcacttaaggatattgctactgaaaacgaatttgaaaagagccttcttgctgatgtcatccctccacatgaaattggtgttacctttgaggacattggagctttagaaagtgtcaaagatactctgaaggagttggtgatgcttcctttgcaaagacccgaacttttcaaccgaggacaacttatgaagccatgtaaaggaattttactttttggcccacctggtacgggaaagacaatgctggctaaggctgtggcaactgaggctggtgctaatttcataaacatatcgatgtcaagcatctcttcaaagtggcttggtgaaggagaaaaatttgtgaaagctgtgttttcactggcaagtaaaattgctccaagtgtaatttttgtggacgaggttgatggcatgttgggaaggcgggagaaccctggagaacatgaagccatgcggaagatgaaaaatgagtttatggtgaactgggatggtctgagaacaagggagaaagaacgtgtattagtacttgctgcaactaacaggccatttgatcttgatgaggctgttgttaggcggcttccaaggaggttgatggtgaatttgccagatgcatcaaataggagaaaaattcttagtgtaatactagccaaggaagatttggcagacgacgttgatctagaaactatagctaacctgacagaagggtactcaggcagtgatctcaagaatctgtgtgttactgctgcacaccgtcctattagggagattcttgaaaaggaaaagaaggaattgcaattgagtttcaagtggatttgctcacatgcaggagagagcttcagcagaagcagaaaatagatcattgcctccgtcacacactagcaatgatgtccgtgcattaagaacaagtgatttcatacatgcgcatgaacaggtgtgtgcaagtgttccctcggattccagtaacatgagcgagcttgtgcaatggaatgatctctatggagaaggcggatcaaggaaaaagacaacgctaagctacttcatgtagcttaggttataaatatattgggagaagtgccctggcacaaagcagcaatagttggaggcggtgcagttggaaaaaaagctatgctcatctgccagacatccatatcaaagagaattgatggttcaggtggagcggatagtatacatacacatggttgctgcctctgctctgggccatgcatctggacaggacggctagcctggcttgcagttgccctatgcagttttgagtgcaatggtcaccatctgtgaagcacggataccacagagatcctggccccaaccactcttttcacaaatggagctgaggacctttggagttctaccaaaagtgatcttaaatctttggtgctgtttggttcaaaaaatgtaacgcaaatggtaatggtaatggtttcagctcgattactggcggtaacaaatttgaataagctggtatc

SEQ ID NO: 35151 - DNA, 1232 bp, Zea mays subsp. mexicana
  Clone ID: UC-ZMFLTEOSINTE101G02_FLI
ctttaaccgagcaagtgaaggctgatggtctgcttcatacaacatgtggaacccccaattatgttgcccctgaggtgatcgaggatggaggctatgatggtgcaactgcagatatttggtcttgcggagtaatcctctttgttcttcttgctggatatttacctttcgaggatgacaacatcatcgccctatacaagaagatttcagaagctcagtttagctgcccctcttggttttcagctggggccaagaacatgattaccagaattcttgatcccaatcctacaactagaatcacgatttctcagatactggagcatccttggttcaaaaaggggtacaagcctcctgtttttgacgagaaatatcaaactagcttggatgacgtggatgctgcttttggagattcagaagaccggcatgtgaaagaggaaactgaagatcagccaacctcaatgaatgcattcgaactgatttctctaaaccaggcactgaatctggagaatttgtttgaagcaaaggaggagtataaaagagagacaagattcacctcacagtgccccccgaaagagataatcacaaagatcgaagaagctgcaaagccgcttggctttgatgttcagaagaaaaaatacaagatgcggatggagaacccgaaagcaggtagaaagggcaatctgaatgttgcaactgaggttttccaaatagccccatccctgcatgtagtcgagctcaagaaggcgaagggggacactctggagttccaaaagttctacagaagcctgtcgacccagctgaaggatgttgtgtggaagtgcgacggcgaggtggacggcaacagcgcggcagcatgaaagcgccctttgaactttccactggacggcgccggttttcctttgtacatagcttctctttcggatgatcccgtgtccattgcagagtcggttttgcaagcaagttctttggtttatttgtagtaagcccggtgaaacaaccgccctggaggctgttgtggatgagcttactggcgtgtttagttcgtttcatggtcgggaggttggatggaatggaaaccacaatcaaggctgtagtagtgtgtgtagtaacgaagtagatacatgcatcagatggtgtaagggagtaccagctgttagttcatggtttcaagcttagccccccttcaatttgttcgatgatgtattacttcacaataaacattattacttagatgt

SEQ ID NO: 35152 - DNA, 2116 bp, Zea mays subsp. mexicana
  Clone ID: UC-ZMFLTEOSINTE102B05_FLI
cacgcgccgccgccctcctctacacgcgccgccgccaccgcctccaccaccacagcgcgcaggaatccctcgttctcgcagagggtttcaggcgtcgtatgtaagagaagatggcgctctcagtatccatggagggcatcgaggcgcgggcgcgggatctcggggtggacctctccgctgtcgatctggactccatcaccctcccggccggcgaggacttcggcatcgtcagtgatgacgaggaggtacttcgtagtgaggatcttccagaacttgaaatgggtttgtccaacattattgtcgtggacaatctgccagttgttcctccagaaaagtttgagaagcttgagaatgtcatacgcaagatctacagccaaattggtgcgataaaagaaaatggtctatggatgcctgtaaacccagagacaaagaagacatacggttactgtttcattgagtatagtacccctcaggaagctgagctggctagggaaaaaaccaatgggtacaaactcgacaagtctcacatctttgcagtcaatttgctcgatgattttgagaagtacatgaaagttcctgacacatggacccctgctgaaattaagccatacactgctggagaaaatcttctgaagtggctaactgatgaaaaggcccgagatcaatttgtcattcgtgctggcacactaactgaagtttattggaatgatgcaagaaagctagcacctgagcttgtttttcaaaagcagtactggacagatagtttcattcagtggtcccctctgggaacctacatggcaacggttcataggcagggatcacaggtgtggggcggtgaaaatggcttcgagcgtttgatgcgttttgctcatcctttggtgaaactgattgacttctctcctggtgagaggtatttggtcacatacagcagccatgagcctagcaaccctagagacacacatagagttgtcctgaatatatttgatgtaaggactgggaaagtgatgcgagactttaagggaagcgctgatgattttactactggcgggaatattggggtttctggtgtttcatggcctattttcaggtggggtggtggaaaggatgacaaatattttgcgaggcttgggaagaatataatatctgtctacgaaacagatacattctcccttcttgataagaagtctttgaaggtagaaaatgtagtggacttcagctggtctcccactgatcctatcatatctctgttcgtgcctgaaatgggtggtggaaatcagcctgcgagggtgagtctagtgcaaatccctggcaaagaggagctgcgacagaaaaaccttttcagtgtcagtgattgtaagatgtattggcaaaacagtggagaatatcttgctgttcaagttgatagatacacaaaaacaaaaaagagcacctacactgggtttgagctgtttagaattaaggagagggatatcccaattgaggtccttgaactcgagaacaagaacgacaagatcattgcatttgcatgggaacctaaaggacatcgctttgctatcatccatggtgatggccctaagcctgatgttagcttctacaccatgcgaacagccaataacactagccgtgtatccaagctcacaaccctcaagtccaagcaagctaatactctgtactggtctcctgctgggcgcttcatagttcttgctggactgaagggtttcaacgggcagctggaattctacaatgttgatgaactagagacaatggcaacaggagagcattttatggcaacagatatcatgtgggatccaactgggagatatctcgcgactgcagttacctcagttcatgaaatggaggaagtcgttgatgtccgtcaagaagttcttgcattcgacctagatcaggagtgaaaacacttattatagaatctgttgatttctttcctgttggtgttaaagttcattggggtcgcattgcataataggccctagtgatcaagtgcgcaatttactgatcgttgtactgcttatttgtacacttgctgcttgaattgttggatcatgtgttcagatatcaaattttgctgctggattactaatctgtctggttctgc

SEQ ID NO: 35153 - DNA, 1299 bp, Zea mays subsp. mexicana
  Clone ID: UC-ZMFLTEOSINTE102B07_FLI
gttgttggtctccttcaaggttcagtaaattgcagacaagaccatccaacaagcagcggcaatggtctgtataatggtggaaacagtggtccggttgctaaagccaactcaacaaactccatgcaatcaaatgcaccagcatcgtttcctttgccagcaccctcggcatcaaatggcaatatgatgcctgctcctcagcactcaagccaaatgaattcaccaaccatgtcatcaaacctacctcctatgcaaacacctgcaagccgacctcaggaacccgagccaattgagtctcaaagctcggtccagaggatattgcaagacttgatgatgcaatcccatatgaatggtgttgggccagtgggcagcgatatgaggagagcaaacacaattactcctggtctgaacggtgtcaactccgtagttggtaaccccatgacaaataaccctggaatcaatgggatgggatttgcggccatgggtggccttggtcaacaaatgagaacggcgatggggaacaacgcattggcaatgaatggaaggaccgggatgaatcacagtgcgcatgacctgacacagttggcccaccagcagcaacagcgcgatttaggaaaccaattgcttgggggccttagagctgcaaacagcttcaataaccttcaatacgactggaagcctgctcagtagagtgagcaggagtcagaaagctcgcacctaatatttatacagttatccttgctgggtcggtccatcactgacaacacaaaagttacgcctcaccacaacctgccctccctcagaagcggagtgttcttactgatggtgcattgctacatgttacagcgaatatgaaacatgagcgctgatcggtacatgttacatcaactgtctgtatggctgtctcccattgtgttctgcaaaagtgaggccccgtgaatcagagcctactttcacatggactcattgtgggtgcaagtgttggcggattccagactggggcaagatcagggcgtctttctttcccctgtttttccaggttggatgacaacgatttctctcttgcagtctgtactcttgtgtaccatggctctccgtaagttgtgaaagcatgagcacctatctatttccacctttgatggccaagaatctcattgtagctttgctgtaccatgtataagctgttattaactagtggaaagcagcaggaaaaaaattctgaagggagtgtgaatcttggtgtgtcatctgtgtacctgtgtttctgataaatgctctcgtttaagcaggttgatctttcac

SEQ ID NO: 35154 - DNA, 1128 bp, Zea mays subsp. mexicana
  Clone ID: UC-ZMFLTEOSINTE102B12_FLI
caagaaatggaataaaagaaattcaaattaagacaaggatatggaggaattacaaaatcccttcttctttcttctcatgcgtggaattggaatatgcttgcctgcaaggatgtatattccagttgccacctttgtttgcaggctttaagcgaatgcgtacccttcatttcgttgagttctgtgcaacggaaaacaatattggggaattagtagcgagctgcccgaacttggaggaacttattctctccaggttgctcagctttgctgatatcaccatccactcaacaaagctcaaagtcctaagagttgatggcatgtttaaacatctcaatcttgtgacgccgcacgtctcttcagcagtgattaacctgcaagttaacactggttatgtcaaaagggctgggtccaactttaatctttcccaattcattggttctcttttggatattgaaaatatttcattgctcgggcacgcttttgagtgtgcagcacatggaattgtgcctggtaaactaccaagatcgttaaatcggctgaccgagataaccctggagcttgaccttggtaacctgaaggaagcaaacgcggctcactgtttgtttcaaattgctcccaacttgcgacgcatggagctacagcttatgcacaggggctattctgcacccacctcgagtttctgggactcggttgatcgtcaggattgtctcttcaagaacctttacacagttgtcatgaacaacttcactggttcctgtgcagagtcaggcttcttgaaacttctgctcgatgacgcgcctgtacttagaagtgcgcggatagaagacaacaacaaactggacaaagaatccctcaaacgcctcctgaagatgagaagagcatccaaggacgcagaaataatcctcctttgaggcgtggtcccctggctccagtagatgcccactgttctttcctggtgaagcgatttggtctgctgtgttataggttttattcaactaggcgtttgggcacaacttcgtctgaacaaaagttgtgtcttcgcgtatacctgtgtttcagtgtgtcaccttcagcaaagctaaatgttgcacccgagtcagagtcgtgtttcttttagcattttgtgttggt

SEQ ID NO: 35155 - DNA, 1777 bp, Zea mays subsp. mexicana
  Clone ID: UC-ZMFLTEOSINTE102C10_FLI
gctgcagccgaaatcctcaagtctccgtcgtctgaccccacctcgacggcccagatccactcgccctcgccgccctcgtgcccctcagtccctcactccctcgcctcctcagcggcgaagacagctgcgaacggggccatttttaggcgggagcgcgggcggcggtgctagcagattggttggtttgagtggttgggccggctcttcgaaacgccccgcggcggcgatgggatgcttccattccacggccaagcggcagcatcctggctacgaggaccccgtggacctcgcctcccagacctccttcagtgttagtgaggttgaggctctattcgagctgttcaagagcataagtggttcagtgattgacgatggcctgatcaacaagggcttctgggaaacaatccccatgccattacagactgagattacgaactccgtggccagggtccagctaccatgaaccccgatgccctttacatgggcgtacaacaatgaaatacctgtccaaaatactcataagttatctgtctagattggagtgagatgccatctcagattatgggcgtacaacaacaaaataccttctcaaaaataagctattgtatctggtgccattcatattgtggataagctaaatttgaactgcataattagaggaagtgtatggactatggagtgagatgccatctcagattatgggcgtacaacaacaaaatacctgttaaaaaacaagctattgtatccggtgccattcatattgcggataagctaaatttgaactgcataattagaggaagtgtatttccgttccatatttatttcaaacatcatgttataaaaagtttttgaaatgtcatgcagaattaccactttatgccattgagaaatgaaattttgtggacataaaaaccaattagtgattaatctttgccatcattgtatattacacaggaagaattccagttagcattatttaagaatcagaggaaagaaaatcttttcgctaatcggatatttgaccttttcgatgtcaagaaaaggggtgccattgattttggtgactttgtccgagctctaaatgtgtttcatccaaatatcccaatggatgaaaaaattgatttctcgttcaagctatatgatatggatagcacagggtttattgaacggaaggaggttaagcagatgttaattgctcttctaggagaatcagaaatgaggctatctgatgatatcattgagacaatcctggataagacattctctgatgctgatgcaaatcaggatgggaaaatagatagaacagagtgggagaattttgtcacaagaaatccttccttgatgaagataatgactctgccatacctcaaggacatcacaacaacattccccagctttgtgtttaactctgaagtcgatgatctcgtcacgtgaccacgattttctctccgatgtatagttaacaaggagaacctgtcgagggttacgactggagatttctagcctctggcattatgaatggagggtatattcatgcggctaccaggaaggctgcgtcaaaattgtctgccacagatgtacttgacgagctgtagtttttactcggtgataatgttgatgcttttgtgttggtgatgattgggacttgagttagtatgcagagatgaacatttttcatttttaccagtgggaagtctctattttgtttgtgaaactgcgacgtgcgtgtctgtactgatcaaatatgattcttgtcaaagtagtactgcattctact

SEQ ID NO: 35156 - DNA, 1391 bp, Zea mays subsp. mexicana
  Clone ID: UC-ZMFLTEOSINTE102D03_FLI
cgccgtctgccttctgcgcctccatttcggcctctgtcccttgcaagttcaatctcacctccaaccatgggtaaagagaagtcccacatcaacattgtggttattggccatgtcgactctggcaagtcgaccaccacaggacaccttatctacaagcttggaggcattgacaagcgtgtgatcgagaggttcgagaaggaggctgctgaaatgaacaagcggtccttcaagtacgcgtgggtgctcgacaagctcaaggctgagcgtgagagaggtatcaccattgatatcgctctgtggaagtttgagaccaccaagtactactgcacggtcattgatgcccctggacaccgtgacttcatcaagaacatgatcactggtacctcccaggctgactgtgctgtccttatcattgactccaccactggtggttttgaggctggtatctccaaggatggccagacccgtgaacatgctctccttgcgttcacccttggagtgaagcagatgatttgctgctgcaacaagatggatgcaaccactccgaaatactccaaggcacgttatgatgagattgtgaaggaagtctcatcctacctcaagaaagttgggtacaaccctgataagattgcctttgttcccatttctggttttgagggtgacaacatgattgagaggtccaccaaccttgactggtacaaaggcccaaccctgcttgaggctcttgaccagatcaccgagcccaagaggccttcggacaagcccctgcgtctgcccctccaggatgtgtacaagattggtggtattggaactgtaccggttggtcgtgtggagactggtgtcatcaagcctggtatggtagtcacctttggtccaactggcctgactactgaggtgaagtctgttgagatgcaccacgaggcgcttcaggaggctcttccgggcgacaatgttggcttcaacgtgaagaacgttgctgtcaaggatctcaagcgtgggttcgtggcctccaactccaaggatgaccctgcgaaggaggctgccagcttcacctcccaggtcatcatcatgaaccaccctgggcagattggcaacggctatgccccagtgctggactgccacacctcccacatcgccgtcaagtttgctgagctcattaccaagatcgacaggcgatctggcaaggagctcgagaaggagcccaagttcctgaagaacggtgatgctggtatggtgaagatgattcccaccaagcctatggtggtggagacattctccgcgtatcctcccctgggtaggtttgccgtccgcgacatgaggcagacggttgctgttggagtcatcaagagtgtggagaagaaggacccaacgggcgccaaggtgaccaaggc

SEQ ID NO: 35157 - DNA, 1889 bp, Zea mays subsp. mexicana
  Clone ID: UC-ZMFLTEOSINTE104B03_FLI
cccacctcctccttccttttcgcccccggtttatttttctcttcgtcctggatgcgtcggtcgcgtgtttgatctgactaagccgtggaggagggtgctagatgtccgtgcggtgggcggtggctcccgagggcgaccggagttaggtccttgccgccttcagtgcggtggggaagcgagacattgaaggcgcagaacccaaagaatgggtaagagaggaaagtggtttagtgcggtgaagaaagtcttcagctcctccgatccagatggaaaggaagccaaggcccagaaggcagataaatcgaaatccaagaggagatggccatttggaaagtccaagcactcggagccttccatatcgacggtgccaggcactgctccagcagtagctccgttgccatcaccaccagcaactcagccccactctctggagatcaaagatgtcaatccagttgaaacagacagtgagcagaacaagcatgcctactccgttgcgcttgcgtctgctgtcgctgctgaagctgcagcagttgctgcccaggctgccgcggaagttgtccgcctcacagcagttaccacggctgcaccaaagatgcctgttagttcgagggaagaacttgccgccaccaagatccagactgccttcaggggttatctggcaaggagagcattgcgtgcactaagagggctagttagattgaagtcgcttgttgatggaaatgctgtcaaacgccaaaccgctcacaccttgcaatgcacacaagcaatgacaagagttcaaactcaaatctactctagaagggtgaagttggaggaggagaaacaggctcttcaaagacaactccaattgaaacatcaaagggaacttgagaaaatgaagattgatgaagattgggatcacagccatcaatccaaagagcaaattgaggccaacctaatgatgaaacaggaagctgcactgaggcgagaaagagcacttgcatatgcattttctcaccagtggaggaattctggtcgaactataacccctacttttacggaacctgggaaccccaactggggctggagctggatggagcgctggatgacagcaagaccatgggagagccggttggcggcggcatcggacaaggaccctaaagaacgtgctgtgacaaagaatgcgagcaccagtgctgttcgagcacctgtatcccgtgtcatctcgattcagagaccagcaacaccaaacaagtcgagccgcccaccaagccggcagtcactttcaaccccgccatcgaagaccccgtcagcctcaggaaaggccaggccggcaagtccaaggaacagttggctgtacaaggaggatgacctgaggagcatcacgagcatccgctccgagcgcccaaggaggcagagcacgggtggaggctcggtccgggacgataccagcctgaccagcacaccacctctccccagctacatgcagtcgaccgagtctgcacgggccaagtctcggtaccgcagtctactactgactgagaagcttgaggttcctgagagagcgcctctggcccactccgttgtcaagaagcgcctgtcgttccccgtcgtcgagaagccaagcgttgtgccgacagagaagcccagggaaagagtgaggcgccattccgaccctccgaaggtcgatcctgcgacgctcaaggatgcccctgctgcctgaccagtgaccaggccttatgtgattgttaggtttcgtgctcttttaacaccgtgatgtattatctgagttaggttgctttgttcgtgtcatcgtatgatctgtccgggttgattttgagacagttctaactgtgtttacagacaatgcgtgatgctaaatgtatgtgtggttggttggctttcaatgt

SEQ ID NO: 35158 - DNA, 1134 bp, Zea mays subsp. mexicana
  Clone ID: UC-ZMFLTEOSINTE104B11_FLI
taagctagctgtgtcggacggcatggatctgagggtactcatcgcctaccgctaccttttcggatcagccttcctcggcccgctcgcctacttcgtcgagaggaaaaaccgaacgaaactgacatggagggtggtgttcttgtctttcgcgtgtggcctctcagggggcacgatggcgcagaacctgtacatcgccggcatgaagttcacctcggccactttcgcctccgcgacaaccaacctcctcccggcgtgtaccttcgtcatcgccctcgtcttccgctacgagaagttcgccatccgcagcctgtccagccaggccaaggtcgccgggaccctgctgggcgtcggcggggccatgctgctcaccttctacaagggcgtcgacatcacgccctggcacagcaacctcaacctcgtcgccacgctcacccagcaccaccaccaccacaccaccaccaccaccaccaactacgccatggggtcgctgctctgcgtctgcagctgcttcttctacgcgctttggatcgtcgtgcaggccaagctgagcaacgagtacccgttccactactccagcaccgccctcatgtgcatcatgaccacgctgcagtcctccatcttcgcgctctgcttcgacagggacgcctcgcaatggcgactcaagttcgacatcaggctgctctcctgcgcctactcgggcatctttgcgtcgggcgtcgcgctggtgataatggcgtggtgcgtgcagcagcgcgggccactgttcgtctccgtgtttagcccgctgatgctgctcattgtggccgtgctgagctcgctgctgctgggtgagaagctgcacctcggcacggcaatgggcgcggtgctcatcgtcatgggactctacgccgtgctctggggcaagggacgcgaggcagcggctgaggcggccagggtcagcgtcaacgaccaccccaccaccagcaacagcaacagcagcgaggaggacgacgacaagaagcggcacgttagcgtcccaatgcctcccgcaccaaactccgtctgatgttaagctacaaacggggccggggttggggcgaaaataaatacggagtactagctagtatatataattatatatacgactatggtgat

SEQ ID NO: 35159 - DNA, 619 bp, Zea mays subsp. mexicana
  Clone ID: UC-ZMFLTEOSINTE104D10_FLI
catgtttgaagggtctgaatggagttccagacattgtagagtgctcttttgtgcaatcaactgtgacagagttgccattctttgcctccaaggttcggctcggcaagaatggagtggaggaagtgcttggtctgggtgagctcaacgacttcgagaagaaggggctggataacctcaagggcgagctcaagtcttccatcgacaagggtatcaagtttgcccacgggaactaggcaccttgcccggcttctaacaattgatgccccttgcatttttgtttgactgcctatttttcctgccccccgtatggttggggcaatgaggcgtagtggtcgataataaaacccagcggaacaaagaaaacgtgtgccagaaactgtttgcaaacaccggtgccttttttttgtgttgaaccaccattagttgagccgtgagggaatggtgaacaagctttccacttgctcatttccgagcgcttctctttgattgtatgcatggtttggattcatgactggacgtcttggcagttggcttggcacccaggaatctaatcactgttgttgcttctgttatcgagattttgcagcgttgcattctgatcggaactgttgagctggac

SEQ ID NO: 35160 - DNA, 1346 bp, Zea mays subsp. mexicana
  Clone ID: UC-ZMFLTEOSINTE106G02_FLI
gcgacgctgacgaggtcatcccgaacggtggtgtcgagcacagccatggcgcaaacgggtttcgtgtcgcggctgctggcgaagcccgtggcgaggaggatgaggacgtggaggaagatgacgacgacgacgatgactttgaggaggaggatttgggggaggagattgatgaggatgttgatgacgaggatgctgttgtggaggtgcatgatgtaccaagtagtgacgaggaggaagatggcgtggaggaggatgaggaagaagaggatgaggacgaagatgatgaagaagaggaggaggttgaggatgaaggtgaagaggcggagccacagagcagtggtagggttgccatgatgacaggacctgcttctgctggacgtcacccctctttctctgggtctggagactgctggaggagttatgacggtgctgatcccgaggaacaccaccatccccaccaagaaggagcaggtattctccacccactcggacaaccagcccggtgtcctgatccaggtctacgagggtgagaggacccggacacgcgacaacaacctgctgggcaagttcgagctctccggcatcccccctgcaccccgtggtgtgccacagatcaccgtgtgctttgacatcgacgccaacggcatcctgaacgtgtctgccgaggacaagacgacggggcagaagaacaagatcacaatcaccaacgacaagggccgtctctccaaggaggagatcgagaagatggtgcaggacgctgagaagtacaagtctgaggatgaggagcacaagaagaaggtggaggccaagaactcgctggagaactactcctacaacatgcgcaacacgatcaaggacgagaagatcgcgtccaagctgccggccgatgacaagaagaagatcgaggacgccatcgacgcggccatcagctggctggacgccaaccagctcgccgaggcggacgagttcgaggacaagatgaaggagctggagagcctctgcaaccccatcatcgccaagatgtaccagggcgcgggtgaagacatgggcggcgctggcggcatggacgaggacgcccccgctggcagcggcggccctggccccaagatcgaggaggtggactaagcggtttgttgtcagtcttgagtgtgctgcagttgctggctggcccagttgctgccgcgagttatcgtcgtcggtcggtgcggtgtgtccgcttaaactttatttgtggtgggttgatacttttgtggtggttatttttttggacctcgtgatagtcggtcggttcaatgttatcgcggctactggcaaaccttaagtgatacggtattcttcttttcggt

SEQ ID NO: 35161 - DNA, 854 bp, Zea mays subsp. mexicana
  Clone ID: UC-ZMFLTEOSINTE107A07_FLI
gcgatctagaacgcaggatcttgctgttgttccacctaacagcacagtgatatatgaagttgagcttatttcatttgtgaaggacaaggagtcgtgggacttgaacaatgaagagaagattgaggctgctggtaagaagaaagaggaagggaatgcattgttcaaatcgggcaaatatgctagagcttccaagcgatatgagaaggctgccaagtacattgagtacgacacttcgttcagtgaagatgagaagaagcaatccaagcaactgaagatcagctgcaacctaaacaatgctgcctgcaaactgaagttgaaggattacaaggaagctgcgaagctttgcaccaaggttctggaactagacagccaaaatgtcaaggctctctacaggagggtgcaagcttacattcaacttgctgacctagagctagcagaggccgatatcaaaaaggcactggaaatcgatcctgacaacagggatgtcaagttggaatataagatcctgaaggagaagatcaaggagtacaacaagaaggacgccaaattctacagcaacatgttcgccaagatgacaaagtaactgtcactgccctaagtcagcgtagcttttgtggtggaggatgttgtggtgaagcaaagggattaaaaacaccgatttctgctgccgaaggactttgcccgttgcttaatttctcgcttttcgcatacttagtagtcaattagtgtgcacggatgcttggatatgtgaaactgaggaacatgtacttcgaggattattattggttctgaatttttatgttctctggttcttgttaggaccattgaatgttctctatatataattttcggac

SEQ ID NO: 35162 - DNA, 764 bp, Zea mays subsp. mexicana
  Clone ID: UC-ZMFLTEOSINTE107D01_FLI
cctgggggttattctgcaagagctgtgcaccctatagcacttgctaaagtcatgcagatagcaaggatgatgaaagaagagtttgctgatggacagtctctctctgccattggtggtgtggagactggcaatgatgctgctgagtttattcttcttggtgctgatacagtacaggtatgtaccggtgtgatgattcatggttatccccttgtgaagaagctttgcgcagagttacaggatttcatgagacagcacaacttttcatcaattgaagagtttcgaggggcctcgcttccgtatttcacgacgcacacagatctggttcaccggcaacaggaggcggtcaggcagaggaaggccatcaagaagggccttcaatcagacaaggaatggacgggtgatgggttcgtcaaggagaccgaaagcatggtatccaactgatgcatctctgccaccccccaccgggccattccctccaccatgctccaacttcatctttttaataaacgcgcaccagaaatgccacacaccaagcatctagtcctcatctgtacatggttctgaaccttgggccttcagtctatagaacaggccatgaatccacacaaagtcgtgacaaccgggtgacattgagcgatatatttgtcacgtgaacattaatttgtagcactgagctgagggcttgaccttgtaaaatcttggagacttcaatctcgtacaggttttctcaggagtttataattatacgtgagtgatgtgtgagg

SEQ ID NO: 35163 - DNA, 101 bp, Zea mays subsp. mexicana
  Clone ID: UC-ZMFLTEOSINTE109B07_FLI
ttttatttagctgcagccatcgctttccgcatatccgcttgttattcctgagttccattacgcaatgtataacataggtgaggaagcttgggaactgtatc

SEQ ID NO: 35164 - DNA, 1347 bp, Zea mays subsp. mexicana
  Clone ID: UC-ZMFLTEOSINTE109E08_FLI
ctcgtggtcgctttgcccatctgatgatctcccgctagcttccttcttgctactcccgcagtccccagtccccacccgctgcgccctcgccatggatccgagctccgaaatcatactggacactccatacttccgcatctacagcgaccgccgcatcgaccgcttgatgggcaccgaaacggtgccggccggctttgatcccagcaccggcgtcacctccaaagacgtcgtcatagacagcgacgccggcctctacgtccgcctctacctcccgctcccggacacggtggctgccgccgcgtcaccgccgcccaacgttaacgacagcaagaccaagctcccggtgctggtctacttccacggcggcggcttcgtcacgcagtcggcggcgtctccgatctaccagcgcctcctcaacgcgctggccgcgagggccggcctgctcatcgtgtccgtgaactaccgcctcgcgccggagcacccgctgccggcaggctacgaggactccttccgcgcgctggagtgggtcgcggcctccggcggggacccctggctgtcgcgccatggcgacctgcgccgcgtcttcctggccggcgacagcgccggcggcaacatcgtccacaacgtcgccatgatggccgccgcgtcggggccgcgggtcgagggcgccgtcctcctgcacgccgggttcgggggcaaggagcccgtccacggcgaggcgccggcgtctgtggcgctgatggagaggctctggggcgtcgtgtgccccggggcgacggacggcgtggacgacccgcgggtgaatcccttggccgccgcggcgccgcccaggcccagcctgcgggacatgccgtgcgagagggtgctcgtgtgcggggcggagctggactccctgcttccgagggacagggcgtactacgaggccctcgcggcaagcgggtggggcggcacggtggagtggttcgagtcccagggccaggaccacgtcttcttcctcttcaaacccgactgcgatatttgtcacttcaaggttttgaagcagctcacgttatagcttgtggagcagaagggtgcaaacgatgagaacatggaggtggcggttgagaggagcttgtgaaacctgtcaagtggcaaggaccgatggatgggctggaggcgctagctgacagcttgtgtgtgctatatagtcatccgttagctccttatatatatatgtacaacactagcaactcaacttaaattcgctggaagattgtatttatatgtgcaaccattaaaacggtgaatgctaatgtccaattctgttgtattctattttttataaacttgcaagctattatttgtatc

SEQ ID NO: 35165 - DNA, 458 bp, Zea mays subsp. mexicana
  Clone ID: UC-ZMFLTEOSINTE109H03_FLI
gtgcaactgtggctccagctgctcctgcggcagctcatgcaactgcatgtcccctaacgtggagaccgccgccgccagcagcatcaagaccatggttatcgccgcaccgaccaccaaggccagcgccggcggcttcgaggcggccaccgagggcggcggctgcgactgcaacacctgcaagtgcggcaccagctgcggctgctcctgctgcagctgcaactgagccggcccggcgatggcgcacgagtcgagaggacgacgacgagtcgtataaatatagtagcggcgtctaaataagatcctgtcaactgcacacgccattatcgatccatggtcgctcctggggttcatgttcatctgtaacgtgctcgcggtcttgtccgtctcgtgccggatttaatatttatatacatgtattcgtgtctgtctgatgcatggatccatgcgtcagcgttgtc

SEQ ID NO: 35166 - DNA, 2286 bp, Zea mays subsp. mexicana
  Clone ID: UC-ZMFLTEOSINTE110B03_FLI
gcacagagcttccttctctctctccccccccaccccccaccccgaagatgacgaccatggagaacgtgatcgtgctcgtgaaccgcatccagcgtgcctgcaccgtcctcggcgaccacggcagcggggacgccgccgcctccctccctaccctctgggaagcgctcccgacggtcgccgtcgtcggcggtcagagttcggggaaatcatcggtgctcgagagcatcgtggggcgagacttcctgcctcgaggatcagggatcgtgacgcgtaggccactcgtcctgcagctgcacaagacagaggccggggtgcaggagtatgccgagttccttcacatgcctaagcgccgcttcactgatttctctcttgtgcggaaggaaatccaggatgaaactgacaggttgactggaaagacaaagcaaatatctccagttccaattcatctcagcatatactctccacatgtggtcaacttaacattgattgatctgccgggcctaaccaaagttgcagttgaggggcagcctgaaagcattgttcaagatatcgaaagcatggtgcgttcatatgttgataagccgaattgtattatattggctatatctcctgccaatcaagatatagcgacatcagatgcaatgaagcttgcccgggaagtggatccaactggtgagaggacatttggcgtgttgacaaagcttgatttaatggacaagggaacaaatgcacttgacgttcttgaaggaagagcttacagactgcagcatccctgggttggaattgtgaaccgttcacaagcagatatcaacaagaatgttgacatgattattgctaggcgaaaagagcaggagttcttcgattctagtcatgaatattctcatcttgccagcaggatgggttcagaatatcttgctaaacttctttcacagcatctagaggccgcgatcagatcacgcattccgagcataacctctctgataaacaaaactattgatgagcttgaatctgagatggatcacctcggtagacctattgcttctgatgctggggctcagttgtacctcatcttggagctttgccgtgcatttgacaaaatatttaaagaacaccttgatggcggccgacctggtggtgatagaatttatggggtctttgataaccaactcccttctgctctgcggaagcttccatttgatcgtcatctctctgtgcaaaatgtgaagcgggttgtttcacaggcagatggttatcagcctcatttaattgctcctgagcaagggtaccgtcggctgattgaatcttctctcaattattttagaggaccagcggaagcctctgtagatgctgtgcattctgttttgaaagagctggtgaggatatccattggggagacacaggagttaaaacgatttccatctctacaaacggagctagctgctgcatgctataaggcccttgagagattccgtgaagatggtaggaaaactactctacggctggttgatatggagtctgcatatttgactgtggagttcttccgcaagctcccacaggaagttgataagactggaactggaaatcccagaactgccaatcctcctgctccttcggacgatcgttacactgatgcacatttcaggaggattgcttctaacgtgtcctcatacattggcatgatatctgaaacgctgaagaatactatccccaagtctgttgtccactgtcaggtccgcgaagctaagcggtccctgcttaacgatttctatactcaagtgggcgggaaagatgctaagcaactggcagtactccttgacgaggatcctgccctcatggaacgcaggctgcaatgctttaagaggcttgagctgtacaagtctgctcgggacgagattgatgccgtgtcgtggacaagatgaaggtaacgcatgctatgcttgttaatatattcgctttcttcattagacacattgtaattctactagcgcagaattagcagctagccattgtgcacactgattgtcaagtatagcagaccgatcacctgtctcgtaccttagcctgttaatatcagttgttgtgtgcttgactgcttgtgttgtatctttgtctcaactcccaactgttatcaggtgcaaatttctgtccttagtaacccatgtgcaaacttgtatgcacgagcgatacctggattctgtaggatgcacatgccgatcttcttcccatgctgtagttaggtgtagactgcagaactgggacttctaatgtgaaaatattgttttatgc

SEQ ID NO: 35167 - DNA, 1136 bp, Zea mays subsp. mexicana
  Clone ID: UC-ZMFLTEOSINTE110G12_FLI
ctgacgatcaccatcgccgctagcctccaccaccaacttcccatcgccgccccggctccccctcatctccccacactcctgacctcacctctccgaactgcagcacctcccctcccgccacccacacgcgctcccatggccgccaccgcgatcgcagtccgcctccaccccaccgccgcgcgccatgtggcctccgcccgccgcgcccgcctcggggccgtccgcgcgcagtccgcgccggcggcggcggcggcggcgctgacgcaggacgacctcaagcggctggcggcggtgcgcgccgtcgagcaggtgaagagcgggatggtgctcgggctcgggacgggctccacggccgccttcgccgtcgccgagatcggcgcgctcctggccgcgggcaagctcgagaagatcgtcggcgtgcccacatccaagcgcaccttcgagcaggcgcagtcgctcggcatcccgctctccacgctcgacgacaacccgctcatcgacctcgccatcgacggtgccgacgaggttgaccctgacctcaaccttgtgaaaggacggggtggtgctcttcttcgtgagaagatggttgaggcagcatctgacaagtttattgttattgttgacgagacaaaactagttgatgggttaggaggtagtggtctagccatgccagtggaagttgtgcagttctgctggaagtacaaccttgtaagattgcaggaactgtttaaggaggaaggagtcgaggcaaagctaaggtttgaaggcgacaagccctatgttactgacaactcaaactacatcgtcgatttatacttcaagacgccaatcaaggatgcgttggcagcaggacaggaaattgcagctctggaaggagttgttgaccatgggttgttcttgaacatggcgagttcagtgatcattgctggaacggacggtgtcagtgtcaaaacgaagtgagtttttgagttgctttgttgtttgtgttgaattttacaatttaatgtacaagctattggtgtaaaagcagctgataagatgcttcaataaaggtgttcccccaatgtggggattgactatcacttattgtgggataaaaaagccattttactaggttgaaacttctgttgattcat

SEQ ID NO: 35168 - DNA, 798 bp, Zea mays subsp. mexicana
  Clone ID: UC-ZMFLTEOSINTE111C06_FLI
gagaacataagcggagagaccgcgctacacacctcacgcctgaaggccagatcacgaccaaacaaaacagagcacgaccatcggtctctaagcaaaacgcgcagcacgccgggcgctccacggccacgcacgtagcagagcgcgcatggggcttctggaccagctgtgggacgacacggtggccgggccgcgcccggactccggcctcggcaagctccgcaagcacgcgtccttctccccctcgtcggccgcgccgtcgccgaccgcggagggctccgcgccgcccgccgtgacgcggagcatcaccatgctgcggcccgcggcgctgtccgtcgtcacgtcgccgcgcagcgagtccagctccgcgccgtcgtcgccgtcgcccgcaagcggcgctcccgactcgcccttcggcgcagcgacgacgcccaggggagagggctggaagaagctgcgccggaaaggcaggatggccgacggcgccgacgcccccggcacgccgaggagccccaccgtgtacgactgggtggtgatcagttcgctggaccgctgaagcagccggccgggccaagacgaggacacagcacaaggatggaggaagccagccaccatcagcagcagctagcggactgaaggaggatcggaacagagagcccccccccggccatgcgacctgcttaacagagcttctggtcacggttctgttatactacgcgttaacggtgtatgtatatatgtcatcttcctgtaaatctccgtggtgtgaggtgctgctgattttgaagagagtgatgctcc

SEQ ID NO: 35169 - DNA, 1394 bp, Zea mays subsp. mexicana
  Clone ID: UC-ZMFLTEOSINTE111D05_FLI
ggtcgcggtcgccgaagaaccctcgctcgagaccgaagaagacaaaatcgcatctcctcgcctcctcccctcctcccgagatccgggcaaagcgcgccgcgcgagaaccaggatatcgatttcagtatatggacaaggtgtctaaaggtactaagtgagatggacaagaagaaagcggccgatggcactgaaccaggaccagctccttctcgtgccgtcgacagatttggttttataaagccagaacaaggcaattcacctgatggaattccaaaaggcaagtctatacatgagcgtgaaagggaggaaaggaggataagaaaatggaggaagatgataggtgttggtggtaatgactggaagcattatgttagaaggaaccctcatgtggttaaaaggcgaataaggaaaggaattcctgattgtctcagaggacttgtttggcagttgatttcaggcagtcgggacctcttactaatgaacccaggggtttacgagacactggtgatatatgagacatcggcctctgaattggaaattattcgtgacatatcacgcacatttccatctcatatattcttccaacaaaggcatggtccaggccaaagatcattgtataacattttgaaagcatattctgtctatgacagggatgttggatatgtgcagggaatgggatttttagctgggttgctgcttctttatatgagtgaggaggatgcattctggttattagtcgcattgctaaagggagctgtccatgcaccaatggaaggcttgtatcaggctggtttgccgcttgtgcagcaatatttgtctcagtttgagaaattagttattgagctcatgccaaaattgggacaacactttgttgaagaaatgataaacccaagcatgtatgcaagtcaatggtttatcacagttttctcatattccttcccatttcatctaactcttagagtttgggatgtgtttctttatgagggtattaaggttgtattccaagttggattggctctattgagactctgtcacgatgatttagtcaaattaccttttgagaaactgctctatgccttgagaaatttccctgaggaagcgacagatccagatgtattattgccgcttgccttttcatttaaggtatcgagtcgtctcgaggagcttcagaaggagtatcagaagcgacaggagggcaccagtgaaacttcaagcggcgagcggctacagcccctcgtatcgaagacgatgagcagggtcggtagccgtgttgtgtcgaacttaacgaccgctgacagaaaatgacagacacgttctcttgtttgtttgtaactcgcatgtacactgtacagaaagaacggccttataatccatccatctaacagtatttgttt

SEQ ID NO: 35170 - DNA, 1025 bp, Zea mays subsp. mexicana
  Clone ID: UC-ZMFLTEOSINTE112A11_FLI
cgaacgtcgtacgagaacctttctccctcctccacctttctccttttcttgccacggcaaaacaccttcgccggcgagagcatggcgatggcgtaccgtgtcctggaggtcaccctggtgtcggcaaatgacctcaagaaagtgtcgctcttctcccggactcgcatctacgccgtggcttccatctccggattcgacctccgcatcccttcccacagcacccaagcagaccacagcaacggctgcaacccctgctggaacgccgtggtacacttccccatcccggctgccgctgacacccgcggcctcgcactccacgtgaggctccgcgcccagcgtgtatacctgggcgatcgcgacatcggcgaggtgtttgtgcccatcgacgacctcctggccggcgccgacaagggtggcgatccgaggcccgtgagctaccaggtgcgcaggccgcactctggccgcgcccacggcgtcctctacttctgctataagttcaccgaggtccccgccgtctcttgtgtctcggaaccggaaagcaaacaagtccagtacgccaagaagtatgtgcaggactccaagaacacgacggacaagactatggtgccgcccaccgtgtacccaccgccgcaggccatggcgtccgcatacccgccgccgcaatattgttcgccgtacgcggcgtacccgcggcagccttacgggtaccctgctccgccaccgtacgggtacaatgctgcttccccacaaccggcgatgtacaactacgcagcacagccggtagctgcaccggcgaggcatggcggaggtatggggatggggctcggcctagggctcctaggcggtgcggtcggggggatgatgctcggagaggcgatcggtgactatgagaccgacgccgcctatgatgccgggttcaacgatgcattggcattttagatctttgttgtcgtgcagtcatggagattattgtccttgtaaatctctaattaatacgaaacgatgaaatagaatttgcattttgt

SEQ ID NO: 35171 - DNA, 720 bp, Zea mays subsp. mexicana
  Clone ID: UC-ZMFLTEOSINTE114F06_FLI
gagagagatccggagcagccgcagtcccaccgaccccgccgccggtcgccctccatctcctcgccgctgcctctcgatctttgtacagtttctcttttcaataatcaagatgagccgtggtggtagtgccggtggtggtcaaagttctctgggttatctctttggaagcggtgagccccccaaaccagcagtggcaccagctgcaagtgctccacctgttgagaaaccatctgctgcaaagactgatgcggccaagcaggttgctgctggggttaccagccaaaccaataactaccacagggctgatggtcagaacactggcaacttccttacggaccgtccttcaaccaaggtccacgctgctcctggcggtggctcttccctgggctacctgttcggtggcaactgatgcccgtgctggtgctcaccaaagttatcctcccctgcctgctgcgtgctatgtctgaatcgtgaacaaccgttgttgtcatttcatgtgtgtaccccgtgcaaatgctttgtgcgcatggttgatttctctgtggcaaacttcctgtcctgcatggggttgtaagctgtctctaaatttcacggcaagtcgtgtgcctgaaccttcatcttaagttgttgtcgtatcccttcgtcttgtttcggttgcaccccgtgattgtatggattggttgctgaccacttgatctatctattctgcattttcctttg

SEQ ID NO: 35172 - DNA, 1497 bp, Zea mays subsp. mexicana
  Clone ID: UC-ZMFLTEOSINTE114G01_FLI
caccatttggctcccgcaagcaccgatttgtttactgctctctccgacgcgcggcggcggagctccctacgacgactgaaccatgtgcggcggcgcgatccttgccaaccttcgcgagccggcgccgcgccggctcacagagcgggacatctggcagcagaaaaagaagctcaagaggggcggcggcggcgggaggcgctcgttcgcggcggaggacgatgaggacttcgaggccgactttgaggtcttcgaggccgactccagtgattcagatttggagctcagggaggggactgacgacgacgtcgtcgagatcaagcccttcactgccaagaggactttctccagcgatggcttaagcaccatgactagtgatgtagcaaggtcagccaagaggaagagaaagaatctatacaggggtatccgccagcggccttggggcaagtgggctgctgagatcagagatcctcagaagggtgttcgtgtttggcttggtactttcaatagtcctgaggaagctgcaagagcttatgatgctgaagcgcgcaggattcgtggcaagaaggccaaggttaactttcctgatgcaccagcagttggtcagaagcgccgttcttctggctcagcttctgctaaagcatccaagtcaagttttggacagaagcctattgtcaaagtagctatgaacaaccttgccaacacaaatgcatccttcttccaatctgttagctacccctccaattcatttgttcagcatggcaatataccatttgttccagcaatgaactctactggttctgttgaggatcctatcatgaatctgcactctgaccagggaagtaactcctttggctgctcagacttgggctgggagaatgataccaagacaccagacatcacttccattgctcccatttccactatcgcggaaggagacgagtctgcatttgttgacagcaattcaaacaactcatttgtgcttcctgccctggagaacagtgctgttgatctcactgatgggctgacagatttagaatcctatatgaggtttgttctggatggtggtccaagtgattcagttgatagccttctgaaccttgatggatcgcaggatgttggtagcgacatggacctctggagcttcgacgacatgcccatcgtcggcgatttcttttgaggattttgaagcttggtcataggagtatgtacatagggactaggggaataaagaccgggggagattgggaagcacctgcttggcaccttgggggtagcatttgctcgtgtctagctcagagatgcagaagttgcattctgaaactacttggttatcgacctgttccctattttagctatctctttatgagagccatttatgagactgaaccattttgttttcctttcttttcgttgttacaatatatggtttaacattatgatttatggatatgtgccaaatatggtgctcaacagtggtcaaacatgccttttagatgc

SEQ ID NO: 35173 - DNA, 2725 bp, Zea mays subsp. mexicana
  Clone ID: UC-ZMFLTEOSINTE115F12_FLI
aggtggccggcaggactctcgctgactgccgtggtctgagaacgctcaacctctcaggcaaccacctggtcggcccgttcccgccggacgtcgccgccctcacctcgctcgccgcactcaacctctcaaacaacaacttctccagcgacctccccgccgacgctttcaccgagctacagcagctcaaggtggtcgctctctccttcaaccacttcaacggcagtattccggactccttggcagcgctgccggagctcgacgtgctggacctcagctccaacaccttctccggcaccatcccttcgtccatctgccaaggccccaactccagcctccgcatgctgtacctccagaacaactacctctccggcgccatccctgagtcaatctccaactgcaccaggctcgaatctctcgatctcagcctcaacaacatcaacggcaccctcccggcatccctcgggaagctcggggagctccgggacctcattctttggcagaacttcttggagggcgagattccggcgtccctggaaaatttggacaagctcgagcatctcatcctcgactacaacgggctcaccggcagcatcccgccggaactctccaagtgcaaggagctgaactggatatccttggcaagcaaccagctgtctggtccgatcccggcttggcttgggcagctcagtaatttggccatcttgaagctgagcaacaattccttctccggaccaataccggctgagctcggcaactgccagagtttggtctggctggacctgaacagcaaccagcttaacgggtcaataccggcggaactggcaaagcagtctgggaagatgaacatcggtcttgtcattgggcggccgtatgtgtatcttcgcaatgacgagctgagcagcgagtgccatggcaaggggagcttgctagagttcaccagtatccgacctgaagagctcagtcggatgccgagcaaggagctgtgcaacttcactcgggtgtacatggggagcaccgagtataccttcaataagaatggctccatgatatttctggatttgtcatttaatcagcttgactcagagatcccaaaggagcttgggaacatgtactacctcatgatcctgaatcttgggcacaacttgctgtctggcgtcatcccaccagaactagctggtgccaagaagcttgctgtactcgacctgtcacacaaccagttggaagggcctattcccaactctttctcgacgttgtccttgtcggagatcaacccttcaaataatcagttgaatggttcaattccagagctcggttcgctgttcacattcccgaagatttcatatgagaacaactctggtctttgtggcttcccactgttgccatgcgggcacaatgctggctcaagttcttctgatggccaccgatcccaccggaaccaggcttcactcgcgggtagtgttgctatgggactcttgttctcgctgttctgtgtagttggaattgtcatcatagccgtcgagtgcaagaagcggaagcagatcaatgaagaggcaagtacctctcgtgacatatacattgatagccggtcacattctgggactatgaattccaattggagactctctggtggttttggtgatgtctataaggcccagctcaaggatggaaaggttgttgcaatcaagaagcttatacatgtgagtggccagggtgaccgggagtttactgcagaaatggagaccattggtaggatcaaacaccgcaatcttgttccgctcctcggctactgcaagtgtggtgaggagcggctgctggtttatgattacatgaggtttggcagcttggaagatgtgttgcatgaccggaaaaagaccgggattaagctaaattgggcagcaaggaaaaagatcgccattggggctgcaaggggattggcatacctccaccacaactgtattccacacatcatccaccgagacatgaagtcaagcaatgtgcttatcgatgagcaattagaggcaagggtatctgattttggaatggcaaggatgatgagcgtggtggacacccacctgagtgtgtccactctcgccggcactccaggttacgtgccaccagagtattaccagagcttcagatgcactacgaagggcgatgtgtatagctacggtgttgtagctcgagctactggagcacctaaaaatcgcctgtgcatgcttggacgacagaccgtcgaagcgtccgacaatgctgaaggtcatggcaatgttcaaggagatgcaggccagttcgacggtggactcaaagacttcggcgtgcacagacgatgcatgttttgccgatgtggagatgacgaccctgaaagaagacaaggaggagaaggactaacaaggccaccgacacgcgaggaactgctcctggtgcacctgcccagggggtgagtggcagcagctacacggcgagtcagaggcaaaatgcccgtaggaggaatcagttggtcaggataccatttgaagtctcttgttgagcttagcattcccttcttgatggtagaagacagaagttttccctcatagcttcgccagttgaatatgctgtgtacctatgggagtaggttgattttcttttcttctttctttttaagctttcttcatctcttcttgtcacacgtcagtaagatctgtgtatgtacatatataaatggtgattttttttcttcggtgcc

SEQ ID NO: 35174 - DNA, 687 bp, Zea mays subsp. mexicana
  Clone ID: UC-ZMFLTEOSINTE115H11_FLI
cttggatttgtcagaacactagtggagtgcaaggaatctagaattggaaagcagcccattgaagtcccaccgaatgttactctcacattagaagagcagtttgtcaaagctaagggcccactaggggaattatctctcagcttcccaggtgatgtgaagattgtgaaagaagaatccggtaacctgagagtttataagactgcagagaccaagagggcgaaccagatgcacggtcttttcagaacattgacagacaacatcatcgttggtgtgtcgaaaggattcgataagaagcttcagctagtgggcgtcgggtatcgtgcggcggtggagggcaacgatctcgtgatgaacctgggattctcccaccctgttcggatggccattcctgaaggcctggcggtcaaggtggaggagaacacaaggatcaccgtgagcggctatgacaagagcgcgatcggtcagtttgctgctaccataaagaagtggaggccacctgagccatacaagggaaagggtatcagatatatggatgaagttgtccgaaggaaggaaggaaaagccgggaagaagaaatagaaagtgtttttttgccctctccttacttcatttcatttttcccactgtaatgatcttcgtttgctaaggctgaacctaagaaatatattgttctgtgctgatcatggc

SEQ ID NO: 35175 - DNA, 555 bp, Zea mays subsp. mexicana
  Clone ID: UC-ZMFLTEOSINTE120A05_FLI
cctgaaactgtttctttctacatccatgttgggcacatacccaatgagcacaatctggcgaaagatgagcacttggaccctatcaatgttaaaatcgcggagctgaaggaagcattagaatccgtcaccgccgagcagaagtacctaaaagcacgcgaagctcgtcaccgacacactaatgagagcaccagaaagcgtgtcatgttctatacgatggcggagtacctagctttcatggctgctagcgcgttgcaggtcctctacatccgccgcttgttcagtaaaaatgtgggatacaacagagtgtaggatagaaatctacttcaaaggcgacagtggaagcaccgcatatgatggtcggaacgggaaacattctctgccaatttgacaaatcgtagttctgcaccctctttttttgttagtttgtaagaaacacttaaatttatcagcatgtactttcagcaacacttgtggtatgttaagtgcatttggtgctgaacattgttccataactaatcttcagaggattgttatggaagttagtattgttctgct

SEQ ID NO: 35176 - DNA, 1068 bp, Zea mays subsp. mexicana
  Clone ID: UC-ZMFLTEOSINTE120C09_FLI
ccactactttactcaaagtctagagctagcttttgctttgctcaccagacaaacagcagcagatggcgtcgacgatcatggccgccacctcccgcatcgtcgcggccaagacgccgtttcttggccagggtcgcgccgccgccaatgccagccccctccgcgacgtcgccgccgccgctgctggcggccggatcaccatgggcaacgacctgtggtacggcccggaccgcgtcaagtacctgggccccttctccgcccagacgccctcgtacctgaccggcgagttccccggcgactacggctgggacaccgccgggctgtccgcggacccggaggcgttcgcgcggaacagggcgctggaagtgatccacgggcggtgggcgatgctgggtgcgctgggctgcatcaccccggaggtgctggagaagtgggtgcgcgtggacttcaaggagcccgtgtggttcaaggccggcgcgcagatcttctcggagggcgggctggactacctgggcaaccccaacctggtgcacgcgcagagcatcctcgccgtgctcggcttccaggtcatcctcatgggcctcgtcgagggcttccgcatcaacggcctcgacggcgtcggcgagggcaacaacctctaccccggcggccagtacttcgacccgctgggcctcgccgacgaccccgtcaccttcgccgagctcaaggtcaaggagatcaagaacggccgcctcgccatgttctccatgttcggcttcttcgtccaggccatcgtcacaggcaaggggcccctcgagaacctgctcgaccacctcgacgaccccgtcgccaacaacgcctgggtctacgccaccaagttcgcaccagggtcttaagctagctaccgggccgcggcgtgccaggacattgtgttgtacactactcgtttctgtcgtgatctgtaccatgaacgattgcaaatattcttgtgctctcccagaaggaacgaactggactagttttgctcttccattccatgtatgctctgtttcagcatatatgtagttgtgtctactgttttttgcagttgtt

SEQ ID NO: 35177 - DNA, 1844 bp, Zea mays subsp. mexicana
  Clone ID: UC-ZMFLTEOSINTE126E04_FLI
cacacacacaaccagatctcccccaaatccacccgtcggcacctccgcttcaagatgcagatctttgtgaaaaccctgactggcaagactatcaccctcgaggtggagtcgtctgacaccattgacaacgttaaggccaagatccaggacaaggagggcatccccccagaccagcagcggctcatcttcgctggcaaacagcttgaggacgggcgcacgcttgctgactacaacatccagaaggagagcaccctccaccttgtgctccgcctcaggggaggcatgcagatctttgtgaagaccctgaccggcaagactatcaccctcgaggtggagtcttcagacaccattgacaacgtcaaggccaagatccaggacaaggagggcatccctccagaccagcagcggctcatctttgctgggaagcagcttgaggacgggcgcacgcttgccgactacaacatccagaaggagagcaccctccacttggtgctgcgcctcaggggaggcatgcagatcttcgtgaagaccctgaccggcaagactatcacccttgaggtggagtcttcagacaccatcgacaacgtcaaggccaagatccaggacaaggagggcattcccccagaccagcagcggctcatctttgctgggaagcagcttgaggacgggcgcacgcttgccgactacaacatccagaaggagagcaccctccacttggtgctgcgcctcaggggaggcatgcagatcttcgtgaagaccctgaccggcaagactatcaccctcgaggtggagtcttcagacaccatcgacaacgtcaaggccaagatccaggacaaggagggaatcccaccggaccagcagcgtttgatcttcgctggcaagcagctggaggatggccgcacccttgcggattacaacatccagaaggagagcaccctccacttggtgctccgtctcaggggtggcatgcagatctttgtgaagacactcactggcaagacaatcacccttgaggtggagtcttcggataccattgacaatgtcaaggccaagatccaggacaaggagggcatcccaccggaccagcagcgcctcatcttcgccggcaagcagctggaggatggccgcaccctggcggattacaacatccagaaggagagcactctccacctggtgctccgcctaaggggtggcatgcagatttttgtgaagacattgactggcaagaccatcaccttggaggtggagagctctgacaccattgacaatgtgaaggccaagatccaggacaaggaaggcattcccccagaccagcagcgtctgatctttgcgggcaagcagctggaggatggccgcaccctcgcggactacaacatccagaaggagagcacccttcaccttgttctccgcctcaggggtggtatgcagatctttgtgaagaccctgactggaaaaaccataaccctggaggttgagagctcggacaccatcgacaatgtgaaggcgaagatccaggacaaggagggcatccccccggaccagcagcgtctgatcttcgccggcaaacagctggaggatggccgcaccctagcagactacaacatccaaaaggagagcaccctccaccttgtgctccgtctccgtggtggtcagtaagtcatgagtcgtttaagctgccgatgtgcctgcgtcgtctggtgccctctccatgtggaggttgtcgaagtatctgccgttcgtgtcatgagtcgtgtcagtgttggtttaataatggaccggttgtgttgtgtgtgcgtactacccagaactatgacaaatcatgaataagtttgatgtttgaaatt

SEQ ID NO: 35178 - DNA, 1290 bp, Zea mays subsp. mexicana
  Clone ID: UC-ZMFLTEOSINTE128F07_FLI
tgaccatgtactagttctgattataaagttatctagctatatgtaaccatgttaaattgtaatttgcaataagccttttggtctctaactgatactatacttatctctggattagttaaatattacgtctcccagtagagcagtagcaaactaccctaagcacctatgcagaagtaactcagctctagtttgttgttcctcgagaacagaaataacaatggctcgacgctagtcataaatctgatggcttttctttttgtgcagaaggatggtttattaatgcagacaaccaagcgatgagattcggcgacctcccttcgtgggcagtcgaactttctgcacttatccgcgaagctatctgcgtcggcgacgccggtgtcggtcttggtgcggaggcgacgaacgaggacgaggatgcgtgccctctgccatcagacttgctgtggcgggagccattttttgatcagatgatcgcgaacagatacagaccagggcatctgtgctcacgtcgatctgatgcgctttgacgatgggatcgcgatcgtctcgctcgagtcagcctgtgtgatgcgcttcagtcgagcagaaccagcctctgacacaccgaagcaagggggcagtgccagtgaatctactgcagaggtccccgttctgctgaacccgggctcccttgcgctcatgtctggcgatgccaggtatctgtggatgcatgagattaaccggaaaccaggcaggcagctgtgggatggcagggagctcgagcagcgcaggaggacctctgttacgttgagaaaagtcctgccttctacggactagatcactggtcatgacagtgaacaaactgttctgcagttacaggacagtaacctttttgtggtggaaaactgtaatatgctgtttgctaaagacagccatcattggataatcaaaaggcgcagcctaagaggagtattgttgagtgcctcgagctctatattattggcaggaagctgtagcatttaccatgcatcagatccggggaaaggagagaagatcaggggacggcggcctttgtgagtgcaggcggtgaccggcgaccaacacaaaagcactgcgtccgaagagcgccatcgggaaacgcctccaagctcgccgcacagagtatcgtaggtactagtcgtagaactgacgaaatcgtgttttgtacttatctgctattgctgtctggtgacttgaagtgaaaatacttgcagttgtgtccagtggatcatgtttgatgatttattaattatggtattgttttaggatttt

SEQ ID NO: 35179 - DNA, 743 bp, Zea mays subsp. mexicana
  Clone ID: UC-ZMFLTEOSINTE21A12_FLI
agccgctgcttttcgttcgtcttcatcctacgcgagggcgaaacccacaaaccctctccctcctgtactccggccgacacatccaggggcgatgacgctgggtagctccggcgccggatcgagcgtcgtcgttcctcgaaacttcaggctattagaggagctcgagcgtggagagaagggcattggtgatgggacagtgagctatggaatggatgatgctgatgacatctacatgcggtcatggactggtaccatcattggccctcacaatactgtacatgagggtcgcatctaccagctgaagttgttttgtgacaaagactatccggagaagccaccatctgtcagattccactcaagaatcaacatgacatgcgttaatcacgagacaggaatggttgatccaaggaagtttggtttgctagcgaactggcagcgggactacacgatggagaacatcctaacccagctcaagaaagagatggctgcctcgcagaatcgaaagttagtgcagcctccagaagggacattcttctaacgaagtgttcacttggcccgtcatgggatccaacagtaattgaaacttttatgggctaaaaaacagcgtctacatctggtgcccctgcctgtctttgtgattttttatgacttttatgttcttgtatcgtgaaccgcagtgaacaacggttgttgcaagttccagggatatctttggaagtggtaaacaaatgcgtcttatttct

SEQ ID NO: 35180 - DNA, 908 bp, Zea mays subsp. mexicana
  Clone ID: UC-ZMFLTEOSINTE28B05_FLI
caaggaagccagaggtcttgctgttggaccaagattagtacaaaggttatctggttttggggaccatcgatctgcagacaatgtggaaagagtggcagaggaagagcttgcacatgcctctgtaggtttgtattggtttctcaaagaatgccaagtgatgggtcgtgaaccaagcaatactttccaagacttgataaaggagtacgacgttgtactggagggtccattcaactacacagcgatggcctcccccgacctgctcttcaatctgcggaacctcttctacctgggcgcctaccgggcagccattaacaacatcgacgtcccgggccttgacgccgacgctgagcgcgacgccatcgtcttccgctcctacatcgccctcggctcttaccaggataagcagttgaagtctcatcctccaaagaacgttgaatcgaaaatcttgcgtgagcatatcaagaaagagagggaggcagcaaaggctggaaaacgaccatactatctgaagaaatctgaacttcgcgaaaggaagctgatgaacaagtacaacgagctcaaggaggcaggaaagcttgaagcgctttctgcatataaatcaacttcagttagttgagatgttctaatgaacgaacacgcaccaacttcatctccacagtgaaagctatttaatttccaaaaggaaaagctcacagatcgacatagattcttttgtgtacagtaacatcatgctaatcatttcacatgtctcaaagatagttcaagaaaaacatgtcttgaagataagttagcataaaaagttgtgtccttatataaatcaactgcatctggttgatagcttgtaaatagcagtatctgttgtgtaaactcaacaatttggcaacaaaatctggcacatatgtatcagc

SEQ ID NO: 35181 - DNA, 1638 bp, Zea mays subsp. mexicana
  Clone ID: UC-ZMFLTEOSINTE32E11_FLI
caaggacatcctgttggagccgtcgcgcatattacgcttccttcacctgaccaacagctaagccgggaggcacgcttgagagccacacactgagacctcacctcacgcgcggatggccgccgccgcgggcgggaccggcggctgcggctgtcacattgtagcggtgccgttcccgggccgcggccatgtcaatgccatgatgaacctgagccgcctcctcgcagcccggggcgcggcggtcaccttcgtcgtcaccgaggagtggctcgggctcatccgctcctcctcctccgccgccgccgccgccgctgccgagccggccggcatccgcatccgcaccatccccaacgtcatcccttccgagcacggccgcgccgccaaccactcaggcttcctcgacgccgtcgccacagagatggaggcgcccttcgagcgccttcttgacgggctcgaaggcccgccgcccgcggcgctcgtagccgacgcctacgttccctgggtggtcggcgtcggcaaccggaggggcgtccccgtctggtcgctcttccccatgtccgccgcctttttcttcgcctactaccacttcgaccgcctcccggcctggcttaccaactctgagcacacgccggagtccggtgagactattggaaactctgatcagagacttgggcactatatcgctgggcaggcttcaagttcaatacggttgtcagatctcgagcccttaattcacaacaagagaacagtgaagcatatcctaacaactatctctagcatcagaaatgctcagtctctccttttcaccaccatgtatgagcttgaggccagtgtcattgactcgctaaggtcagtactctcttgtccagtgtacccaataggaccctgcgttccatacatgatgcttgaagaccataccgtgtccagtggcaaagttgccaggcaaggagattatttcacatggttggattctcaacctgtgaactcagttttgtatgtctcccttggcagctttgtttcagtctcagcctctcaacttgaagagatcgcattgggtctaatagccagtgaggtcagattcttgtggattcttcgagaacaatcccctcgggtgcaagaactcttctctggcatcaataatgggatgatactgccatggtgtgagcagcttgaggtgttgtgccatcattcagttgggggcttcatgacccattgcgggatgaactcgacacttgaaggcgtcttcgctggtgtgcctatgcttgccttaccactgtttttcgatcaaccgattgatgggcgattaattgtggaagagtggaagattggccttgccgttagggattggtctagcaagggtggtctgatctggagagaggatattgcacgagctgtgaagaagctgatgtcttccgatgaaactgggacaaaggcgctgagggaacgtgctcttgagttgaaggaggcttctcgcagagcagtcaatgagggtggatcttcatactgcaatctgagttcattgatggagacggtatgcactccaaaataattggaatcgtatttgttatgtgctgaaaccgatcttgtcacactgttggtggtgtaacctgtaacaatgcttcaaatatcaattctatattc

SEQ ID NO: 35182 - DNA, 1189 bp, Zea mays subsp. mexicana
  Clone ID: UC-ZMFLTEOSINTE35C02_FLI
cgagagcccgagaccaatcgccgccatctcccggaatgacggggtgacgaaaccgcgccgcaccagacaagacagaggagccgccgccgcgacccacaggccaccgggtcgccgaggaggggatccagcgagccatgtcgaccgacgtgcccatgagccccgagctcgagcaggtggacggcgagatccaggacatcttccgcgcgctccagaatgggttccagaagatggacaagatcaaggactccagcaggcagtccaagcagctggaggatctcacggccaagatgagagagtgcaagcgcttgatcaaagagtttgaccgtatactcaaggatgaggagaaaaagaacacccctgatgtcaacaagcagctcaatgacaagaagcagttcatgatcaaagaactcaactcctatgtgaccttgaggaaaacgtaccagagcagccttggtaataagaggatcgaactattcgatacgggtaatgaccaggtggctgagggaactccagttcaaatggcatcagaaatgtcaaatcaagaactcattagcaccggaaggaaacaaatggaccaaactgatcaagctattgagcgctcaaaaatggttgtagcacaaactgttgaagttggagctcagactgctgcaactctgacacagcaaacggaacaaatgaagaggataggcaatgagctagattctgtccacttttcactgaagaaggctagtcaaatggtgaaagagattggccgtcaggttgctactgacaaatgcattatggcgtttctgtttctgattgtctgtggtgtcattgcaataattgttgttaagattgtcaacccgcataacaagaacatcagagacattccggggctagcacctcccgccatgaacaggaagctgctgtccatcgacgctgcaggactctgagtgttgtgaatggctgcttcccgcagcacagcgcagcgcagcgctcattgttctcttatgagccacgatacatggcttcgcgattcttttgtgcttgtagtttacgtccgcccattctttccctattgcattggtgagtagtggcctcaggtttgtagcgggactcttgttgtttatcgcttgcgagctcctagctttctggttgtttgtgtatatgcggtagtgatgtgaatgtgagagtcgagtggagattcttc

SEQ ID NO: 35183 - DNA, 1115 bp, Zea mays subsp. mexicana
  Clone ID: UC-ZMFLTEOSINTE37D08_FLI
cacaccgcgcagcaacgagaggggaacaagagccaacaaacaagcttgctactgtgatttctcgtccgagcagagagagagagagagagagagagagagagggagggagcatggccgaccacaaggaggagcctgtgccggagtctgtgatggacaagatcaccgagaagttccacggcggggactcgtcgtcgtcgtcgtctgactcggacgacgagaagaaggggtcctcgtcggagtcggcggcggaagccatgaaggccaagatctaccgccttttcggccgggagaggcccgtccactccgtcctcggcggcggcaagcctgccgatcttatcctatggaggaacaggaagatctctggcggggtacttgctggtgccacggccatctggctcctattcgaggtcatggagtaccatttcctcaccttggtgtgccactgtctcatcctctcgctggccatcctcttcctgtggtccaatgcctccactttcatcaacaagtccccaccaaacattcctgaggtcaaaatccctgaggatgtggctgttaatgttgccctgtcactgagatatgagatcaacaggggctttgctaccttgagggagattgggcatggccgtgatctgaagaaattcctaattgttattgcaggtctctggcttctttcagttctcgggagctgctgcaacttcctgacactgttctatattgtctttgtggcactgtacactgtaccagttctgtatgagaaatatgaggacaaggttgatgcttttggtgagaaggctatgattgaaatgaagaagtattatgccattttcgatgagaagtgcctatcgaagattccaaagggcccccttaaggataagaagcactagattggtagtaaggtacttgctatgaatcaacatctacattatgtcactagctgtcacctctttctctgaaggatggtgcttggtcctggtctctagttgatagtatataatctgtatgggcaactttggtgtgactgagagtctgctgaaaactgttgatcttgtttttggtttcagctttcaccatagttgcctggaagcttgaaatatattatgcgctctatcaatgtc

SEQ ID NO: 35184 - DNA, 1366 bp, Zea mays subsp. mexicana
  Clone ID: UC-ZMFLTEOSINTE39A10_FLI
catgcagatctttgtcaagaccttgactggcaagacaatcacccttgaggtggagtcctcagacaccattgacaatgtcaaggcaaagatccaggacaaggagggcatcccaccggaccagcaacgtctcatctttgccggcaagcagttggaggatgggaggacccttgctgactacaacatccagaaggagagcaccctccacttggtgctgcgtcttaggggtggtatgcagatctttgtcaagaccttgactggcaagacaatcacccttgaggtggagtcctcagacaccattgacaatgtcaaggcaaagatccaggacaaggagggcatcccaccggaccagcaacgtctcatctttgccggcaagcagttggaggatgggaggacccttgctgactacaacatccagaaggagagcaccctccacttggtgctgcgtcttaggggtggtatgcagatctttgtgaaaacccttactggcaagaccatcactcttgaggtggagtcttcagataccattgacaatgtcaaggccaagatccaggacaaggagggcatcccgccggaccagcagcgtcttatatttgccggcaagcagctggaggatggacgcacccttgcggattacaacattcagaaggagagcaccctccacctggtgctgcgcctcaggggaggaatgcagatcttcgtgaagacattgaccggcaagaccatcaccttggaggttgagagctccgacaccattgataatgtgaaggccaagatccaggacaaggagggtatccccccggaccagcagcggctgatcttcgccggcaagcagctggaggatggtcgcaccttggctgactacaacatccagaaggagagcacccttcatttggtgctccgcctgaggggcggtatgcagatctttgtgaagaccttgactggcaagaccataaccctggaggttgagagctctgacaccatcgacaacgtgaaggctaagatccaggacaaggaggggattcccccagaccagcagcgtctgatcttcgccggcaagcagctggaggatggtcgcacccttgcagactacaatatccagaaggagagcaccctccacctggtgctccgtcttcgcggtggttattgagccatcagtcgttgaagctgctgctgtatctgggttatctagtgtctctgccattgcccatggatggtgctgtctttcaaagtatttgtatggtttgtgtcgtgagtcgtgactgaactggtttcatggaccagttgtgttctcgttacccaaaactatcgtgcgaccgcatatggcttaatcatgaataaatgttgtttgaatttaaactattcgctg

SEQ ID NO: 35185 - DNA, 1614 bp, Zea mays subsp. mexicana
  Clone ID: UC-ZMFLTEOSINTE39D11_FLI
gcagaggcgcagagacaggcgtcttcgtactcgcctatctccgcgactcaaagcttcttccatttcctaccgccgccgctgcagctccaccccattccgtcgacaccatgagggagtgcatctcgatccacatcggccaagccggtatccaggtcggaaacgcgtgctgggagctctactgcctcgagcatggcattcaggctgatggtcagatgcccggtgacaagaccattgggggtggtgatgatgctttcaacaccttcttcagtgagactggtgctgggaagcacgtccctcgtgctgtttttgttgaccttgaaccaactgtcatcgatgaggtgaggactggcacctaccgccagctcttccaccctgagcagcttatcagtggcaaggaggatgcagccaacaacttcgcccgtggtcactacaccattggcaaggagattgttgacctgtgccttgatcgcatcaggaagcttgccgacaactgcactggtctccagggcttcctcgtcttcaacgctgttggtggaggaacaggctctggccttggttccctcctcctggagcgtctgtctgttgactacggcaagaagtccaagcttggtttcactgtgtacccatccccccaagtttcgacctcagtggttgagccatacaacagcgtcctgtccacccactccctcctcgagcacactgatgtggctatcctgctggacaacgaggccatctatgacatctgccgccgttcccttgacattgagcgccccacctacaccaacctcaacaggcttgtgtcccaggtcatctcatccctgactgcctccctgaggttcgatggtgctcttaacgtggatgtgaatgagttccagaccaacttggtgccctacccgaggatccacttcatgctttcctcctatgctccagtcatctctgctgagaaggcctaccacgagcagctgtctgtggccgagatcaccaacagcgccttcgagccatcctccatgatggccaagtgcgatccccgccatggtaagtacatggcctgctgcctcatgtaccgtggtgatgtggtccccaaggatgtgaatgctgctgtggccaccatcaagaccaagcgcaccatccagtttgtggactggtgcccaactggctttaagtgcggtattaactaccagcctccaagtgtggtgcctggtggtgacctggccaaggtgcagcgcgctgtgtgcatgatctccaactccaccagtgttgtggaggtgttctcccgcatcgaccacaagttcgacctcatgtacgccaagcgtgccttcgtgcactggtatgtcggtgagggtatggaggagggcgagttctctgaggcccgtgaggatctggcagcgctcgagaaggactacgaggaggttggtgctgagtttgatgagggcgaggaaggtgatgatggtgatgagtactagaagtatcctgatgcggtcatcgtcaggcttgtgtgctgctcttgtccccggtgtggtttgcaacacctgatgttgtaagactttctggttatgtccgccccgctttgccactgggttattaagaacgtcgttatggatggttgtctacatt

SEQ ID NO: 35186 - DNA, 998 bp, Zea mays subsp. mexicana
  Clone ID: UC-ZMFLTEOSINTE40A03_FLI
ggtttttgattttagccgccgccgctgctcatctcacatccctcgagaagacgcctgctcctcgccgatcgatacgatggccgtcttctccgacctccacaccgccgacggcctcaagtccctcgaggctcacctcgccggcaaaacctatgtgtctggtgactccattactaaggatgacattaaggtcttcgccgcggtgccgtcgaagcctggcgctgagtttcctaatgccgcccgctggtacgagaccgtctctgcggctgtagcctcaagattccctggtaaggctgttggtgtaaatctgcctgcgggatcagctcctgcggcagctgctcctgcggatgaggctgaggatgatgatgaccttgatctttttggtgatgaaactgaggaggacaagaaggcagctgatgagcgtgccgccgctgccaaggcctcttctaaaaagaaagaaagtggtaaatcctccgtccttatggatgtcaaaccatgggacgatgagactgatatgaagaagctggaggaggctgtccgcagtgtccagatggagggtctgacttggggagcatcaaagcttgtgcctgttggatacggcatcaagaagatgactatcatgttgacaattgtcgacgatcttgtgtccatcgacactctaattgaggaccaccttacgcaagagcccatcaatgagtacgtccagagttgcgacattgtggctttcaacaagatctagagttcagtttctgagtttgggcaacggcagcggctcagctcgtcaagtttgtgctgggatgccagtttatcccttctagtctattacagaaatgttgttcggagctgagtctattataaacatcttggtctgagtttattgttgagtggtgccagttttttttcaatatacatttatcttaaaaacagcggtactgatgtttttttgtctaaagttaatgagtttgcaatggttctgagtctaaagttcgagtcttcaaatc

SEQ ID NO: 35187 - DNA, 1013 bp, Zea mays subsp. mexicana
  Clone ID: UC-ZMFLTEOSINTE40A10_FLI
ccattttgtcgtcgtcgttccagctgcagtccagagttggaacccaagcgcacgcagcaccgtcgtcgaactcttcccttttcggcggcattggagatggcggcgaatctagaggacgtgccgtctctggatctgatgcacgaactgctccgtcggatgaagtgcagctccaagcccgacaagcatctcatcctcatcggcccacctggctctggaaagggtactcagtctccccttattaaggatgaatattgcctgtgccatttagccactggtgatatgctgagggctgctgtggcagccaagacaactctaggtatcaaagctaaagaagctatggataagggagagcttgtttcagataacttggttgtggggattattgatgaagctatgaagaaaccgtcatgccagaaaggtttcattcttgatggcttccctagaactgtcactcaagcacagaagcttgatgagatgttggcaaagcaaggtgctaatgttgacaaggtcctaaactttgcaattgatgatgctatattggaagaacggattactggccgttggatccacccacccagtggtaggacttaccatacaaaatttgcacctccaaagtctccaggagttgatgatgtaactggagagccattgattcaaaggagggatgacactgccgaggttttgaagtcaaggcttgaagccttccacaaacaaactgagcctgtgattgattattactctaagaagggcttggtggtaaatctgcctgcggagaaaccaccaaaggaagtgactgctgaggtgctgaaagccctctcatgatgaaatgcccctttgtctgagtttcttcaggttaagcatgatatgtaccgaaatccctttgtctgggtttcttcacaccagcatcatgcagtttcctttttttgcgattacaccattttatcatagctttgacaagctcggtaactgtctgaataatctgttttgaatgagggaagttgtttttcagtacc

SEQ ID NO: 35188 - DNA, 789 bp, Zea mays subsp. mexicana
  Clone ID: UC-ZMFLTEOSINTE40B06_FLI
ctcaatcaggcaggcactcagctcaccagtgctcgctcacctttccccttcctttcctttcctatccttgtgcagttgtgccctcgaatcgggaacccagccatgtcgtactacggcgaccggcgcgcggagtcgtcgatcgtggaggcgttcacgctgtcgccgctgccgtacccggtgatcctggtgctgctgatggtgacgctgctgctgggcgcctcgtggttcttcacgtacgacgacttcatcgaggaggcgtcgcagcagctgagctgggcgctgctgggcgtgcccatcgcgctcgtcctcctcatccgctggatctcctccgtcgactccttcgagggctacctgggcttctacccgagggagagccgctggaagggccgctacgagcggggccccgccgagggcagctcgccctggggcgtcgccttgctcgtcctcctcctcctcgtgctcgccagcttccactccaccatccacgacatgtgggggccgtgaacggccggatgtgggtcctgctcctgttcggttccacggatgtgcgcttgtgctacttgttgctgcttgatggatcgatgattccatgtacatatttgttagggggatgctgctgctagctaggctattagctgcaggctatagagtttgagggtgatatacttatcagtttgctgcctgtaagactggttttggttttgctataatcgtgatgtattcagatgtacagtaccctctttgctttggtttccctgtctgtcttggaattgactgctggaaccgtct

SEQ ID NO: 35189 - DNA, 1485 bp, Zea mays subsp. mexicana
  Clone ID: UC-ZMFLTEOSINTE40B08_FLI
ctccgaatcctgaaaccaaccagatcacacgaaccaaaccaccgcctcctcccccgaccggagaggagcctcaccgccggcgcccatggcgacacgctacttgatcgtgtcgctgcccgtgcagtcgcccggcgccaccgccagctccctgtggtcgcgcctccaggattccatctcctgccactccttcgacaccccgctctaccgcttcaacgtcccggatctccgcgtcggcaccctcgactcgctcctcgcgctcagtgacgacctcgtcaagtccaatgtcttcgtggagggcgtgtcacacaagatccggaggcagatcgaggacctcgagcgcgccggaggggtcgagaccgggaccctcaccgtcgacggcgtccccgtcgacacctacctcactaggttcgtgtgggatgagggcaagtaccccacaatgtcccctctcaaggagatcgtcggtagcatacagtcacaggttgccaagatcgaggatgacatgaaggttcgagcatcggaatataataatgtaaggagccagcttagtgcgatcaacaggaagcaaagtgggagcttagcggttcgtgatctttccaatctggtaaaaccggaggatatgatcacctcggaacatctcgtgacacttcttgcaattgttcccaagtactcccaaaaagactggttgtcaagctatgagaaaattgacacattcgtggtacctaggtcatctaaaaagctctatgaagacaatgaatatgctctctacactgtaacactgtttgctaaggttgttgacaattttaaggtccgtgctcgtgagaagggttttcaggtccgtgattttgagtacagtcctgaagcacaggaaagtcggaagcaggagatggagaagctactgcaagaccaagaagccatgaggaccactcttcttcaatggtgctatgccagctacagcgaggtattcagttcctggatgcacttctgtgctgtgcgtgtctttgtagagagcatccttagatatggtctccctccatcattcctgtctgctgttcttgcaccatctacaaagagcgagaagaaagtaaggagcatcttagaggagctctgcggcaatgcccatagtatttattggaaatccgaggacgacgtaggcgtcgccggtctgggaggtgaaacagaggcgcacccttacgtctccttcaccataaattttgtctgagaccggcatgttcctggccgtctgcggccaggcaatatttcgagcagaactgccataaattctttgttgatttgtcggttcatgtgctcctgtaattcacatcacagagagaccagccgatcaataatgtagtttctgaggacatgtttccctgcagtattgcaccttgggagcgcattgtaaatggcctggaacagttgtctactggatttgtttatttgtttacaataaaagccatgtgaaaataagtaactaaaatttggatt

SEQ ID NO: 35190 - DNA, 178 bp, Zea mays subsp. mexicana
  Clone ID: UC-ZMFLTEOSINTE40F05_FLI
gcagtgttttcctgtctcacctatttgtgttaagaagacgtagtttttaaatccatggctccttcctgtttggacagtgctttcatatcaaatatttcaggtatattagagctaactgtgctattctcattcgttcaactgattttgtgatgcatattgcgatatctttcgtgttgtg

SEQ ID NO: 35191 - DNA, 1513 bp, Zea mays subsp. mexicana
  Clone ID: UC-ZMFLTEOSINTE40H02_FLI
aggcagaagacgcgccgccgtcgcagtctcactaccaccaaaagaggcggcgccttctcccgcggcgagcgacggcagcggtgggagaggggaggggagatggtggggtggatgaaagcactggtgtacggcgtcggaggcgtggcggtggtcggcctagcggcgctggttgcgctgcaggagcgcctcgtttacgtgcccgtgctcccgggcctggcgcgcgcgtactccatcacgcccacccgccttggcctcatctacgacgatgtctggctccgcgccgcggacggcgtgcgcctccactcctggttcatctaccactcccccgcctacagaggaccaaccattctgttcttccaagaaaatgctggcagtatcctttttttcctatgtacttataaatcatacctcatatgatggctcaaattttatcagaatcacattctattaaatccctttactatttagacatcgctcaccgtttggaatttgttcgactaatgatgcagcgtctacagtgcaatgcttttatgctttcttatagagggtatggtgagagtgatggttatccttctcagaaagggatcacatatgatgcacaggctgcacttgatcatctagctcagaggaaggacattgacacaaccaggatagttatctttggaagatctttaggaggtgctgttggagcagttcttgccaaaaacaatcctgacaaggtggccgctctaatactggaaaatacatttacatccatactggatatggctggtattatgcttcccttcttaagatggttcataggtgggagctcttctagaggtccaaaacttctgaactgtgttcttcgctctccatggaatacacttgatatcattggagaggtcaaacaacccattctcttcctttctggattacaagacgaactagttcctcctccacacatgaagatgctatatgacaaagcttctgatcataatagcaattgcagatttgttgattttcctagtggtatgcatatggatacctggatgtctggaggggaccgctactggaggacaatccaactgttcttggatcaatatgctcctggagtacaaaatcgtgatgccagcttcaaaagtgaaattactgaggatgatgaagctgctgattgacgggaacatctggatcagacttcttttttccaaatttctgtttcctgatgttgctgcaatttatgtcaccaatgaactgaagctcaccgcaaacaattaattcaggcaattattctgccccattatacgtgaagcaaccgaagtgaatagttttcgaggatattctccaccatgctctgctgctacatttgtccctggaacttaatagtaatttacttatttgtccacgaactgaatatattctcatgattgaatgtacagtggcatttttttttctttgctagtatccgggacattcctggaaatgtggctgtacaacagcccgaaatataggttgtaagtctgttggctcaact

SEQ ID NO: 35192 - DNA, 1165 bp, Zea mays subsp. mexicana
  Clone ID: UC-ZMFLTEOSINTE41B11_FLI
cagccatctcgtcgtctcgtcttctctaccaccaccaccactgctcgttttacagaaaccggaaggaaccaaacgcctttccgccccgggccgccgctacccaagcccagcaaccaccactcgttgtcgtcgactactaggcggcaagcaggcgtcctgtttttttttttggtcctcgtcgtcgtccggactccggacaggacaggacatgggcgcggaggcggcggagcgcgacagaatcaggggcccgtggagccccgaggaggacgaggcgcaccgacaacgccgtcaagaaccactggaactgctccctcaagcgcaagctcgccggcggcgccgtcgcgtccggttcggcggtttccgctgaagacgccgccgaggccgaggcgcgccggggcaagatgatgatgagcatctcgccgcccgacagcccctcggggtcggggtcggggtccgaccgtagcgacctcagcagccacggcgccgggtccgggtccggccagatttaccgccccgtggcgcgctccggcgggttcgagccggcggactgcgccatgagccgtccgcaggaggaggacccgctcaccgccctcagcctctcgcttcccggcacggaccagcggtttcaccaccacagcgccgccgccgacagccacttccaggagctcccgccgtcgccctccccacccgcgccctcggcctccccgttcagccccgagttcgcggcggcgatgcaggagctgatccgcaccgaggtgcagcggtacatggcgagcgcgggcctgcgcgccggctgcggcgccgttggcgcggccgacctctgcatgccgcagctggtggacggcgtcatgcgcgctgccgccgaacaggtcggccggatgcagtagccccgcgcccccggcgggggcatcaaaccgtcagtgctcccaaatcgtcgtctagctagggcgaccgcaacgcaacggttgttggagtagcaaacttggttttaaggtggagggaaaaattggctgggctgaaagcagaaagccttgtaatgtacatgaaagaaacggaacggatggcgcgctacaatctgagctcgccattgccgcatatatctgctttaagagagcattgcgctgccttgcctaatcgaaacgaaacgacacgaaatgttgcctgc

SEQ ID NO: 35193 - DNA, 1715 bp, Zea mays subsp. mexicana
  Clone ID: UC-ZMFLTEOSINTE41C01_FLI
gcccggccccttcgcaccgtttccctctgcgctcccaccccccgccccccgaaatcaccgccgcgccccgcgtctcgcccacgctcacaaggaaaggaggagaggagaccggggcccagacgccaacgcgcggacccctcgagtagggcgaggtccgggctccgctcccggtttccggggagagtgcggaggacccccatcgtgcgcgccattgagctctgctcccggctgctcgccggggagagggcggaggacccgatcgtgccgtctcaacccgctccgcacccgcgtggccgcgggcgtggtgctcccgcgccttccgggcgcctcctgcttctccgtgcgccctcggctccatggaggccggctactgcaatcgcaagaagaccgacggcatctgcgagtcagtctgcgacagcaattttgatctttgccatatatgtgcatggccagaaggtgacttacttcctccgaccaatctgggagaagcccccaaagcccttcacaatactccctcactattaccatgaaaatgtctcgatgggtaacctatgtaagttgcatggatggaaagtcagggagactccacgccgtgtctttgatgccgtgctcttcagcaatgagcttgacatccttgatatccgctggcacgagcttagcccgtatgtgtcagaatttgtgctgcttgagtccaattcaacttttaccggcataaagaaggaccttcacttcaaggaaaaccgccaacggtttggctttgcagagtcacggttgacctatggcatgataggtggaaggtttgtgaagggagagaacccatttgtcgaggagtcatatcaaagggttgctctcgaccagctcattaagattgcgggcatcacggatgacgacctgctgatcatgtctgatgttgatgagatcccaagtggacacaccatcgacctcttgagatggtgcgatgacgttccggagatactccatctccagctcaggaactacctctactcgttccagttcctactcgacgacaagagctggagggcttcagtgcacagatacagagctgggaagacgaggtatgcacatttccggcagacggacgacctcctggctgattcagggtggcactgcagcttctgcttccgctacataaacgacttcatcttcaagatgaaagcctacagccacgtggaccggatcagattcaagtacttcctgaacccgaagaggattcagcatgtgatttgcgaaggggctgaccttttcgacatgcttcccgaagagtacacgttccaagagatcatcgccaagctggggcctatcccgagtacattctccgccgttcatctccctgcctacctgctggagcaattcgatcggtacaggtaccttctcccaggcaactgcgttagagagagtggctaggcagctggctgcccgccgtctgcatcatgaccctgaggcgcacggaggacgtcgctctctcgcggatgtctgtcttatggcggcgggggttgtgtccgatacgattggctgacttagttgagtgatcgcttggctgctggttgagttcatatgggatttttgtgtaccgtgtaacagaaaccatggaaggcctgacgggcgcgtgcttgatcgctgatgcgttcttgtttggcagaggagagctgagagctttttgttcgttgcttccatgattgatatatgatgaactc

SEQ ID NO: 35194 - DNA, 785 bp, Zea mays subsp. mexicana
  Clone ID: UC-ZMFLTEOSINTE41G10_FLI
ccaaaccaaaccaaaccgctctcaagtctccattctctccgctcatccagctctagctagccttagcctcgtccaagggacgaaggggccacgatgagcgtggtgatcctggacggctccacggtgcgcggcttcgtggcggacgaggcggccttcgcgcgcagcctggacgcgcgcttcgccgcgctggacgccaacggcgacggcgtgctgtcccgcgccgagctccggcgcgcgctcgagtccttccgcctcctcgacggcggcggcttcgggtccgcccagccggcgccgctccccgccgaggtcgccgcgctctacgacgccgtcttcgagcagttcgacgccgaccacagcggcgccgtcgaccgcgccgagttccacgacgagatgcgccgcatcatgctcgccgtcgccgacgggctcggctcccagccgctccaggtcgccgtggacgacgagggcgggagcttcctgctcgaggcagccgagcacgaggccgctgggatcgccgccaagatcgaagccaaccgcaaggccgaggcggaggcggaggcggaggcggccaagtgacgacgtgtccctcgtgcgggccctgcgcttgattttctgggtgtttgctactacgtactatactagtactacttacctggcggccgatgtgccgccgcacgtgtacggtaactagaagcggccagcaccagctggacggtggcgctggtgctcagagaacaaatcactgctgatgctacttgtgaacggaataaaacctgtcaatcattttt

SEQ ID NO: 35195 - DNA, 2205 bp, Zea mays subsp. mexicana
  Clone ID: UC-ZMFLTEOSINTE42C12_FLI
gaaaactcggccccccgcaggatcttttgttccggacctcgtgagtcgctgccacgatcgaggcagggcgccaattgcggtggccaccacttccaatccactccccgcgttcgcctcgccgagctgttcttgctctgtcctctctccaactccacgatttgttccacacccggttcccgagcctccgcagcgcttcttgctgaaaaagggaactccgagttctccagctctggatcggcagagagcggtggttccttttgcggactctcaggtccagttcttgcttttgatttgtctcaccaacccaccagtcgggctgcaggcttagagctggaaggaataatttgactagagaaatggggcagtgttgcagcagagctacggccccggactctggacggggaggtgccaatggttatggctattctaaccaggcaaagccggcgcaagcacctccgagttacaaccctcctcagcaggcggccgaggtgaggtacacaccatcggcgacgaactcttcggcagtcccacccgtggctgtgccgccgaagccaacggcggacacgattcttggcaagcagtacgaggacgtgcgctctgtctactccctcgggaaggagcttggccggggccagttcggggtgacatacctctgcacagagattgcctctggtaggcagtacgcctgcaagtccatctccaagcgcaagctcatcagcaaggcagacagggaggacattcgaagggagatccagatcatgcagcacctgtctgggcagccaaacattgttgagttccggggagcatacgaggacaagagcaatgtccatgtggtgatggagctctgcgcgggtggggagctcttcgatcgcatcattgcaaaggggcactacacagaacgtgcggctgctacaatctgcagagcagttgtgaatgttgtcaacatttgccacttcatgggtgtgatgcatcgtgatctgaaacccgagaacttcttgcttgcgaccaaggaggagaatgcaatgctcaaggccactgattttgggctctctgtcttcattgaagaaggaaagatgtacagggacattgttggaagtgcttactatgttgctcctgaagtccttaggcggagctatggaaaagagatagatgtttggagtgcaggtgttattttgtacattcttctcagtggcgtgcctccattttgggctgaaactgaaaaggggatatttgatgctattctgcatgaggagattgactttgaaagtcaaccttggccatcaatttctgagagtgctaaagacttggtgagaaagatgttgacacgagatccaaagaaaagactgacttcagcccaagttcttcaacatcagtggctcagagaaggtggggaggcatctgataagcctatcgacagtgctgttctttctagaatgaagcaattcagagcaatgaataagctgaaaaagatggccctaaaggttattgcttcaaaccttaacgaggaagagatcaaggggctaaagcaaatgttcatgaacatggacacagacaatagtggcacaatcacatacgaagaactcaaagcaggattagccaaacttggatcaaagctgtcagaagctgaagtaaagcagttgatggaggctgctgatgttgatgggaatggatctattgactatgttgagttcatcactgccacaatgcatagacacaagctcgaaagggacgagcatttgttcaaggcattccagtactttgacaaagataacagcggcttcatcacaagggatgaactggaatctgctttgattgagcatgagatgggcgacacgagtacaataaaggagatcatatcagaagttgacacagataatgatgggaggattaactatgaggagttttgtgcaatgatgagaggagggatgcagcagccaatgaggctcaagtagcctgttcccttaatagaaacggtgtaccactagttactgttcactttttttttcatgtttggtacttggtagtcggataaagcttacaatgggtgttgcttttgtattgttgagagatgattgtctatgcctttttttccctttttgctcgtgtttgttgcattgtagtatcttgaacgtcccttcctttttttaagtttgtttatgcaagtacatctaataaaaagtgcattctgtcttactttgtactgtt

SEQ ID NO: 35196 - DNA, 2585 bp, Zea mays subsp. mexicana
  Clone ID: UC-ZMFLTEOSINTE42D02_FLI
cgacggcctgaccgctcccaccttctccgcctcgtcgtccgacgttcctgctgcataactaccacctgcagacctcctatcgtttcttcctcgcccggtcgtccccctttcccccgcggccccgcccccatgtccctcgcgtacgcgcccataccgtaccgctcccgaaacactagggcgcggcacgcaccctcctcgtgagcgcggggtcgggcgcagggccgcgggcggcatggcgccgcaggccgcggggtcgacccctgcggtggcggcgctcgggttcctcctcccgacctgctgggagatcgaggtcacgtgcgccgccgcgatgatcctcgtcgcgctctacgctgcgtacgagctcctcaacccgcgccccttccaggctgcagcggcgggcgacgccgacgagctcctcgtgcgggggctagacggcaccaacaaggggggtgcgagcggccgttctgcgtatgtagtgaagctagaattgttggctgctaggaatttgatggcggcgaacttaaatgggacatctgacccgtatgcattgatcacttgtggtgcagagaagcgtttcagctccatggttcctggctcaagaaacccaatgtggggagaggaattcaatttttttgttgatagtcttcctgtaaagataaatgtcacgatatatgactgggacattgtatggaaaagcacaatccttggttctgttactgttcctattgagtctgagataccgagtgggccagtttggcatacacttgacagcacatcgggccaggtttgtcttcatattaaagtaatcaaggttcatgaaagttcctccagggctctcaatagctcagctgaggctggcgctcgtagaaggatttccttggataagcaaggtcctactgtagttcatcaaaagccaggtcctttgcagacagtttttgaactacctccagatgaggttgttgaccacagttattcatgtgcacttgagaggtcatttctgtatcatggacgcatgtatgtctcttcatggcatatttgctttcattcaaatgtcttctcaaagcaaatcaaggttgtgattcctttgagagatattgacgagataaggagaagtcagcatgcagttattaatccagctattacaatatttcttcgaatgggagctggaggatttggtgttcctccattaggatgtccagatggaagagtcaggtacatgtttgcatcattttggaacagaaaccatacatttagagcattgcagcgagctgtgaagaacttccaaatgatgatagaggctgagaaacaggaacgtgctcagtctgcattacgtgcacatagtagttcaagaaaaaatagcaagaaggagataaatatcccagaagattgtgctgcattaacaggacagttacaaccttttgtcaaagaagaagttttggtccctgtattcaatggaacttttccatctactgcagagcacttctttagtattcttttaagtgatgactcgaactacataacagagtatcgaacatttcggaaggataaagatataaatctgggccaatggcacattgcagatgagtatgatggccaggtgagggaacttaattgtaaatcaatatgccatagtccaatgtgccctccttattcagcgatgacagagtggcagcatatagttctttcagctgacaaaatggatctggtatgtttctactgtacaacagaatgttccattatgacagataatagttcttggtaatttgcttgatctcataagtaatatggatctgggtcatgttgttttttctttgtaaaaggtgtgtctatttttggctaagggtatgagtaggtggatgtgcgttgtttgggctcctgccattttttcttcttaatataatgatgcgtagctctcctgtggattcaagaaaaaaaaaatattgacctctcaccattatttgtaggtatttgagacagtacagcaagtacatgatgttccatttggttccttctttgaggtgcattgtaggtggtctgtgaaaactatcagttctagcctgtgcagtcttaacataagtgctggtgcacatttcaagaaatggtgcataatgcagtctaagataaagagcggtgctgtggatgagttgaagaaagaagtcaaggaaatgttagactttgcacaggggtatatgctcaaagttaggtctccggaccaagagaacagtaatctcgcccaacaagacaacgtggcaccggatgcagtgtctggcgatcaatgattatttcaggttgtgcctcgtgatttagggtggggtgacagctgccatgacaacgaattatgatgttatacacagaagggcaggtggacctgtaactagtccacatgaaccacatctaacatgttaagctgacttccaaaagatgggtggaccgtgtattgtgtgtgtaaacatcttttcctgtcattccgctatccattctggcagtttggctgatgtatatagttgtaaaaacaagtatagtgctgactgcggacggttcagtggtgcgttgtttgaagataaacaaagaaagaaacaaaagag

SEQ ID NO: 35197 - DNA, 402 bp, Zea mays subsp. mexicana
  Clone ID: uC-zmflteosinte42f12_FLI
gtgaaaacgttccctgtgatcctattgcccaaggagaagcttgttgacaccaacggcgcaggtgatgctttcgttggaggcttcctctcacagttggttctaggcaagggcatggaagactgcgtgagggcaggttgctatgcagcaaacgttatcatccagcgcccgggctgtacttacccggagaagcctgacttcaactagtgcaaaaactgaggcacgtcatgagagggactgttataggcacacttaattgttaaccagtgcgtggttcggtgtctatgtattcttccgaggcttctcttctgatccgggcaatattttttgccgtgaaatttgtgttctgcaactatggacgtctcctttgtcgctgtataaggcgtgatttgccatcattctgtt

SEQ ID NO: 35198 - DNA, 1918 bp, Zea mays subsp. mexicana
  Clone ID: UC-ZMFLTEOSINTE44A01_FLI
ccaccattccaccaagcacgccgccacgccacacgatctaacgcacaggcaggtgaggaccagaccggccggaccttgccttctccgttgggggtctctgcttgctgcggcgcgagagcagagattagatcggatttggggctgggttcttggagcagtaggcaccaaacttgtctggttgggggagctgagcttccttctacgctggaagatccaaaatctgttctcgaaaatttactgcgcctacagatggcagatgatcctaatatgaatttcagggaattctcccagtcactctgcaaccaggatgtagtttcctttcagacaagcgtagccactagcggttcaggagacatgccaacatatctggattgttccactgggatggatgccggtgtggggatgctgcccacaccttcggtggttgtttccactggttcatctaatatgccagcagattcagggcagaacctcaaatatggtgggccgctggctgcagattggacacaggttgagcttgaaattctgaaagatggcatggagaaatatgttcatgaacaaggcatcatgaagtacataaagatagcagcatcgttaccgaacaagacagtaagagatgtcgcaatgaggtgccagtgggtagggaagaaagtccatacaagacgaaggaagccccaaggacgccatactgggagaaatacaaaagaaagaaaggataaatttgtagagtctgcactgtggggagcaaatcatccaattcgaagaggtatgagagcctcttcatttatgctgcataatgttcaaaacaatatgtttctatgtggaggttggtaggtcacttgactacttgagtatcaggtctaattgtttgcttccatgtatcttctttgtttcttgttatctgccgttaactgtctcgtgcaattatcaaatattatgatctggcatttggtttttgcatttgagaggataaatactgctgccaatactggagtgactgaactatttcactttatattgactccattgctaagtttatcgcagtttctagtgtcaagtaacagaaagggataaaaaaaagtcgacacttcggatgtttactgttcaagaacatgaatgagaagagctttggcctctgagatagatcgtccagtgcagcatctactggaggaaaacaattggcttcttaatcaaatcgaaacaaatattcagaaatttcagcctcataacaacattgttctcttccatcgggcaagaaggagcatcaatgatcttctacagatcacgacccaactgtttggactttttaggacaaagatgcctccactaagcgtgtcagtggatgaaaatcttgctagcttcgtgcttcctggcattacaacggatcaagctcttggaagcaacctttgaaggaggagccaagaggatcactgccaagtgccaacaacacgtttcagtttaggcagacttttgggactttattgctagatggacgggacggagcatgtggagaactactgcacaccaggtggatggagatcaatagggtcgccattcaccaagggcccctgctttctctatctgaaagctaaaggagaggtgactgaaaccgttcagccgtcctgccctgcaactagccttaaacattggtggctaaacatcgagggtcttaggaactgcagttttttggccttgctgcacttgtaaataactaggattcttttttggtttctccttcagacggtagggtgggtaaatagatgcagcggaggaagctcccgagaagggactcgctacataacaagtaggaacctttttgcctgtcgctacttgttgcgcgtcctgctcctgcatgtgaacgtaatccgtggcatctgccactctggcaacgaaacagagaagagaaactgccgaatag

SEQ ID NO: 35199 - DNA, 1276 bp, Zea mays subsp. mexicana
  Clone ID: UC-ZMFLTEOSINTE44A02_FLI
acaactccacgctacacagttcacacgccaagcgagggccgcatctagatccgcgccgccgagctgacttgactattgcaagtttgcaacccaccgccacgccttcttctccccccgcgatctacccggcccgggcgccgttgctgctactgctattactaatactactaccgcgtcgtagcggaggcagggacttgaggagcgggtgggttgcgatggccgctgcggggaggaatgcgggcgtcctcgcgctcttcgacgtcgacggcaccctcacagcgccgcgcaagggggtgacgccagagatgctagagttcatgaagcagctgcgccagcatgtgacagtgggcgtggttggcggatccgatctggtgaagattaccgagcagctcggcagtacagttattactgattatgattacgtcttctccgaaaacggcctggttgcacacaaaaatggccaactaattggaacccaaagtttgaaatcatttatcggagaagacaagctgaaggaatttattaacttcactcttcattacattgctgacttggatatcccaattaaaaggggtacattcatagagttccgaagtggaatgattaatgtatctcctataggaagaaactgtagccaagaagaacgtgatgaatttgagaagtatgataaggtgcataacatccgacctaaaatggtgtcagtgcttcgtgaaaagtttgcacacatgaacttgacattttctatcggagggcagattagttttgatgtatttccccaaggttgggacaaaacttattgcttgagatatcttgaggaatttcaagaaatccatttctttggggataagacctacaagggtggcaatgactatgagatatttgaatctgaaagaacagttggtcatacagttaccagccccagtgacacagctcagcaatgcagatctctctttttgtcgaagtgatctccagcttatttccaacacatatttattaagtcatctttgactgaatgccttttggtatttttttcaagacaatacatgccaccattttttctttgaataattggatctataccattaaaagattgcaactttagatatatactattggctccacatatcattgactcatgtgaaccatacatgtaagtgagataacaatgatatatatttaaagttgtaatcctttaatgatactactgctccgtattcacaaattttcagattacatgtatacaactgacgaaaataaatcagatttacctgttttt

SEQ ID NO: 35200 - DNA, 1190 bp, Zea mays subsp. mexicana
  Clone ID: UC-ZMFLTEOSINTE44C09_FLI
cactcagacagatatgagcaaaaccatgagggcaatattaatagactggcttgtagaagtcacagaagaatatcgtcttgttcctgaaaccttatacctcactgtcaattacattgaccgttatctttctgtcaaagagatcagtcggcacagactgcaattagttggtgttgcttgcttgcttatagctgctatgaagaaatatgcccacctctggtagaagaactctgttatattactgactattcatacaccaaggaagaggttttgcaaatggaagcttctgttctgaataacttgaaatttgagatgacagtaactacagcaaaatgtttcttaaggagatttgtacgtgttgctcaagttcctgacaaggtacatgtttcactgttttgctgttcctaccaattccatgtgctggttgattttttttttctttctgcagggctcatctctgcatcttgagttcttagtcaactacatttgtgagctgtcacttctggagtacagcttactttgctatttaccttcaatggtagctgcctcttctgttttcttggcgaagtttatccttatgccaataaaaaacccatggaattcctcactttcttactacacgcggtatacaccatctgagttgcgtggttgtgtaagggtactgcaccggctcttccgtttgggccctggaagcaatcttcctgcaattagagaaaaatacagtcagcataagtacaaatttgtagcaaagaagtactgcccacagtcaatccctactaagttcttccaggatctgacaagttagaagccaagattacttctagttactcaatgaaaccttcctgaggtacttagtgtgatactatgatattgatttgacagatagttttgaatgcaaggcatgcacgaggccttgcgtttagcagataaacaggttcaagtaaactgtatgtcacttgtggcaatgttgtttcagtgttgtgctttgattgcttccagcatcgtcttatacgttgctgttgtggtcttctcacgctgtctagaacttctattgtatagttctggaccttgctcataacaagggtagatagtttggctaaagataaagtgtactcattctctcattgttatctacgtgttgcttctgtattctgaagattctgctctgaaacccagcaaatgtattatcaggc

SEQ ID NO: 35201 - DNA, 1248 bp, Zea mays subsp. mexicana
  Clone ID: UC-ZMFLTEOSINTE44D01_FLI
cctgaccttccacttccgcagtcccgcaagaaagaaagagaaaggagaaggaacagggaagcaaagcacaagaggtggccgccgcagtccgcaccccctccccaatcacgccacccgacaccgcgctccgcagattcgtagtcgctgctaggcttccggcgagatggacgtggtgaaggcggcgcagttgtcggggcggacgctggaacgggtagtggtgcatcccttggtgctgctcagcatcgtcgaccactacaaccgcgtcgcccgcgacacccgcaagcgcgtcgtcggcgtcctcctcggcacctcatcccgcgggtccgtcgatgtcaccaactcctacgccgtgccgtttgaggaggatgacaaggatcctaggatctggttccttgaccacaattaccacgagtcaatgttctccatgttcaagaggattaatgccaaggagcatgttgttggctggtacagcactggcccaaaactaagggagaacgacttggatgtccatgcattattcaacagttatgttcctaatccagtcttggtgattattgatgtccaacccaaggagctgggtataccgaccaaagcgtactacgctgtggaggaggttaaagagaatgcaactcagaaaagtcagaaggtatttgtccatgttccttcagaaattgcagctcatgaagttgaggaaattggagttgaacaccttctaagggatgtcaaggacacaacaataagcacacttgctacagaggtcactagcaagcttgcagccttaaagggactcgatgcaaggcttagggagatccgaagctatttggatcttgtaattgacgggaagctcccactgaatcacgaaattttgtaccatttgcaggatgtctttaatctccttccaaatttgaacgtaaatgagctaattaaagcctttgcagtgaaaacaaacgacatgatgttggtgatatacctgtcttctctgatccggagcgtcattgcgcttcacaatttaatcaacaataagatgctaaacaaggagcacgagaaggccgaggattcgaaaccaaccgccattcctactgctgccggaagctaaacgtgcttttgatcactgattggtggctaagaaaagggaagaaacttgtgatgacatgttagcacggttgtgctcgaaccaactgtcttgaccttgaatggacattttttatgtttattttatgtatgatcaggtcaacggcaagagaaacc

SEQ ID NO: 35202 - DNA, 1147 bp, Zea mays subsp. mexicana
  Clone ID: UC-ZMFLTEOSINTE44E11_FLI
catcatgcgggcatgcaaggaggccggcaccgtgcggcgcatcgtcttcacttcctccgccgggacggtcaacctggaggagcggcagaggcccgtctacgacgaggaaagctggaccgacgtcgacttctgccgtcgcgtcaagatgaccggatggatgtacttcgtgtctaaaaccctggcggagaaggcggccctggcgcgatcccgcgaacgttggtaagacgaagccattgatggaccttcccggagcaacggagcgcctgtccatatggaaagccgacctggcggaggaaggcagcttccacgacgccatcaggggctgcaccggcgtcttccacgtcgccacgcccatggacttcctgtccaaagaccctgagaatgaggtaatcaagccgacgctcgtggtcggcccgttcatcagcgcgtccatgccgcccagcctcatcaccgcgctggcgctcatcacggggaacgcgccgcactactcgatcctcaagcaggtgcagctcatccacctcgacgacctctgcgacgccgagatcttcctcttcgagaacccggccgcggccgggcgctacgtctgctcctcgcacgacgtcaccatccacggcctcgccgccatgctcagggataggtaccccgagtacgacgtcccgcagaggttccccgggatccaggacgacctccagccggtgcgcttctcgtccaagaagctccaggacctcgggttcaccttcaggtacaagacgctggaggacatgttcgacgccgccatccggacttgccaggagaagggcctcatccccctcgccactgccgccggaggggacggctttgcctcggtgcgcgcacccggcgagacggaggcgacgattggcgcttaagcaacaatcacccggctctccccgtcgatgatgctatcagctatctatctcttcgagctccgctgccaatacggaacttacttccatgttcaacgaattgttttatcccctggattacgtattgtttttatgttttatacccaaacaacgaatgtttctcagtattttactacagctagcccctatagtagagattctattatatgaataagctatctgtagaggctctggtgcaatatatatttcgagttatttggatt

SEQ ID NO: 35203 - DNA, 947 bp, Zea mays subsp. mexicana
  Clone ID: UC-ZMFLTEOSINTE44H04_FLI
gtgtcctccggtcccggacctctgtgccgcactgcccacagcgacagcatcgacatcgccccggtcccgtgtcgcttcgcttcgtagctcgccgccttccccgcgccccagcagcaacggattcccctcccctcgagagatccgacccttggcccggtcgctggggagagcggcatggggctctgggattcgctcctcaactggctgcggagcttgttttttaagcaagaaatggaactctccctggttgggttgcagaatgctgggaagacatcgctggtcaatgctgttgctacaggtggctacagtgaggacatgattccaaccgtaggcttcaatatgcggaaaatcaccaaggggaatgtcacaattaaactttgggatcttggtgggcaacgaagattccacactatgtgggagcgctactgccgtggagtttctgctattctatatgttgtggacgctgctgaccgagatagcatcccaatagcgaaaagtgaattgcttgatctgctgacaaaacagtctttagctgggattcccttgcttgtccttggcaacaaaattgacaagtcagaagcgctttcgaagcaggcattggttgatcaacttggactggaattgataaaggaccgcgaagtttgttgctacatgatctcctgtaaggattctgtgaacatagacgttgtcatcgactggcttatcaagcactctagaacagcaaagtaggctttatgtgtgtttgtatcacttgatgcatggtaatttgaatttacctttgtgaatcagtactcccagaatcctggtttcttggtccagatgttaaaagcgttcacctcgtaatttatgatccctttggtctcgcagacgaattgtatggtatctagaagaccagaaccttgtatttcctttgccattcccttgaatcttttattattcttactgtg

SEQ ID NO: 35204 - DNA, 1579 bp, Zea mays subsp. mexicana
  Clone ID: UC-ZMFLTEOSINTE44H11_FLI
ctccctctccgactctccttctctccctgccctgccaatactcatctacaaaagagagagagagagattatattcatcctctttgtgcactgatttaattatgatccttcttttcgtttgttttttatgccattgtttggccaccagcggtgggggtatcgatctgctctagttggacggcatccctgattccaccctgatcgatcccatggatgcgcaagacgacgatgagaggccgctgatcatccatcgcctgccactactccaggatgaaagtacttccgaattcactagcgacgggacggttgatcttcgcaatcagcctgctcggaagcagagaactgggaactggagagcatgcttcttcatcttaggtgccgagttcgctgaatgtgtggccttcttcgcgatctcgaagaacctggtgacatacctcacgggcgttctccacgagagcaacgtggacgccgcgaagactgtgtccacctggatcgggacctcgttcttcacgccgctcgtcggggcgttcttggccgacacattctgggggcgatactggacgatactggccttcctctccgtgtacgtcacggggatgacggtcctgactgcttcagctcttctcccgctgctcatgggcgcgtcctacagccgtagcgcccaccgcctctccgcgtacctgggcctctacctcgccgctctcggcaacggcggaatcaagccgtgcgtctgcgcgctcggtgccgaccagttcgacgcgtctgaccccgtggagcggcgggccaagggctccttcttcaactggtactacttctccgtcaacatcggctccctgctgtccgcgacggtggtcgtctgggtgcaggataacgttgggtggggagtcgggttcgcgatcccgaccctgctcatgctgtcggggctcgtgctgttcgtcgccggtaggaaggtttacaggtaccagagagtgggagggagccctctgacaagagcctcgcaggtggtggttgctgctgtcaggaactaccgtttggtgctgcctgacgacagctcggccctgctgcatcaggtgcctcccggaacgacggaaggaaattattccacgatgcagcatacgagtcaattcaggttccttgacaaggctgccattgtagcgccatcctccggcgagaaaggagcgacggcaagcccatggcggctctgcacggtctcccaggtcgaggagctgaagacggtgctgcggatgttccccgtgtgggtgtcgatggtgctcttcttcgcggccaccgcgcagatgtcgtccaccttcatcgagcaaggcgagaccatggacaaccgcgtggggccgttcaccgtgccgccggcgtccctctccaccttcgacgtcatcagcgtcatggtctgcatacccatctacgacaaagcgctggtgccgctggcccggcgcgccacgggcaaggagcggggcctgtcgcagctgcagcggctgggcgtcggcctcgcgctgtccgtggccggaatggtgtacgcggcgctgctcgaggccaggcggctgtcgctcgcccgcgcagcggcggac

SEQ ID NO: 35205 - DNA, 502 bp, Zea mays subsp. mexicana
  Clone ID: UC-ZMFLTEOSINTE45A01_FLI
ccgggcacaccccccgagctcagctttagctccactccagctccaatcacagtcgtgaccagagcgagagctagctagagggccgtgaaaatgccgatcaataggatcgccctggggagccaccaggaggtgtaccacccgggcgccctcaaggcggcgttcgctgagttcatctccaccctcatcttcgtcttcgccggccagggctccggcatggccttcagcaagctgaccggcggcggcccgacgaccccggcgggcctgatcgcagcgcagctagcatccagctctctctccccgctcgccgccgtttagtttctctcgtgcacgtgcatgcatcgtcgactgtctcaggccgccgctgcgccggcgccgctcgcatcgtttgcttttccttggaccagcagtcgtcgccgtcaggctgaactgcttgtaaccgtgaattccggacccgtttgcttctgtaagatttgtgcatttgcctgagtacacctcgatctgc

SEQ ID NO: 35206 - DNA, 778 bp, Zea mays subsp. mexicana
  Clone ID: UC-ZMFLTEOSINTE45A02_FLI
gggctggcttctcctccccctcttatcaagtcctcctcgggttagggttccttagggttttgtggaggggcgatggcggcggctgatgtggagtaccgttgcttcgtcggcgggcttgcctgggccaccagcaacgagtcgctggagaatgccttcgcctcctacggcgagatcctcgactccaaggtcatcaccgaccgggagacggggaggtcccgcggcttcggcttcgttaccttctcctccgagaactccatgctcgacgctatcgagaacatgaacggcaaggagctcgacggccgtaacatcaccgttaaccaggcccagtcccgtggcggtggcggtggcggcggtggctacggcggcggtcgcggcggcggcggctatggtggcgggcgccgtgacggcggttatggcggcggtggcggctacggcggtcggcgcgagggtggtggcggcggctacggaggcggtggcggctacggcggtcggcgcgagggtggtggtggcggctacggcggcggcggaggcggcggctggagggactgatgtgtgggcccatcctggcttcggccgagttatcttatctatctatagtatcgtgttaccgttcgcttctgtcaccgtgttagtgtccgttctacctttggattagttgttggtacccctgttgttcgctttggttgctcccgctatgaaacgagacgagagaagaatgagcaaggtttttgttcgcagctatttttgtccaatgatattgatatattgtttccctgtc

SEQ ID NO: 35207 - DNA, 1109 bp, Zea mays subsp. mexicana
  Clone ID: UC-ZMFLTEOSINTE45A04_FLI
ggcggagatcaccaggtccaagggcgagaggatgaacaccgtccctgacgccaagcagtgggacaagacgtcctaccagcttcacgacgacagcaggatgggccacatcaatctcggcctcatgaaccttgatctcaagatgaacgaggctgccgccatgaagctccccttccgtggcatgccctataacatgaaccagatgtacctcaaggggagcaatgccaattccaatgtcaatgcgttcaagatgaatgttggagtcaacaagtactccaatagtccaaacgggaaagacgccaatgggaaaaacaatggcggcaacaacaacaatgggagcgccaacggcacttctgtggctgacaagcgcttcaagacattgccgacgagtgagatgctaccgaggaatgaagtccttggtggatacatctttgtctgcaacaacgataccatgcaggaggatctcaagaggcagctttttggtttgccagcaagatatcgtgattcagtccgagcaatcactcctggcttgcctcttttcctctataactacacaacccaccagcttcatggggtatttgaggctgccagtttcggtgggtccaatatcgatcctactgcatgggaggataagaagtgtaaaggtgaatctagattcccagcgcaggtgaggatctgcattaggaagctgtgcaagccgttggaagaggattccttcaggccagttttgcaccattatgatgggccaaagttccgccttgagctctccatcgcggagacattgtcactgctagacctggtccctgaaacaagctgcggagagtgagcctgtcagtgtattgtgtctggcgtggtcaagaaccaaatcaatgttggaccgaccgactgagagtttggagtgtgtatgttttgctattactcttatctctagtagagtgtgggtatacctgggcagaatgtgtccccaaaagttgggggcctgtctgtgtactgtgtgcgatggacgccctaagtaaaaaaagggcaggtgatggtcgtgctccaggtttgtgttttgtactctgttgtaccttgaacctcctttgcgttttgcctaatcagagaatgaatgc

SEQ ID NO: 35208 - DNA, 1168 bp, Zea mays subsp. mexicana
  Clone ID: UC-ZMFLTEOSINTE45B01_FLI
caggagcaggacaggacaggacacaggaagatcatatcaggagaacctaggggccggatatggcgaacgctggcggcggggcggccggggaaggggagtggctcaaggtcgcccagctcagggccctcgtccaggaggaccaccgcgccaaggaggtggacaacctgacgctgcgccggttcctgcgcgcgcgcggccacaacgtggacaaggcggcggccatgctgctcaagttcctcaggtggcgggcggaggcggcgcccggcggcggcaccgtgcgggaggagcaggtgcgcggggagctggagcaggacaagatctacatgggcggcgtcgacaggaccggccgccccatcatcgtcggcttgctggctaagcactactccgccaaccgcgacatggcggagttcaagagttttgtggtctacttcttcgacaagatctgtgccaggatccccagaggccaggagaagttcctcgccatcatggatctcaagggctggggctacgcaaactgcgacgtccgggcctacatcgcggccattgagatcatgcaggtccgtccgtgcccccgttaattgcttctgctttcactcaacggcggcacgcagctgccctctgctctgattgacagatgacggcgacgaccctgcttctcaataatcctgacggccgctcgtctgcctcgatcgtacgcacgtgcagaactactacccggagcggctgggcaaggcgctgatgatcaacgtgccctacatcttcctcaaggtgtggaagacgatgatctaccccttcatcgacgccaacaccagggacaagttcgtgttcgtggatgacaagagcctgcgggagacgctgcggcgggagatcgacgagagccagctcccggagttccttggcgggaagatgcctctcgtctccctcaaggactacgcccagcagcctcagcccgtttgcgagtgagtctgtcgtagcgatggtggccggccggtgccgtgagcgagccaaagccgaaagctgattcgatctggactaagctaatacagcctacaagattagggaggaagagaggccctatcggtggaattaagcacactagtttgtggtccaattcaataaagaagtcaatatggtgtgtagaaatggtatgacatgagtctttaatctc

SEQ ID NO: 35209 - DNA, 1081 bp, Zea mays subsp. mexicana
  Clone ID: UC-ZMFLTEOSINTE45D01_FLI
ccgtctcgtccccgtccagtccaccttttcctcctctccgactccaccgccgtcacgccatctcgccggcggcggaaccccgaccgcgagtatggggaacatcttcgtgaagaagcccaagatcactgacgtcgatagggccatcctcaccctcaagacgcagcgccgcaagctcgcccagtttcaacagcagcttgagaaggtaatcgaagcagaaaaggaagctgcacggcagttggttcaacagaagaagagagacagagctttgattgctctgaagaagaagaaagctcaggaagagctgttgaaacaagtcgacacatggcaaatgaatgttgaacaacagctggcagatattgaactagcaagtaaacaaaaggctgtatttgaaagcctgaaggctggaaatgctgccctgaagtctatacagaatgagataaacattgatgatgtccaaaagctgatggatgacacagccgaggctaaggcttatcaagatgaaataaatgctgttctgggcgagcagctttcagctgaggatgaagaagctgtcatggccgagtttgaaaatttggaagctcagcttgctgttgagtctttgccagacgctcctgctaccgaagtaaggcctgaagagaaaacgaaagctctggctgacacagaagctgctcctgaggacatcgatgacgttatcgagcttcctgatgtgcctacgaaagtgccagagaggcctgaagctccagaaaaaaacaaagttttggaggagccgctacctgcataagtggatggagctgagatgaatacggcacacttagtttgcaggaaattgtaacatacccaccatttcattgtactatctcattctcagccataccagaatttcatcgtgtacagcaagaaaaatttgttgtccttgactatcagttgccaccagtttggatttctcagtgcccgtttattatcctatcctacggggtaagcataatatttgtccattgtgtttctttgaaggcagaaatgctgaagtctgcaagcacataccttgttccgtatgaatatatacgtatgttttttttgtgcc

SEQ ID NO: 35210 - DNA, 1649 bp, Zea mays subsp. mexicana
  Clone ID: UC-ZMFLTEOSINTE45D07_FLI
cgcagaggcgcagagacaggcgtcttcgtactcgcctatctccgcgactcaaagcttcttccatttcctaccgccgccgctgcagctccaccccattccgtcgacaccatgagggagtgcatctcgatccacatcggccaagccggtatccaggtcggaaacgcgtgctgggagctctactgcctcgagcatggcattcaggctgatggtcagatgcccggtgacaagaccattgggggtggtgatgatgctttcaacaccttcttcagtgagactggtgctgggaagcacgtccctcgtgctgtttttgttgaccttgaaccaactgtcatcgatgaggtgaggactggcacctaccgccagctcttccaccctgagcagcttatcagtggcaaggaggatgcagccaacaacttcgcccgtggtcactacaccattggcaaggagattgttgacctgtgccttgatcgcatcaggaagcttgccgacaactgcactggtctccagggcttcctcgtcttcaacgctgttggtggaggaacaggctctggccttggttccctcctcctggagcgtctgtctgttgactacggcaagaagtccaagcttggtttcactgtgtacccatccccccaagtttcgacctcagtggttgagccatacaacagcgtcctgtccacccactccctcctcgagcacactgatgtggctatcctgctggacaacgaggccatctatgacatctgccgccgttcccttgacattgagcgccccacctacaccaacctcaacaggcttgtgtcccaggtcatctcatccctgactgcctccctgaggttcgatggtgctcttaacgtggatgtgaatgagttccagaccaacttggtgccctacccgaggatccacttcatgctttcctcctatgctccagtcatctctgctgagaaggcctaccacgagcagctgtctgtggccgagatcaccaacagcgccttcgagccatcctccatgatggccaagtgcgatccccgccatggtaagtacatggcctgctgcctcatgtaccgtggtgatgtggtccccaaggatgtgaatgctgctgtggccaccatcaagaccaagcgcaccatccagtttgtggactggtgcccaactggctttaagtgcggtattaactaccagcctccaagtgtggtgcctggtggtgacctggccaaggtgcagcgcgctgtgtgcatgatctccaactccaccagtgttgtggaggtgttctcccgcatcgaccacaagttcgacctcatgtacgccaagcgtgccttcgtgcactggtatgtcggtgagggtatggaggagggcgagttctctgaggcccgtgaggatctggcagcgctcgagaaggactacgaggaggttggtgctgagtttgatgagggcgaggaaggtgatgatggtgatgagtactagaagtatcctgatgcggtcatcgtcaggcttgtgtgctgctcttgtccccggtgtggtttgcaacacctgatgttgtaagactttctggttatgtccgccccgctttgccactgggttattaagaacgtcgttatggatggttgtctacattattgcttatcgatattggaaaactgttatgcgcc

SEQ ID NO: 35211 - DNA, 1980 bp, Zea mays subsp. mexicana
  Clone ID: UC-ZMFLTEOSINTE45E09_FLI
tttatccagttttcatccatagcttcatggatctagtggcagaaggacatatgcaggaagctcggtcatttttccatacatttcgggaagatcatgaggtgatgcattcaagggatcttcagaagctggaaggcgtcctgtctccttcacacttggaggaaatggaattggcccggtcttttaggaaaaataaatttaaaattaaattatgtgagtattcgtatgaattgcttctccagtatctccagaaaacacaagcccttgtggtgcttggagtaatcaatgagcacataacttttgaagtatctcctggtcagccctcattaatctctgatgacgctgatgttgttgctctgattgggacaagtaaggacttggcaaaacagataaatcagaaggaagtacattgggggttgcttgaagattctgttgaagagcgaatggagaaggcactagcagaatctgataaaatagaagctgaaagcaaggatgctgatgcagaagataacaagaaaagaaatgcagaaggtggaaagcaaggtgcttctcttaagaaagccaaaaaggacaagcttgttggtgcgactggaaaaagcgtcagaactgaaacaagcatggtttctgtggcacctcgagtgaaaccggagctaactcttccagcaacgcctgttgaagttgaacaatcaattcttgaggacctacgaaaccgtgcacaactgaatagtgtggcattgccatctgttagcttctacacattccttaatacacataatggattaaactgttcctcaatatcacatgatggatcactggttgttggtgggttttctgattcgtcagtgaaggtctgggatatgtcaaagatgggccagccagcaaaaatatcaagatcacagggtgagaatgggccttcccagggtgagcgcatatcaacattagatgaggggaaacgaacctatacactatttcaaggccattctggaccagtttattctgcggcctttagcccgtttggggatttcctcttgtcatcatcttcagactcgacaattagactatggagcaccaagctgaatgctaatcttgtctgttacaaaggacacaactacccggtttgggatgtccaattcagtccagttggccattactttgctagtgcttcgcacgacaggactgctagaatttggtcaatggataaaatccagcctttgcgaataatggctgggcatctttctgatgttgattgtgtccagtggcatgtaaactgtaactacattgccactggctctagcgacaaaactgtaaggctatgggatgttcagacgggtgaatgcatacggatgtttattggtcataggagtatggttttatcactggcaatgtcacctgatggacgatacatggcctccggagatgaagatggaacaatcatgatatgggatctctcgactggccgttgtgtttcaccactactaggacacagctcttgtgtgtggacacttgctttcagctgtgaaggagcattgcttgcatcgggatcggctgactgtactgtaaagctctgggatgtcgcttctagcacaaaaaccctgaagacagaggataccaaaggcagctcagctaaccgactgagactgcttaaagctctccctacaaaatcaactcctgtttatagcctgcggttttctcggaggaaccttctatttgcctctggtgctctctcgctaagctcgtcgtaagctgtgtttttttttgcagaaaactagaactggtcctgttttgacattgagtagtgaagctggcatttcagagactgcctattgtacagctaatattttcattagcaattccaacgaactcagcatgtactgccgaattgagcaccgcagattcgttgtagcgggttgtgatattgtaacaatattattaggtaattacgttctgtaaaattgtttttttaggttgtgaccttatgaacgc

SEQ ID NO: 35212 - DNA, 1477 bp, Zea mays subsp. mexicana
  Clone ID: UC-ZMFLTEOSINTE45G07_FLI
agctccaactcagaaagcatccgtcccttggcagcagcaacaagctactagctatgtgtgtttagagcgagcgagggaaaaaaaaaaaagaaaacatctaagatatactccatcatcttcgtttgattaacccgtccaataaagccatggatactaattatagagcggtcatttctctggtactcctcgtgtgcatcgctagccgctcgtccttgggtgccgctgaaactgacgttgagcagaagcgcttgtcagtcccgttgatgtttgtgttcggtgattcgctggtggatgtcggaaacaataacttcctgccgccgcctgcaccccgtgctgcatctccgtacggcatcgacttccatgctggcaccgccggcgccgtctcaggacggttcacgaatggctacaaccttgccgatttagtcgcgcgacgtctggggttcaagatgagtccaccttcttacctctcgttgacaccggtatcaaagtttgacctgttcacgtgccgaattggtgccaattacgcgtctggtggatctggcattctcaacaccacgggaaacgggacactcacgctgcagaaacaaatcacgctgttctccaaaactaaagcaagaatgtcgtgggcccgctgcaagctcaggtctatggtatcgaggtccttgtttcttgtcagcgccggcggcaatgacttctccgccttcagtgaaatgggcaagggcgaacaagacgccccagcctacatcagtagcatggtctcaacctatgtccagcatatcgacgcgttgtacaagttgggagcacggaggttggggatcctagacgtgccagcgatcggctgtaccccaggctccagagtccccatggccaacggcggatgcaacgacgctgccaactctatggcgcagaacttcaacaaactcctaaggctcgaggtggcgaaagccgtcgcatcctccatgcctggcatgagatactccatagcaagcacctacaattttctcaccgacttgatagacagccatctagtggctgggctccgggtggtcgacagggcatgctgcggatcgggaaaactgaacgccgcggtcatgtgcgcccagccaaacacgacttactgttcggatcgcgacgactacatgttctgggacatgctacatcctacgcaggcaacaaatgaacgtggggtggtcgccatcttctacggcccgcaggagtacgcggatcccatcaactttgcacagttggccgctgccacagcaaatgatgatgatgatataaatactgctatggccgcaggcgtctatgccgccatatgataaacactatttatgtcgattggcatgcagctgcgacatgtcactacctgagtgctatatacgtaattcagttggaataatgtacgttgtgtgcatcatcagtctctctatatatatgctggaaataaaatgaggacaagagaccgcagtgttaatat

SEQ ID NO: 35213 - DNA, 1207 bp, Zea mays subsp. mexicana
  Clone ID: UC-ZMFLTEOSINTE46A01_FLI
cctctctctcctcggccctgctctgctctactctactcactcccccaactgccagcagccagccgaatcctctctctatctctctcctcttcttcctccgtataccgagctcagccgagcatctcctccattccccaagcacacaagagatggttgtgccagaggtgaacaaggaggtgctcacggaccttgagggcatgggtttctcgacagcgcgtgccactagggcgcttcacttctctggtaatagcaccattgaatgtgctattaactggctttctgagcaccaagaggacgcagatattgatgagatgcctctggtaccagctaactcaaaaacggaggttaacaagcccagcctgactcctgaagaaatgaagattaaagcacaggagctaagggagcgtgctcgtaagaagaaagaggaagaagagagaagaatggaaagagaaagtaagaaggaaagagtacgaatcggaaaagaacttcttgaagccaaaagaattgaggaacaaaatgaaaggaaacgcatgatagaattgcgaagacttgagaaagaggaggagaaaagagctagagaaaaaatccgccagaaattagaagaagataaggctgaaaggagaaggaaactaggattgccaccagaagacccagcagctgccaaaccaagtgcaccacctcctgttgaagagaagaagagtgcattacctgtcaggccagccacaaaggcagagaggatgagggactgtctaagaaatctcaagcaacagaataaggatgatgatgccaaagtgaagagggcattccaaacactgcttacttacattggaaacgttgctaaaaatcctgacgaggagaaatttagaaagatcaggctgacgaatgcaacatttcaggagagggttggaaatctgcatgggggcatagagttcctggagctctgcggatttgagaaacttgaaggcgacgagttcttgtttttggcaagggaaaaagtcgacagggctatcctgaacacagctggagccgagctgaattctgccatcaccaatcctttcttcggagtcctttgaatcgtaaaaggctacaatgtatactcaaaactctcgggttctcctttgcttgacatcaattgtgccccaactgtagatttccaaatctgtggtcagtctcagattccatgaattattatcagatcggattccgt

SEQ ID NO: 35214 - DNA, 1554 bp, Zea mays subsp. mexicana
  Clone ID: UC-ZMFLTEOSINTE46B01_FLI
tccgccgtcgatggagttctggggtctcgaggtcaaacctggatccactgtcaagtgtgagcctggacatggctttatcctgcacgtttcccaggctgcccttggggaatcaaagaaaagtgacagtgccttaatgtatgtcaaagttgatgacaagaagcttgccattggaacactctctatcgacaaatacccacagatacaattcgatttggttttcaataaagagtttgagctgtcacacacatcgaaaactaccagtgtatttttctctggttacaaggttgagcagccaattgagggagatgaaatggatcttgattctgaggatgaagagaaggttataaaatatctctaagcattgattcattgttgtagccatggtccattcatcgccagaaggaaaaatcttttcataccttcggcgatctttagacctgagcctcacaatatatcatggtagtacagtatatcatttagcatcatataagttgagttccatctgttgaaacatctttgcgctgttatatagcttccctcgcttctatcttaactccccaagcaatttccatttccaccgcaaccagtctcttcctcgcagctcgcaccaacccgccgccgtctacttactgccactccgcctcctcatggcctcccctacggcagatgggtttatctgaggagcagcagaagcaagctctcgagcttcggagcatgacaaatggtggcaaagaatcccttgaagaaaccgaaacagacggtgcttcttgtaaccctgcagcaactggtggatgctgccaaggcaatggtggcttcactcgagctttggagcagcagaagcaagctctcgagcttcggagcatgacaaatggtggcaaagaatcccttgaagaaaccgaaacagacggtgcttcttgtaaccctgcagcaactggtggatgctgccaaggcaatggtggcttcacttgctgccatcctgacctgccaaaggaaaaacgggacaagagcatcgcaattgagcagaaccctaagagctgtgaggagaatggcaaggatggtggtgctggcagcaagaaggggaattcaaagacttgcccgatgcccacctggtttgagacctgggagagagctgacacctatgctgctcttgctgttgtcgcagctgccgcagctgtgtttatctctttcagaatctacaagaacctcaactgaagagcttgagagatctttgaagaggtgcccgaaacaagtctaggtgaatcagcgtactggtggtaaaacaatccgggacgagaataatctttacctgtgtatagtaatgtgaggtttagaacctcaaagtagcttatctggagatggtgataaaaaggtgttgtggctacggtgttttcgcgtgtgaacgtccactgctatcgaagtttggatgccttagctgctggtaatcgtaaggcatcaagtaagcaacattcactgtgatgatgttgtcttttgtttgggtttttggatgttctggagattctaggttttgaaacaatatcaggttgattgaaaaac

SEQ ID NO: 35215 - DNA, 1675 bp, Zea mays subsp. mexicana
  Clone ID: UC-ZMFLTEOSINTE46C02_FLI
tgttcttgggcgtacgcggacacagccccgatccgaatcgtcctcctcgcgagcctcgtcgatcccccactcccctcccctcgcttcaagatgcagatctttgtgaagaccctcaccggcaagactatcaccctcgaggtggagtcttctgacaccattgacaatgtcaaggctaagatccaggacaaggagggcatccctcctgaccagcagcggcttatcttcgccggcaagcagcttgaggacggccgcacacttgctgactacaacatccagaaggagtcaacccttcatttggtgctgcgccttaggggaggcatgcagatctttgtcaagaccttgactggcaagacaatcacccttgaggtggagtcctcagacaccattgataatgtcaaggctaagatccaggacaaggagggcatccctcctgaccagcagcggcttatcttcgccggcaagcagcttgaggacggacgaacacttgctgactacaacatccagaaggagtcgaccctccacttggtgctgcgccttaggggaggcatgcagatctttgtcaagaccttgactggcaagacaatcacccttgaggtggagtcctcagacaccattgacaatgtcaaggcaaagatccaggacaaggagggcatcccaccggaccagcaacgtctcatctttgccggcaagcagttggaggatgggaggacccttgctgactacaacatccagaaggagagcaccctccacttggtgctgcgtcttaggggtggtatgcagatctttgtgaaaacccttactggcaagaccatcactcttgaggtggagtcttcagataccattgacaatgtcaaggccaagatccaggacaaggagggcatcccgccggaccagcagcgtcttatatttgccggcaagcagctggaggatggacgcacccttgcggattacaacattcagaaggagagcaccctccacctggtgctgcgcctcaggggaggaatgcagatcttcgtgaagacattgaccggcaagaccatcaccttggaggttgagagctccgacaccattgataatgtgaaggccaagatccaggacaaggagggtatccccccggaccagcagcggctgatcttcgccggcaagcagctggaggatggtcgcaccttggctgactacaacatccagaaggagagcacccttcatttggtgctccgcctgaggggcggtatgcagatctttgtgaagaccttgactggcaagaccataaccctggaggttgagagctctgacaccatcgacaacgtgaaggctaagatccaggacaaggaggggattcccccagaccagcagcgcctgatcttcgccggcaagcagctggaggatggtcgcacccttgcagactacaatatccagaaggagagcaccctccacctggtgctccgtcttcgcggtggttattgagccatcagtcgttgaagctgctgctgtatctgggttatctagtgtctctgccattgcccatggatggtgctgtctttcaaagtatttgtatggtttgtgtcgtgagtcgtgactgagctggtttcatggaccagttgtgttctcgttacccaaaactatcgtgcgaccgcatatggcttaatcatgaataaatgttgtttgaatttaaact

SEQ ID NO: 35216 - DNA, 1353 bp, Zea mays subsp. mexicana
  Clone ID: UC-ZMFLTEOSINTE46C07_FLI
gttctgttgaagatgcttctaaagcactggagtattgtagcactgatggaaggccttcgatgaaatgtttccctaaaagttgcatactacatcgctgaagcactacaatattgtaacactgagggaaggcctttgtatcatgacctaaattcatatagggccctctttgatgaggaggagcactaccttttgccagttgcttgcaagaatgtaattggaatccgatgtgcttcatggcgcatcgtatcctccattgagtatagggaagaaggttgtgtcaacatggactgtgccactctcatcgaggactaccataacaagattgaagttgaactcaacaagatctgtgttggaatcctcaagctcttttcccaccttcccccctcattaatagtttcaaagtccaaggtcttctacctcaagatgaagggtgattactatagttccttgcggagtttgaaacttgatctaggagaaaagatgcagccaagaataccatggtggcacgcaaagttgctcagatattgctttggagttggctcccctatcctattaggctttggctgatgcttaacctctcaactctcctgatcttgctcgtggtctccccaaacaggcaaagccaacgaatgaaagggactcactcgcagcaacaaccaaaaaattgacatggtggtaggaaaaagacaatggtcagcaacttactcggagcagaaaatttttaattgtggtacccgtggtgctgtggttggcaatgcagtgatgcttagtgaaatcataaactacgtgcagtccctacaatgacaagttgagtttgtgttcatgaaactggccaccgtgaatccccaggtggacttaaatagcctgcctaacgtcctccctaaagatgtacatcagtcttgtggcccgccacatttctcgctggagaccttaggcgctccgttgtcgtacctcagccagcctcaccatggaagccctcttggctgcatggacaaccagagttgtatgcacccacttgacacgacgttttgcttggcgataaatccgcagtatcatttcctcaacggtgttagcgatgcatcgtctcagctaatttgatgcttgtgtttgtggaaaccaagaggtggtgttgattcattggaaacatggttgtgtatgaatgagtttccagctacttctattgttggagatagaaaccaacatgtttggtttttgtttttattcgctttagaacaactcatttttgtacagaaagaggcatttagctataattgtttgttgtagtatgtttaccgcaggatagccggttccatgaaatacataaaaaattgatattgttgctgtatttggttt

SEQ ID NO: 35217 - DNA, 2244 bp, Zea mays subsp. mexicana
  Clone ID: UC-ZMFLTEOSINTE46D01_FLI
ggaaggatcggcattgaggcaggcgtccggagatggaccgtcggagctggctgtggcggcgcaagtcgacggacaagagccccgcagagacggagacctcggcgtcctcggcgtccgagaggatcactgatgaacaggatactgccaagagctccccaaactcgactcagtcgccggaggtcacatcgaaggaactggaggacggtaacgatgtgaaggtgaaggtattgagtgagaggctctcatccgtagttctggatatccgtgcgaaggatgatctcgtgaagcagcattccaaggttgcagaggaggctgttctaggatgggagaaggccgagacagagatcgcgtcactgaaggcgcagttgaacgctgcggcggccaagaactctgcgctggaggaccgcctcgtccacctggacggcgccctcaaggaatgcgtccggcagctccggtgcgccaaggacgagcaggaccagacggtgcagggcgcgctggcacagcaagcgcggcagtgggagtcgcacaaggccgacctcgaccagttcaggatcgacaggagcggcgcgagcagcagggccgccagcctcgcgaccgcggacatcggcgtgatggacgacttcctcgagatggagaagctcgcctctgcgtcgaaaggcgacgccgtcgaggacgcgagcgggcaggtgctcaggctcgaggagaaggtcaagaagctggcagccgagaaggccgagcgggagaaggcgctgcacgaggctcagcgcgagatgaggacttcccgccagcgggtaatggtggcagaggagagatcagctgagctacagcggcagctgaaccttgccaatggcgagaaacatgccatgggggccgaggtgaaagcggctgaggcgaagagaggagagctggagggccagctcgagctcgcccacgccgagatcgcggggttgctggacaaggggcgcatcctggaggaacgtctcgagtctgagaaggcgctgacacttgagctcgcagccaagtaccaggacatggaggcgctgagggcagagaagagggagctgagcgctcagctggagacgtcacggtccgaagccaagaagctcggtgacaagatcgccctgatggagaggaagctggaggtggagaaggccttgtcgatccgactggcgacgaaatgccatggcattgatgctctggaagcaaagaagaagggcgtcgagctcgagctggagacggcgcgcgaggaaatcgcttcgctgcaaaacaaggctagcagcttggaactgcgacgagtcgaggaagagaaagcgtcgtctgctgcactcgcactgcggtgccaagaactggatgagcttagatcccagctggagtcttcgaattcacggatcgttgagctgaatgagaaggttaaaacgctcgaggatgtagtcgaggaacagaggtcagtgacggtggaattggagtctcagctccggtcgaggcgcgctgaaatcagtagcctgaaggaggatataagcctgttgcagaagaagctggagagccagaagaacctgtcatcagcttacatatctgcacttggtgcttctgaaaccgagaagaaggagctggctagtcggtttgagctcggagagaaagaagccgaggaattacgtgggaagatgagcttgcttgaggaacagatccgtaaagagagggcacggtcatccgagtttgcggtaaaatgtcagaagatggaggaacagatctcctgcagatctcttcttggccaccaaccagtgaaatcatctgcggcgataaaagatcttcagctcagaaaggagacagagctggccaaggctgcagagaaactggccgactgccagaagacgatagcttcactgagcagccagctgaaatcgttggctgatttcgacgaattcccccctgaaactgagaccagtggcgctgactcagacgacgcctgggacagcgatctgaagcttctccaacccgcaagctatcccacgcagattggctgtttggcagtcacatgattcacgatcctcgttggcaagtggatagcgaaactgtttttgcttggcttccgccgcatgattgctgtgatgagattgccctgatgttccaccacatgtcatatagagttaagttaataggtgagcaaatgttcatatggaagctgtttatagagttgtttggtgaagcctcaaagggactcatattgaatattatctttgatcttcc

SEQ ID NO: 35218 - DNA, 1185 bp, Zea mays subsp. mexicana
  Clone ID: UC-ZMFLTEOSINTE78E02_FLI
gccatttttattttatcagttgtctactcacatttttagacttgaactgcaattccattgcatcaatgcaaactgcttctggtgcttgtaccatatcatggtcagtgcagacatagctgctttgtttggatggaattctgatatcaagcacaaagaatgttgttggcatggtcatatccaagtaccctcagtgcataactgaagctccatgcggcagaaaattctgacatgagcagaataaattgatgtatatgtaccttttggaatggctggagttatattggctgcagcactctaatatttttatctatcattgttaccttacagcctatggaaatttatgttgatgatgaggctaaactgacccttcatggtctagttcagcactatatcaaattaagtgaggcagagaagaaccgaaagttgaacgatcttttagatgcactcgacttcaaccaagttgtgatatttgttaaaagtgttagtagagctgcagaactcaacaaattgctctgcgagtgcaatttcccctcaatctgtatacattctggaatgacacaggaagagaggttgacacggtacaagaacttcaaggaaggacacaagaggattcttgtggctactgatttggttggtaggggaatcgacattgagcgtgtcaacattgtcgtgaactatgatatgcctgattccgctgatacatacctgcatagggttggtcgggctggacgttttggtaccaagggacttgcaataacatttgtttcttcttcatctgattctgatgttctcaatcaagtgcaggagaggtttgaggttgacataaaggagctgccggagcagattgacacgtcgacatacatgccatcttgatgatcgaggtgaaccagcgtttagtttgagctggaaaggagagcttgtttgaaatatacaccttagatcgctgttggacaaccttagcaccttgtttgaaagatgttccatttgtacttaaccagcagtctagtggattaagcagtaggcgtcgcaacagctgttacatgctacctaggattttatttgcaactctgtaatgttttctatgctccgactgctaattgttctgtttgagactgccctctgggtgcatgttttactagtaaattactcgcaccatgcgcgagtcttcggagcatgtgtttacat

SEQ ID NO: 35219 - DNA, 1633 bp, Zea mays subsp. mexicana
  Clone ID: UC-ZMFLTEOSINTE94B09_FLI
cagaccgggagtagccgacgcgccgtcactgaatcctcagatcacggctagccgtaatcacgccactctgctgactcccggcgagccatgggcaaggagaagactcacatcaacattgtggtcattggacatgtcgactctggcaagtcgaccaccactggccacctgatctacaagctcggcggtattgacaagcgtgtgattgagaggttcgagaaagaggccgcggagatgaacaagcggtcattcaagtatgcctgggtgcttgacaagctcaaggccgagcgtgagagaggtatcacaattgatattgctttgtggaagttcgagaccaccaagtactactgcactgtcattgatgcccctggacaccgtgacttcatcaagaatatgattactggcacttcccaagctgactgcgctgttcttatcattgactccaccactggtggttttgaggctggtatctccaaggatggacagacccgtgagcatgctctccttgctttcacgcttggagtgaagcagatgatttgctgttgcaacaagatggatgccaccacacccaagtactccaaggcccgttatgatgagattgtgaaggaagtctcttcctacctgaagaaggttggatacaaccctgacaagatccacttcgttcccatctctggtttcgaaggtgacaacatgattgagaggtccaccaaccttgactggtacaagggcccaaccctacttgaggctttggacttgatcaacgagccgaagaggccttcagacaagcccctgcgtctccccctacaggatgtgtacaagattggcggtattggaactgttcctgttgggcgtgttgagactggtatcatcaagcctggtatggttgttacctttggtcctagtggccttactactgaggtgaagtctgttgaaatgcaccatgaggctctccaggaggccctacctggtgacaatgttggcttcaatgttaagaatgttgctgtgaaggatctgaagcgtgggtatgtggcctccaactccaaggatgaccctgccaaggaggctgctagcttcacatcccaggtcatcatcatgaaccaccctgggcagattggcaacggctatgccccagtgctggactgccacacctcgcacattgctgtcaagtttgcagagctcattaccaagattgataggcggtctggcaaggagcttgagaaggagcccaaatttctcaagaatggtgatgctggtatggtgaagatggttcccactaagcccatggtagttgagaccttctctgaatatcctcctcttggtcgctttgctgtccgtgacatgaggcaaacggtggctgtcggagtcatcaagagtgtggagaagaaggatccaactggagccaaggtgaccaaggctgccgcaaagaagaaatgatgtgtctggctggttctgtgtttgcttgagggatacctagtggaaacataaaatatctcgtcttgttcacgtcattgtctgaacctatgctcgcaacgtttgcctggtcgatttagaactgttattttcgttaaaaccagagtgttatttaagatctatccgaacatctggtgagccatatatggttactagttttgttact

SEQ ID NO: 35220 - DNA, 1844 bp, Zea mays subsp. mexicana
  Clone ID: UC-ZMFLTEOSINTE94D04_FLI
cacacacacaaccagatctcccccaaatccacccgtcggcacctccgcttcaagatgcagatctttgtgaaaaccctgactggcaagactatcaccctcgaggtggagtcgtctgacaccattgacaacgttaaggccaagatccaggacaaggagggcatccccccagaccagcagcggctcatcttcgctggcaaacagcttgaggacgggcgcacgcttgctgactacaacatccagaaggagagcaccctccaccttgtgctccgcctcaggggaggcatgcagatctttgtgaagaccctgaccggcaagactatcaccctcgaggtggagtcttcagacaccattgacaacgtcaaggccaagatccaggacaaggagggcatccctccagaccagcagcggctcatctttgctgggaagcagcttgaggacgggcgcacgcttgccgactacaacatccagaaggagagcaccctccacttggtgctgcgcctcaggggaggcatgcagatcttcgtgaagaccctgaccggcaagactatcacccttgaggtggagtcttcagacaccatcgacaacgtcaaggccaagatccaggacaaggagggcattcccccagaccagcagcggctcatctttgctgggaagcagcttgaggacgggcgcacgcttgccgactacaacatccagaaggagagcaccctccacttggtgctgcgcctcaggggaggcatgcagatcttcgtgaagaccctgaccggcaagactatcaccctcgaggtggagtcttcagacaccatcgacaacgtcaaggccaagatccaggacaaggagggaatcccaccggaccagcagcgtttgatcttcgctggcaagcagctggaggatggccgcacccttgcggattacaacatccagaaggagagcaccctccacctggtgctccgtctcaggggtggcatgcagatctttgtgaagacactcactggcaagacaatcacccttgaggtggagtcttcggataccattgacaatgtcaaggccaagatccaggacaaggagggcatcccaccggaccagcagcgcctcatcttcgccggcaagcagctggaggatggccgcaccctggcggattacaacatccagaaggagagcactctccacctggtgctccgcctaaggggtggcatgcagatttttgtgaagacattgactggcaagaccatcaccttggaggtggagagctctgacaccattgacaatgtgaaggccaagatccaggacaaggaaggcattcccccagaccagcagcgtctgatctttgcgggcaagcagctggaggatggccgcaccctcgcggactacaacatccagaaggagagcacccttcaccttgttctccgcctcaggggtggtatgcagatctttgtgaagaccctgactggaaaaaccataaccctggaggttgagagctcggacaccatcgacaatgtgaaggcgaagatccaggacaaggagggcatccccccggaccagcagcgtctgatcttcgccggcaaacagctggaggatggccgcaccctagcagactacaacatccaaaaggagagcaccctccaccttgtgctccgtctccgtggtggtcagtaagtcatgagtcgtttaagctgccgatgtgcctgcgtcgtctggtgccctctccatgtggaggttgtcgaagtatctgccgttcgtgtcatgagtcgtgtcagtgttggtttaataatggaccggttgtgttgtgtgtgcgtactacccagaactatgacaaatcatgaataagtttgatgtttgaaatt

SEQ ID NO: 35221 - DNA, 607 bp, Zea mays
  Clone ID: UC-ZMROB73001E12_FLI
cggagcccctgtccgtgttcgtcaactcgtacggcaccggcacgatccccgacaaggagatcctcaagatcgtgaaggagaacttcgacttcaggcccgggatgatcagcatcaacctcgacctgaagaagggcggcaacaggttcatcaagaccgccgcctacggccacttcggccgtgacgacgccgacttcacctgggaggtggtgaagcccctcaagttcgacaaggcatcggcttaaggttgggagtgtcactgtggacatgaggactaccttcctctggctctgctgttacctgcaagcattgctgctgctggatgtgtgtgtttgatcagtgactggctgctgctccatagaagatgaacggagagaaggatgatgaagggctttggcaatcgccgctgcaactgcaacccatgccatgccggcttagtgattgggtataatttggcttggcagcagccagcattattatgtgctgatctgttatcttttactagtttggtcgtccgatatctttctttctttttccccccttttcgactctgtactgaaactgctgagagattcgcagtattgttgtatcgtattcatatgctactgtt

SEQ ID NO: 35222 - DNA, 1698 bp, Zea mays
  Clone ID: UC-ZMROB73005E02_FLI
ccccaaagccgagagccatcccgcccgcagccgcaaccaggcaagcaagcgggagccgccaactcgtgcctctcggcagcggcgtctgaactctgaaccgaccgaccgaccgaccgttccgttccgttcaccccaccatggaggcgccgccgggaccggggcccatggagctggacgccccacctcccgccgccgccgccgcggcgattcctcccgccggcagcgacaagcacaaggacggggaagggggagacgctgtgacgggccatatcatctccaccaccatcggcgggaagaacggcgagcccaagcggaccatcagttacatggcagaacgtgtcgtgggcacaggctcatttgggatcgtcttccaggctaagtgtctggaaacaggagagaccttcgccatcaagaaggtgctgcaagatcggcgttacaagaaccgggagctgcaacttatgcgtgccatggagcaccccaacgtcatctgcctgaagcactgcttcttctcgacaacgagcagggacgaattgtttttaaaccttgtcatggaattcgtccctgagactctataccgagtcctgaagcactacagcaatgcgaaccagaggatgcctcttatctacgtcaagctctacatgtatcagctttttagaggcctagcttatattcataatgtaccaggagtctgccatagggatgtgaagccacaaaacgttttggttgatcctctcacccaccaggtcaagctctgtgactttggtagtgcaaaagttctgattcctggtgaaccgaacatatcttacatatgctctcgttactatcgtgcccctgagctcatatttggtgcgacggagtatacaagttcaatagacatatggtcagctggttgtgttctagctgagttgcttcttggacagccactatttccaggagagagcgctgttgatcagttggtagagatcatcaaggttcttggtactccaacccgtgaggagatacggtgcatgaatcccaactatactgagttcaggtttcctcagataaaggctcatccatggcacaagattttccacaagagaatgcctcctgaagccatagaccttgcttctcgtctccttcagtattcaccaagtcttcgctgctctgctcttgacgcatgtgctcatcccttcttcgatgagctgcggacaccgaacgcacgcctaccaaacggccgcccgttccctccgctctttaacttcaagcacgaactagcaaatgcctctccggacctcgtcagcaggcttgtgccggagcacattagacggcagatcggtgtcaacttcgggagcagctaggagggcaggcgctgtgatggtcgaagttttcggtcttggtttccccttctggagagtgggaggggctcaagcagtacctgagaaaagtagtgaaaccgtgtaaattatctgaccgtgaaggagtactaccgccagtaactggcgcatgttcgtccagtagttatggtaagaatgtaggaggtggagactggttaatgtgtagggtcgttttttttgttttgttttgatattactaccattttgttgtaatgttcgtcggtacttccagcagtagtgtagctggccacgttttgttcgtccgccatgatgtaaatgatcatcgcccaactgtaatgcatgttctctctgatcgtttcgt

SEQ ID NO: 35223 - DNA, 1505 bp, Zea mays
  Clone ID: UC-ZMROB73006A02_FLI
ctttacccaaccaaccaccgcactggtacgctctcgactctcgacaccggcagcagcaggaggtggagctagggcatgtgatcggactccttgcctgcttcctgatctcaacctcttttcaccagcgcgagggcggcgcggtctcaagccgggatggggtatctgccggcgctgggcgggaaggcggcccacctggtgaacgacctcgccactgtcatcctgaaccccgtctccgagcgcgagcgccagccacaccaccccacccacctcccggaggccactgaaggagaagacacactattcgttgacgatgattctgaccaaaattctgatggtcctgacacatcttcattcagagcatttctgatgtcctttgtgccttcctcaactgccagcaagaattcaatggagaccatacctgagcataatctagatgtggaatacccaactttaacacctgttgggaaggcgtgcagtgggaggaaaggcctgtttagtagagggaagcattcccttggtaggattattagcaaagcaggacttggtaatttgagacagaaacagacccacagcattgatggtgaaatcataggccaaaccgaatcagttgcacctagatttgaagtgaagggttcaaaagaatcaactttgcacgataaattgccagctatgtctgaaccttctcttcttctgacagaaatgatgcgagctgttctttatacatctcttcctgtacttgttcaaggaaggaactggatgctggtatatagcacctggaggcatggaatatctttgtctactctgtatcgaagaagcaggctttgtgctggctactcacttttgatagttggggatcgaagaggggcagtttttggtggcttggtcgaggccccactgcaacctatcgtaaaaaggaagtatcagggaactaatgactgctttgtgttcaccaacgtagatggttgtcctgttatatgccatccaacaggtgctaataactattttacattttgctctaccgattatatggcaatgggaggtggtggtcacttcgcactttatctcgatggagaccttatgactggttctagctccacctccgagacttttaacaacccatgcttatcccatacccaggaattcaaaatcaaagatgtcgagctgtggggtttcgtcaatgcttccaagtttgaagagatgctcatgatctgccgcaccgaaaagcaaggaatttggaacctgtgaccgtttggagttcactgagctgttgcttgttggtgtcaaccgatcctctgatgtggcttgtactgttgtacagttttgtagtaaacgtttgtatagcatgtagagagtttccatatggaatcagaagttgagaacatgtagagttttgctttgtagaataccaaatgccatttacagagaaaataccagtcactaacactcaaatgtatatatttcatagaaactaagaatgccctgcctacgttgcagatggaagtttt

SEQ ID NO: 35224 - DNA, 1656 bp, Zea mays
  Clone ID: UC-ZMROB73006G09_FLI
cagagacaggcgtcttcgtactcgcctatctccgcgactcaaagctttccccaattcccccccttctcccatttctcaccaccgccgccgctccccccgttcaacaacaccatgagggagtgcatctcgatccacatcggccaggctggtatccaggtcggaaacgcgtgctgggagctgtactgcctcgagcatggcattcaggctgatggccagatgcccggtgacaagaccattgggggaggtgatgatgctttcaacaccttcttcagtgagactggcgctgggaagcacgtcccccgtgctgtttttgttgaccttgagcccactgtcatcgatgaggtgaggactggcacctaccgccagctcttccatcctgagcagctcatcagtggcaaggaggatgcagccaacaacttcgctcgtggtcactacaccattggcaaggagattgttgacctgtgccttgaccgcatcaggaagcttgcagataattgcactggtctccagggcttcctcgtcttcaacgctgttggtggaggaacgggctctgggcttggttctctcctcctggagcgcctgtctgttgactatggcaagaagtccaagctcggtttcaccgtgtacccatccccccaggtgtccacatccgtggttgagccatacaacagtgtcctgtccacccactctctcctcgagcacactgatgttgctgtcctgctcgacaatgaggccatctatgacatctgccgccgctcccttgacattgagcgcccaacctacaccaacctcaacaggcttgtctcccaggtcatctcatccctgacggcttccctgaggttcgatggtgctctgaacgttgatgtgaacgagttccagaccaacctggtgccctacccgaggatccacttcatgctttcgtcctacgctccagtcatttctgctgagaaggcctaccacgagcagctgtccgtggctgaaatcaccaacagcgccttcgagccatcctccatgatggccaagtgcgacccccgccatggcaagtacatggcatgctgcctcatgtaccgtggtgatgtggttcccaaggacgtgaacgctgctgtggccacaatcaagaccaagcgcaccatccagttcgtggactggtgcccgactggcttcaagtgcggaatcaactaccagcctcccagcgtcgtcccaggcggtgatctggccaaggtgcagcgtgccgtgtgtatgatctccaactccaccagtgttgtggaggtcttctcccgcattgaccacaagttcgacctcatgtacgccaagcgcgccttcgtgcactggtacgtcggtgagggtatggaggagggcgagttctccgaggctcgtgaggatctggcggcgcttgagaaggactacgaggaggtcggtgctgagtttgacgagggtgaggacggcgacgagggtgacgagtactagacgctctactggcgcggcgtcgtcgggcttgtgtgccactgctatcctgtgatctgccctgagtggctcctatcgtgttatgtttctgtcggttcttatctatctgtcgttgtgtggtttacaacttacgttgtaagactttattcccccgctttgctactgggttattaagtttggcgttattgtttt

SEQ ID NO: 35225 - DNA, 1784 bp, Zea mays
  Clone ID: UC-ZMROB73006G11_FLI
cttttccccagctccctctcgtctcgcggccgccgcaggcgaaaccccctcatcgcttcgcgctgtccaccgacgaatcttccccagctgagttaatcggggactggtcgtgtgcggagatgttggtgctcttcgagacccccgcggggttcgccctattcaaggtgctcgacgaggggaagctcgacaaggtcgaggatctatggaaggagttcacgacgtcggactcagcgagaaaggtggtcgagctgaaggctttcaacaagtttgagaacacatctgatgccctatccgcggcaaccctgattattgatagcaagcctagcaagggtctgcgcaagttcttgcagaaacattgtgagggtgaaacattagcagtagctgattctaagcttggaaatgctataaaagaaaagctgaaaattgactgccttcacaatagtgctgtgatggagctgatgagaggactgagaaatcagcttaccgagcttataactgggttgggtgcacaagaccttggtccaatgagcttgggattgtcccacagcttgtctaggtataagctgaagttcagccctgagaaggttgatacaatgatcattcaagccattggattattggatgatcttgacaaggagcttaacacttatgccatgagagttcgtgaatggtatggctggcactttccagagctcaccaaaatagttacagataatatacagtatgccaaagttgtgaagatgatgggcaacagagttaatgcagtcaaccttgacttctctgagatattgtcagatgaagagctagaaacacagctaaaggaggcagcagtaatatccatgggaacagaagttagtgaccttgacttatcgaatatcagagagctatgtgatcaagtgctggccctttctgagtacagagcccagctgtatgactatttaagaagcaggatgaacactattgcaccaaatttgacagcactggtgggtgaattagttggtgctcgccttattgcacatggtggaagtttgttaaatttggccaagcagcctggtagcacaattcagatacttggtgcagagaaggctttattcagagctctaaagacaaagcattctacacctaagtatggcctcatctaccatgcatccttaattggcaaggcttctcaaaagcacaagggaaaaatctctcgttctcttgctgcaaaaacagctcttgctatccggtatgatgcccttggtgatggtgaggacaactccattggcactgagagtcgacttaagcttgagacacggcttcaagttcttgagggtagagaacttgggaaatctgctggttccacaaaggggaagcccaagatagaagtgtatgaaaaggaccggaagaagggtactggggctttaacaactcctgctaagacatataaccctgcagctgatctggtactcacggaagaaacaccaaagaagtcagaattggcttcaaagaagaggaaacataatgaggtggaaactgaaccattagcagagcctgcagaggaagcaatccaggaggatggtgaccaggaggatcggaagaagaagaagaaaaagaacaaggaaagcaaggaggctcctgctggtgaaggtgatggtgagaagaaaaagaaaaagaagtctaaggaggtcgaggaagagcctgttgtggctgctgcttcagaagttaagaagaagaaaaagaagtctgacgctgatggtgaggatgtcgcaatgcaaaccgaagaatcaggtaagaaagagaag

SEQ ID NO: 35226 - DNA, 2178 bp, Zea mays
  Clone ID: UC-ZMROB73013G08_FLI
cgaaggcgcatgggcagaggacgggaagaagcccagcatctgggacacatacacgcacagtggatattcgattgaccgtgatactggagatgtggctgcggaccagtatcaccattacaaggaagatgtgaagctaatgcatgacatgggcttggacgcgtacaggttctcgattgcctggtcaaggcttattccagatgggcgtggagctgtgaacccaaaggggttggagtactacaacagcctcatagatgagctcctcagatatggaatacagccgcacgtgaccatctatcacttcgaccttccccaggctctccaggatgaatacaacggcctgctcagtccgagaatcatcgatgattttaccgcttacgcagacgtgtgcttccggagcttcggcgacagggtgaagcactggatcacggtgaacgagcccaacatcgagcccatcggcggctacgaccaaggctacctcccgccgcgccgctgctcctacccgtttggactgggcgtcacctgcacccacggcaactccacgacggagccgtacgccgtcgcccaccacctcctgctcgcgcatgcgtcggctgtgtccctctacagacgcaagtaccagggcgagcaaggaggacggattggactgacgttgctggcctggtggtatgagccagcgacgcagaagcccgaggatgtagaagcagctgccagagcaaatgacttctcgcttggatggttcatgcatcccctggtgtacggcgactatccgcccgtgatgaagaggaacgtgggggcaaggctgccgtcgctgacggcccgagactcggccatggtgcgcggctcgctcgatttcgttgggatcaaccagtacggcgcgatcctggtcgaagcagacctgggccagctcgatcgggacctcagagactactacggcgacatggctaccaacttcgtcacggtaccgtttgagagcacagtaacgaggaaccagcaggtgcctcgacttgggctgcggaaccatgaggcgccgtgggctctgagcaaattgctggaacacctgcagacgcactacgggaaccctccggtgatgatccacgagaacggagctgggcacgagcccgacccgtccggcgggttcctgtacgacgacgagttcagggcccatttcctgcgggtctacgtcgaggcggcgctcgcttccgtccggaacggctccgacctgcgcggctacttcgtctggtccttcatggacgtgttcgagtttctcttctcctacaggttccgcttcggtctctacggcgtggacttcgccgccgacaaccggacgaggtacgctcggcgctccgcgcgatggtacgccggcttcctccgcggcggagaaaaaaaacaaaaactaaaaaataaattttttttatttattaatattatttttttttttttttaattattaataataattaaaaaatatattaaataaaaaatttatcattataaaaattaaaataaaataaaaataaaaaaactaaaataaactaattaaaacataaatcaaaaaaaaaaaaaaaaaatatttaaaattcactaaacttaaacaaatttatataactttaaattccccgactttaactgcttcattaaaatattttcatattataaatatattaacatctttttatatatttgctcatagatgtcacctttgtaaaatatttataggcttatatatatatccatgattcaagttcaaaatcttatactgcaaaagtctgttccgctttatgtataaactaactcaaatttcattgcttttctgttattaatcaatttttaagagagagatttttctttaaatatttatattgattaaagaatttcgttaataaaaaactctctctattgatctccaaagaattagtttttttcaaactgatactttcagaaattaatatactttatcaatgatctaataaattaaataagatggttaatctatttttattatgttactataaaatatttatactgaatacaatacagattttaaaaagcttgtatgcattattggtatttatttctacttacatatcaaatctttaccttgttcacaaagacttatttattccgttgttactaatctaggatgaaaatagaagtataattataaaattaaattaaatg

SEQ ID NO: 35227 - DNA, 1027 bp, Zea mays
  Clone ID: UC-ZMROB73013H09_FLI
ggctcaacgaacccagaaaatcttctccggggtactgttcagggtggcaacagtaatcattatcaatctcagtttggaaggcactcaagtgacatggagtttgatgatcctgctatattagccatgggcaaagggctgatgcctggaattggcgattcagggctggagatgaaaaatactcctgcttttcaagcacagttgcaaccagcaagtagtgatccaagatttcagttacatgtacagccaaatgtgcagtctcgtcaaaacatgagattcacagaccctatgcaagatggtttgaaccatatgaacgataattacctggcatccagatttttagctcagaaccagggtcctctatctccttatgtgcagattccgcaacaacccagaaactcgcaggttataaatggtcactgggacgggtggagtgatttgagacaagggaataacgctcctatgtcagacatgtccaggatattatatccaagtgaagtgaacaagttgcatatgctgggttcaaatgatgtccataacagagcctttggaatgtgatcgtctcctgggataatgtgcgactttgagctgacatgttcaacttggggcgttttgtgcaagtaactggttgcacaacacatagtatacctgaggtggttaatggtgttgtgctcatgagctggcacacgactatttattgctgttggagttgaccaaaatgaaccttagttttggtccatccatttggaattaccaggttcattctcgtctatgatttgtgaagcttgaatgaaaagaaagattacgtgcctgagaagaacaaggcagctgaagttgaaatagatagagatatgtctattatgggatgtggtgtgacttgcgagcgaaagagatgaagaagattaggtgggcttggcttgatggcagcttgttttttcttgtgtcttgtacatgatgatattggtcggtggttgtatatgacttgtgatcgacggtggctgcattaacctgtagtggttgcccttgctcc

SEQ ID NO: 35228 - DNA, 1068 bp, Zea mays
  Clone ID: UC-ZMROB73014A03_FLI
tttcaaacactttgatattctgcaatgtcctccagaccaccattaccttgaaaacatagcccagggcacgggtggaagaaagtgggtaaaaaaagtacagcaggaatggagcatacttgagaagaacctaccagactatatttatgtcagagtctttgaggatcgcatggatctcttgagagccgtgattgttggagcaagtggaacaccctaccaagatggcctgttcttctttgatttctaccttccacctgagtatccgcaagttcctccgtcagcatactaccattctggtggtttgcgtgtaaatccaaacctgtatgtggatggaaaggtttgcttaagtctcttaaatacttggaccggcagagggaacgaagtgtgggacccatcatcatcaagtattctacaagtactggtttcacttcagggattggttctcaatgaaaaaccctattttaatgaggctgggtacgagaagcaagttggtactgttgaaggggagaagaatgcagtgccgtataatgagaatacgtacctgctgagcgtgaaatccatgctgtatatattgagacggcctcctttgcattttgaggattttgtgaagagccatttccgcaagcgtggccactacatccttaaagcctgtgaggcatatttgcaaggaaatgttgttggcactctcactgacgacgcatgcaccaccaacagaagcacggagcactcgagctctgtcggcttcaagcttgcactagcaaagattttaccaaggttgattacagccctgaaggagcatggagctgattgcgaccaatacgagcaccttggcaaaacagaccccgttagagagagctgatcattgagtgacttgtacttggatcttttgccttttatatctgttcttttttcgggtttcagaaaagatggtgacttaataccaccaggctgttttcgtataaatgtacattcaaagtttgttgtttccgtcaaacatttggaaaatatggccccaaatgatttattcgatacatggaaccgagctaccctgtgcagttgatgtttccgttg

SEQ ID NO: 35229 - DNA, 1879 bp, Zea mays
  Clone ID: UC-ZMROB73014A05_FLI
cggcggcggctctgcactgccgcgcggacgccgcgcgcctctgcgtcgcgtgcgaccgccacgtgcacgccgccaacgcgctttcgcggaagcacgtgcgggcgccgctctgcgcagggtgcgccgcgcgcccggccgccgcgcgcgtctccctcggcgccgacccggcgttcctctgcgcggactgctgcgagggctgcgccgccgcttccgcggcgcgcgtgtcggttgagggcttctcggggtgcccctcggcggccgagctcgccgcgtcatgggggctcgacctccgccgcgcggccgtggccgtgggcgacgacggcgacggcggcgacgacgacgaccccttcctctcggtgctcgactactccgtgctgggggtgggggtggccgacacggacctgcgcgacctctacgtgccgtgcgacccaccgcgggtgcccgtccccgacgccggcgcgcgcccgctcaggggcgaggcgctgtgcgaccagctcgcggagatggcgcggcgcgacgaggcggacacgtcccacgcgcacccgcactcggatctgagcccgcgcacgcctcgccgcacctccgcggcttccagcggacgcctgccgtcgggcaagatggcgccccccgcggcgctgccggtgccggctcatcctcctcccgccgcgccgcaggaggtgcctctgccgtacacgtccctgctcatgatggcgtccgccaactgcagcgacctcattggcggcggcgaccgggtgggtgataccgacgaacaactgctctgggactgcgctgcgccctcggtgccgcccacccagatatgggacttcaatttaggacggtcaaggcatcacgatgagaaatctgctcttgaagttggatacggttctaaccatggcggctttatgattaagagttacagtgacatgcttaaggacatttcttcggggacaacgaaagatctggaagatatttatgactcaagatactgctcaaccgccgaagatatcatgtcctctaatatctgtcagttgtcatcgaaaaatgtgagcaccgggagcaacaaacggaaggtgaggtcatgtgctgcgtcgacgatggatggaccaacgacctccgggaaccacaaccacgtacccgcttcagcttcaggtccaggagcagcgctcaccagggagatctccttcggggatcagacggtgtccgcccccgcggccgagaccgagaggcctgccgccgtgaggatcgacagcgagacgcttgcgcagaacagggacagcgccatgcagcggtacagggagaagaagaagaaccgcaggcacggatccatgagctgatcttgatgacccttacctacctagcttgcctgctgcgacttgtgcggtattaagaataggctgttacatgttgtgtcccatcatatcgttcgtgtccgcaggtacgagaagcacatccggtacgagtcgaggaagctgcgggcggacacgaggaagcgggtgaaagggcggttcgtcaagtcgaccgaagcactcaacgccgccagatacaacggatgaggcagccatatatatatatatatatgcatggcctgcgggcggatgagtttgctgcgcgcctgcgttattacgtgcggtagttacctcacggagaggtaggtactgctacctggaggtgctacgtatgtatggcgcggccggaatcgctacgcacgcggcccaagtttaattttgcgttgaagctatagcgatcgtggccattgttgggcagtcaactccagagattgcacggtactgcttgtttgtaacagacgaccctccctttcccctttttttctctgttgttgccgtcatccccaccagaacagaaagtatgtagcttacct

SEQ ID NO: 35230 - DNA, 1949 bp, Zea mays
  Clone ID: UC-ZMROB73014A06_FLI
cccatttcttgtgtcagtctccctctccctctctccgatcctctctactagcagagaggcaagttcaatcttctagctagcagcatcggagaaggcagagctcgactgacacaatggcgggaggccagctcaacgtgctgaccacactcgaccaggccaagacacaatggtaccatttcatggcgatcgtcatcgccggcatggggttcttcaccgacgcatacgatttgttctgtatcgcgctcgtgaccaagctcctcggccgcatctactactccgaccccacctccaaggaccccggcagcctcccgcccaacgtgtcggccgccgtgaccggcgtcgccctctgcggcacgctggcgggacagctcttcttcggctggctcggcgacaagctcggccgcaagagcgtctacggcttcaccctcatcctcatggtgctctgctccgtcgcgtccggcctctcgttcgggcatacgcccaagggcgtcatcgccacgctctgcttcttccgcttctggctcggcttcggcatcggcggcgactacccgctgagcgccaccatcatgtccgagtacgccaacaagaagacccgcggcgccttcatcgccgccgtgttcgccatgcaggggttcggcatcctcttcggcaccatcgtggcgctcgccgtctcggcggcgttccggaacgcgttcccggccccgccctacttcgtggacgcccaggcgtcgctcgtcccggaggccgactatgtctggcgcgtcatcctcatgttcggcaccgtcccggccgcgctcacctactactggcgcatgaagatgcccgagacggcgcggtacacggcgctcatcgcccgcaacacgaagcaggccacggccgacatggccaaggtgctcaagaaggagatcgagaaagaggatgagcaggtggagcgccaggtggtcggcgccgacacatggggcctcttctcggcgcagttcctccggcgccatggcctccacctgttggccaccagcagcacgtggttcctgctggacatcgccttctacagccagaacctcttccagaaggacatcttcaccaaggtcgggtggataccgccggcgaggaccatgaacgccatcgaggaggtgtaccgcatctcgcgcgcccaggcgctgatcgcgctctgcggcaccatcccgggctactggttcaccgtcggcctcatcgacatcgtgggcaggttctggatccagatcatgggcttcttcatgatgaccgtgttcatgctcgcgctcggggtgccgtacgagcactggaccaaggcgtccaaccacaccggcttcgtcgtcctctacgggctcaccttcttcttcgcaaacttcgggcccaacagcaccaccttcatcgtgccggccgagatcttcccggcgaggctccggtccacgtgccacggcatatcggcagcggccggcaaggccggcgccatcatcggcgcgttcgggttcctgtacgcggcgcaggaccccaagaagcccgaccatggctactcgccgggcatcggcatccgcaacacgctcttcgtgctcgccggaaccaacttcctgggcatgctcatgtcggtgttcgtgccggagtccaagggcatgtcgcttgaggagatctccaaggagaacgtggatgatgaagctgaggccgaagtgtagagagaccgtctgcacctctgcgtgcagatgcacatgtgaattgtgttgtgatgcaccgatggtgttgtgtggttttgcttgtgtcactgtatctgcgcatacgctacgaataaccgtatctggctggctggctggccatgctcgcgcgtgcgtgtctgggtgctcgtgtgcagcaaatcaatcagccgctgtgtgatttgctaccttttgatattgttgctgattatgtaataattcaaaactattatgggtaatttctcg

SEQ ID NO: 35231 - DNA, 1614 bp, Zea mays
  Clone ID: UC-ZMROB73028H06_FLI
ctaactgctcacagtcccagtcacaatggaagaaagggaaattgctagggagtggtacatttggtcaggtttaccttggatttaacagtgaaaatgggcagttttgtgcgattaaggaggttcaagttattatggatgatccacattcgaaggaacgactcaaacaattaaaccaggaaatagatatgcttagacaactctcccacccaaacatagtgcagtaccatggaagtgagctgagtgatgaatcactttccatttgtcttgagtatgtttcggggggttcaatccacaaattattaagagaatatggctcttttaaggaacctgtgattcgtaattacactgggcaaattcttgctggccttgcctacttacatgggcggaacactgtccacagagatatcaaaggagcaaacatactcgtgggtcctaatggtgaagtcaagctggctgactttggcatggctaagcatatatcatcttttgctgaaatacgttctttcaaaggaagtccttactggatggctcctgaggttataatgaactgtaaaggctacagtttatcagtggacatatggagtctgggctgtaccattattgaaatggcgacggcaagacctccttggcaccaatacgagggggtagcagcaatatttaagatcgcaaacagtaaagatatacctgaaatcccagacagtttctcagaggaagggaaaagtttcttgcagctttgcttgaaacgtaaccctgcatctcgtgcttctgcagtccagctgatggatcatccttttgttcaggatcaccctgcagtgagagctgcaaaatccagtgtattgagaaacacaccatcttctccagcagatggcagacacacaatgtccaacagggagttgccatctcggaaaattataactcctctgaaggatattggactgggcatgagagattttactggattttccactactgttccttcaccacacagtcctattcctggaagagcaaacatgtctacgccagtttcaccatgctcaagcccgctgcggcagtttaagcaatccaatgtgaggggcatgcgttctccacctcatccaatgctctcccctggtcttggcaacacagtaagttacacccaaaatcagacaagacgcaatccagctcctgccatttcagatccttggatggatgttggccagatgaaactccaaagccccaatatttcccccagaaggttctgagaacgatttaaatataaaaaaagagaatcatgggcgcaatatatccatgacaagttagttattaagagatgttcagtaaggaacttgtttgtgtagttactacaatacgacactcaccagagattcagtacagcgaaatggggctcttgagaatttgtaacaggaagttctgtatatccttaggttttaaggtttgttgtcgcccttgctatatgtagttatacgtgtacacgtcctgatgtaaaggttcacaaaaaatcttacagatgaccacgggatgtaaattcgaaagtttgtgcaaactggtatttctgtgtagtagttaggacttccatggcagaagtaactatgcacttccgattgaatcgagtac

SEQ ID NO: 35232 - DNA, 1362 bp, Zea mays subsp. mexicana
  Clone ID: UC-ZMFLTEOSINTE47A08_FLI
caggttttcttgttccatcgtcagcgccacacgtctatacgggagacgagagatggaaggaggggaagaggtggagaaagagggcaacatgtcgcagttggctggcgttcagtttcttctctcgaacgaaggaaaggaagtacctctgtcatccatcgaagacaggacggcctgcctctgcctcttcttctcggctcactggtgcaggccatgcaggagcttcaccccgactctactccaggcctacacggcgctccggagcgccggcaagagcgtcgagataatcttcgtgtcgctggaccgcgacgaggccagcttccgggaccacttccagggcatgccgtggctcgcggtaccgttcgacgctgctggcctactacggcagaagctgtgcgcgcgcttcgccatcgagcgtatcccggcgctgatccctctgtccgcgtcagcgacgccgtccagcgggctggggtgtggagaggacgcggtgaggctggttggcgagtatggagtagatgcgtacccgttcagtgcgcagaggaggagggagctggagagcatggacgatgccaggagagaaggaggccggcttcaggagcttcttggctgcgaggagagagactatgtcatcagtgcagatgacataaagattcctatagctgaccttgctggcaagacagtcggcctgtacttcggagcacactggtgcccaccttgccatgtcttcaccaaacagctcaaggaggggtacaacgagctgaaaatcttgagaccgggaagcttcgaggtcatcttcgtttcgatagaccgcagcaagggggaattccaagcaagcatgagctccatgccatggcttgccatcccttattctgacgctgcaaggaaaaggcttacaagaatcttctctgtcaagggtatcccaggactcctgatacttggtctggacggtaaagctctaaaaacagatggcaggacagcgatatcagcctacggggcagcagcattcccgttcacggaatctagagtttctgaagtgggtgaagcgctcaaaagggaaggagacaagctgcctcgccgagtgaatgatccaaggcacagacacatgcttgagttggacatggctaaggcctatgtttgtgatgaatgccaacagaaggggaggtattgggtgttctcttgtaagcagtacaactttgatcttcatccctcttgtgtaggagataataaagtagacaacatctaaaatatgtatatacttaaaagtgtgaagttctagcatcaaagtggactagaaaaatgtttatattgtactctaaactctataggactcggtgagagtaatgggcaaagagtcttagttccttg

SEQ ID NO: 35233 - DNA, 1172 bp, Zea mays subsp. mexicana
  Clone ID: UC-ZMFLTEOSINTE47A09_FLI
cttgcaagtatagtctctctgctaagcgaagcgaagcgaagcttcaagctagtctcggcggctctagaagacgatgggcaaggacgacgtgatcgagagcggcgctggcggcggcgagttcgctgccaaggactacacggaccctcccccggcgccgctgatcgacgcggcggagctggggtcctggtcgctgtaccgcgccgtgatcgccgagttcatcgccacgctgctgttcctgtacatcacggtggccaccgtgatcgggtacaagcaccagacggacgcgtcggcgtcgggcgccgacgcggcgtgcggcggcgtgggggtgctgggcatcgcctgggccttcggcggcatgatcttcgtcctcgtctactgcaccgccggcatctcggggggccacatcaaccccgccgtcaccttcggcctcttcctggcgcgcaaggtctccctggtgcgcgcgctgctctacatcgtggcgcagtgcctcggcgccatctgcggcgtcggcctcgtcaaggcgttccagagcgcctacttcgacaggtacggcggcggcgccaactcgctcgcctccggctactcccgcggcaccggcctcggcgccgagatcatcggcaccttcgtgctcgtctacaccgtcttctccgccaccgaccccaagcgcaacgcccgcgactcccacgtcccggttctggctcccctccccatcggcttcgccgtgttcatggtgcacctggccaccatccccgtcaccggcaccggcatcaacccggccaggagcctgggcgccgccgtcatctacaacaaggacaagccctgggacgaccactggatcttctgggtgggccccctcgtgggcgctgccatcgcggccttctaccaccagtacatcctccgggctggcgccatcaaggccctcggctccttcaggagcaacgcgtgatgagcggggcttggctgtggagcaatggcgggcgacctacgggcggggggccgtgagcgaggagaatgccatcattcatcgatcgacttgggtgccggtggttggttcgggtcgccttattttgtttcagcagctgctgcgttgcgcgcgtgcgtgagatttggtttggtttcgttcccctgcaatgtaatcatgtcgtgactctctcaagggattattccgctct

SEQ ID NO: 35234 - DNA, 1973 bp, Zea mays subsp. mexicana
  Clone ID: UC-ZMFLTEOSINTE47A11_FLI
cgccgcctgaaccctttggattccctcccctggaattcgaaaaacggcgactgctcccctagagcagatccatctagactcgagtacatccgagggggaagcgagcagatcgatggcggtggctgagaaggtgaaggagaagatgctaatgctccgcagcagcgacaaccaggagttcgaggtgaaggagtcggtggcgatgcaatcgatgaccctcaagaaaatgatcgaggacggctgcgccgacaaaggcatcccgctccccaacgtcacctcccacatcctcgtcaaggtcatcgagtattgcaacaagcacgccgagccgaccgggccgggcgacgcggccggcaccaccaacaggtccgccgaggatgagctcaagatcttcgacgcagacttcgtcaatgtagagcactccaccctcttggacctcatcctggctgcaaactacctggacatcaaggggcttctgaacctggcccgccagaccattacagacttgatcaatgggaagatgcctgaggaggtctgcaagaccaacatcaggaacgacttgaccatcccttccacgtcggccttggccaccacaatgccctcctccgagcgaaagcagatggaggccaggtttatcgcctatatgcaagaaactgctgaggagaggatgactgggtttgctgttcgtggtgaaaaatacagaaagcatggtgaacgtccgccacaaccaccattggagatagttaaatacccagctcttttggaaagagcttggggatgggattcgatactgccatactgtcctgtgaattcttggcccctatacaagacttacctccaggaatattatgagcgcaattctcgtgaagtattggctcatcaagtggaagccaatgctgcctctggtcccaatctcaacggggctgatgagaatgatctggcaactctgttcaacttgtgtatcagtagggaggttcaacttttgaatctgctgaagcgccgtgataaaaaatacaatgttgatgagatcagcctgaatgaaaagctcaccaactgtgcccgtcagataacttttgtggaatatactggttttcctttccccagtgttgccttgaagtgcatcatggcggagtctgatctgttgcgcaagttgctgatgtgtgggactggaatgatatcccaagttaacatctgctccagaattcgaaaggtggccttcagatttatgacctacaaaggacctggatgttttgctgctgctgccaccatgatggccaccacaaaggaggccaagttgatgagtggactgctgaggaacagatgtagggaaaataatggtccattttataggagtgtctttatcaggaaatggacctttgcagctatgttcagaatatgtgaggaatgttctcctgtggaagagtctacagggggctacactgctactaaattgatacttgatggatctgatgacaataatccttgtgataaggacctgctgcagaggaacaagataaatcaaaaataccaaggactgttcaaaggaaaaacaactaaatgccgacaccctgtacaaaagcaagaaccaggagatggagggctctttgaaggagaatgtagtagaacaagtcaacacgaagttaatggatcataagaagcgtagaaccaagcttgaacactattcctccttagggtttgatgaaacaacattgctgctcaataaagaaaaggagcaaggcaaaacacacacaagggttagtggaaaagcagatggcaataaagcaaagtcagcagaacttgtgagccttggtaacgaaaaggagcaacgaagaaatcacacgaaagttagtggaaaactggataatacggcaaagtccgcgagagtttcggctacctgcgttgcgtacttagtgtcttatgatggctttgcctggttgaacttttatgaaatgcttgtcttggtgagcttcatgcgactt

SEQ ID NO: 35235 - DNA, 938 bp, Zea mays subsp. mexicana
  Clone ID: UC-ZMFLTEOSINTE47C02_FLI
ttttccttcacgaaaacagagcaaatccggcgagccggtgcggcggagggagacgcctgctcgagaaggaggattagcaggaggcagcggagatggatccggacgcagtgaagtcgacgctctctaaccttgccttcggcaacgtcatcgccgccgccgcccgcgacctccagaaggaaatggtggctaaagacaaggctcaagcagcacctgcaagccatgatgaagttgatcttgatgagttgatggatgaccctgaacttgagaagttgcacgcggagagaattgctgcccttaagaaagaggttgagaagcgtgaagtgctaaaaaggcaaggtcacggtgaatacagggaggtaattgaaggggacttccttggggaggttactggcagtgaaagagtcatatgtcatttctatcaccgtgaattttaccgttgcaagatcatggataagcatttgaaggcccttgctcctgtctacgtgggaacaaaattcatcaagcttgatgctgaaaatgctccattctttgtagccaaactggcaatcaaaaccttgccatgtgtaatattgttcaagaagggtattgctgttgaccggttagttgggtttcaagatctcggaagtaaagacgatttttcaacaagagcgttggaaaacattctcaagatgaaagggataatcgatgagaagaagaaagatgacgacgatgatgatgaagaaagcgagtctaagaataggaggattagatcttcaactgctcaagattctgactcggactgaacatgagatggggattgaggattcaccctttttgcacttcatattttgtctgttctgtactgcaattgatttgtgcgacccatgtatctataccagatacccagaacaaaagcatgtacaagagattcttaacttatctaacttatgaacacgttc

SEQ ID NO: 35236 - DNA, 1136 bp, Zea mays subsp. mexicana
  Clone ID: UC-ZMFLTEOSINTE47G03_FLI
tgatgagtgatgaccctaccagaaatcgacccgatacggctccagcgccagatcgtccatcaatagcccgaatcacactcatcacaagcctcaaacttttccaaaccaatttagatgcggcgtgagtgctaaagcgctctctggactctgtttcgcagtggccgcagctgcagcgtcccttccctttttgccatccagcatcacctgtgccgccggcgcgtaattgcaccgcggtcactggttagtaggaagaagggaaggaggaggggggagcggtgtcggggtatcgtctcgtgcccatgggcgtgcacgccaggtcgatgagctggtacatggggtcgccggcgccggggagcgccgccgagggcgaggggcagcgcgcgctgagaagcagctccggtggcagcgacggcagcttcgacaccaacatggtcatcatcctcgccgcgctgctgttcgcgctcctcttcgcgatgggcctcaactcgctcgcgcgctgcctcatccgctgggcacgccgcgcgccggccggggaggacggcggcgcaggcgggctcaagaagcgcgcgctccggagcatccccgtcgaggtgtacggcgcgtgcggcgccgacggggcggcggctgtcgccgccgacgtctgcgccatctgcctcggcgagttcgcggacggcgagaaggtgcgcgtgctgccgcgctgcgcccacggcttccacgtccgctgcgtcgacacctggctcctgtcgcacgactcctgccccacgtgccggggctccgtgctcgacggcgcaaaggccgccgcctctgctcccgccgccgggggcaaccggcggcagggaagcgaggctgctgccatcgcaattgtcattggatgacgtggacgtgtgggggcccgcgtgcccactggtggtggagccacacggtatgcgagactagcttcgttccgtggtagtgagatattttgctgtgatgagaagccgacgagtcgcggcggcccatctctcagtcaagactacagcattctccttcggtctgtacttgtgcatggtcgtcgcagctgatcctgtttgtgtatactaggagtggatgacggggtatgccgctataggcttgcaataatacagttttgtttgtac

SEQ ID NO: 35237 - DNA, 2290 bp, Zea mays subsp. mexicana
  Clone ID: UC-ZMFLTEOSINTE47H05_FLI
ctgctccaccctcgccgctactagaccagaccacggaggaggagacgaagcgccatgaggcggggagccaccaaggacgacgccgcgcccgacaaggtcatgggccctctcttcccccgcctccacgtcaacgacaccctaaagggcggacctcgcgcgccgcccaggaacaagatggcgctctacgagcagttcagcgtcccctcccaccgctacagcgccgcggtgccgcccgcgccttccccggcgcctccatggggcgcgcaacgacccgcctccgcggttccgtccacgtccgccagccaggttggcggcggcgatagacctatcttcccattatttcgtgtgccttcaactgaacctgttcgatcatcagatcagacgaatgccaactccaatggccaggctgccaatggtacaatagctgaatcttggaggcagaggcaatccacacatcttaagagcaaggatactaatgctgcaggaccacctgccgagggtaataattccgttgggaagaaattggctaatgatgatgattttacagttccctctgtcttgtattctggaatgcctccgcattccagccaagaaaagctcactctcttccctaccacaagcccatgtaagagtgtgcctgcaaaatattctagcactgacaagagacgcttagaaggaatggatgcttctgatgtgaaatcgaagggtccctcaggtatcaaggagaaagagccagtacaagtgaggatagacttggaagacaaagagacaactccgtcatttcaagtgctaaacgacaaaacatggagtccagacccaaagttatcttcgcacatggacaggctgaagaagcaacatgctgaagctgagagttatcagataaggaccaggaatgagaatgctgttgagacccaaagccctccaaaaaatggagtgtcgttgttgtctaagccatatgttgatagggaacagaatggtgattctgatctattggggcatggcctaagagagacaggtgagaagaggaaaagatcacatcatgacgtggagcaaaacgatgatctgtctgattcctctgttgaatctttacctggaatggagatttctccagatgatgttgtcagtgctattggtcccaagcatttttggaaagcgagaagagctattgtcaagtaagtatacaaaacttgagttcatgttcttggtgtttttacctattattgaacgtcctgtgtgagcataccatctcggcgactcctgtaatcagatagtgtttacactcgcttttgtttaacgtgcatacagtcagcagagggtatttgctgttcaagtattcgagctgcataggttgatcaaagtgcagaagttgatcgctgcatctccacatgtacttattgagggggatccttgccttggcaaatccttggcggtgagcaagaaaaggctggctggagatgtggaaacgcagcttgaatcagctaagaacgatgatggcgtgcgaccaaagcagctagagcactcgaaagagaagactgaggcgaaccaaccttcaccatctcaagacgaacaggccgcaactaatggtgctgttgctgcctcgatgcataccccttccgacaacaaacagaagagctggtgcattcctgcacctccaagtcagtggctgattcctgttatgtcaccgtctgaaggacttgtctacaaaccttataccgggcactgccctccggtgggaagtcttttggcgcccccattttttgccagctaccccacctcctcctcctccacagctgggggggatttcatgagttcggcatgtggagctaggctgatgagtgcccctgtgtacttcccgtctttcagcatgcctgcagtgtcagggtctgcagttgagcaagtgagccatgttgcagcgtcgcagcataaacggaactcgtgtagtgaagcggtgttggcatcaagggacagcgaggtgcaaggcagtagtgctagcagtccggcatcttctgaaacagcagctcaacccagggtcattagggttgttccccacacggcacgcacggcttcagagtcggcagcaaggattttccgctcaatacagatggagaggaaacaaaacgacccgtgactggcagataaaaatgaaagaacggagggagtagagtaattttttgaccgataattataatgatcgccgtaaattggctggcccgcccgccttatgttttttgttcagtgtaaatatgctgcgtctgtcagaatgatatggcatctatagctattttggttc

SEQ ID NO: 35238 - DNA, 1976 bp, Zea mays subsp. mexicana
  Clone ID: UC-ZMFLTEOSINTE49D02_FLI
cgtgaatctccttcaactttgattcgagatcaacaaaatccacaggaatatatctatcttctccgccggagcctgggaggtcgcaacaatatggaagcaaccgacgaggagaacgctctgcttcttcgtctccatcccactccgcaggtcgtagcttcggagtacgcaagtgatggttcagttgatatcaacaaacaacctgctctcaagcacagaacgggtaactggagggcatgctaccccgtcttaggtgttggattcagtgaaggcatggtgttctctgcaatcgcgacgaatttagtgacgtatctcaccactgtgctccacgagagcaaggtggatgcagcgagaaatatctccgcctggtccggagtgtgcttcctcacgccacttcttggggctttcgttgcggacagttacttgggaagatactggaccattgttgtggtcctcccggtttacatcgtggcaatgctcgtcctgatagcttcagcatcactcccggtgttgttccagagcgacgttcaccctgcagtggtttaccttggtctctaccttgccgccattgccagcggtggcgtgaagccctgcatttctgccttcggggctgatcaatttgacagcagtgacccggcggagctggtgaagaagggctccttcttcaactggtacttcttcctgacgaccatcagctccctgctgtctggcaccgtgattgtttggctgcaggacaatgttgggtgggcagtcagctacgtgatcccgaccgtgctcatgctcatctgtttccccgcatttttagctggctccagggtgtacaggtttagggaaatgggagtaagccccattacgagcttacttcaagtggttgttgcagctgtcaggaagtggaacgccaaactgccggacgatagctcgctgctatatgagcaggccagttcaccttgtacgactgaagcaagtcataagaacaagcataccaatcagttcaggttctttgacaaggccgccattgtcccaccaggcgacgaatccacggtgcagacgagtccatggaggctctgcacagtgacacaggtcgaggagataaagatgctgctctcgacgctgcctacctgggcgtcgttcgtgattttctacgcagtcacgtctcagatgcagtcgacgatgattgagcaaggcatgctcatggacaaccacgttggctcgtttgccatcccgccggcatccatgccgatcattggtgtgctcagcttcctcatctgggtcgccgcctatgaaaccgtcctagcgccattggcgcggcgcttcaccggaaacgagaaaggcttctcccagtggcagcgcctcgccatcggccaagccctgtccattctgacaatggcgcttgctgcgctggtggagacaaggaggctggcgatcgcggaagccagcgggctgaggcatcgggaggtgccggtgcccatgagcatcctgtggcagggcccagttttctttgtgcatggtgcggccgaggtcttcggtgccatcggcatgacagagttcttctacgaccaagccccggcgaccatgaagagcctgtgcgccgcgttcgggcagcttgcggtggcttccgggtcgtacctcaacacggccgtgctcagcgtcgttgcattggccacaacgcgcggcggcgcaaccggatggatttcagacaacctcaatgaaggccatcttgactatttcttctggatgatggccgctcttagcttgctgaacctagctctgtttgtgcgctactcaatgaggcatacagacaggcaacgtaagcaagaccttggtttatcataatttcaggaaaaatatgaacaaagcagactagaagctatatggacagactactcatgaatagtaacattgtatgaaaaagctaagtgcaagtgacaacttatttaatataggatcttttgagaagtctctttagaaggttatttaag

SEQ ID NO: 35239 - DNA, 782 bp, Zea mays subsp. mexicana
  Clone ID: UC-ZMFLTEOSINTE49D07_FLI
aggaagatggggctcgcgttcgggaagctcttcagccggctcttcgccaagaaggagatgcggatcctcatggttggcctcgacgccgccggtaaaaccaccatcctctacaagctcaagctcggcgagatcgtcaccaccatccccaccatcggtttcaatgttgaaactgttgagtacaagaacattagcttcactgtctgggatgtcgggggtcaggacaagattagacctctttggaggcattacttccagaacacccagggtcttatctttgttgtggacagcaatgaccgtgaccgtgttgttgaagccagagatgagctccacaggatgctgaacgaggatgagctacgtgatgctgtgctgcttgtttttgccaacaagcaagatcttcccaatgccatgaatgctgctgagattactgacaagcttggattacactccctgcgccagcgacactggtacatccagagcacttgtgccacaactggcgagggtctgtatgagggcctggactggctgtccagcaacattgcgagcaaggcttgaggcctaccttgaatatcaactgcgaactgactaggagctccgggtgtatcatggaaactcaggacagaatcgcagttgcaacctgttagatgtcttctaccggcactatatatattttttgtttgatgtgtaatgatgttactgttcaacgcttattaccctactatactgttggatgttctttggacctgtttcatttcgcacaaggattggacttccaatatcatgct

SEQ ID NO: 35240 - DNA, 986 bp, Zea mays subsp. mexicana
  Clone ID: UC-ZMFLTEOSINTE49F10_FLI
accacgctctggaagctgtttcccctttctcgagagtttagaaagctggtgcagagatggccggggagagctgcgtccccaagcccctgttcggcggcgccatcttcaccaccttccccgaccgcttccaggacgtgagcaacatccgggaggtccccgaccatcaggaggttctcgttgatccatcccgcgacgagagcctcattttcgagctacttgacctcaagggcgaggtggacgacgccggcagcgcgctctggttcctgcaagacatcgccaacgagcaagacgccggggacaacttggtggtagagcattctgggacacttgaactggctgctttgcatctcggagaagctcctgcagtggctgcaactgcagttggccagctggccgtctcaaaagggaggcagggcagagaagcacaaaacattgttcgaatttacctggcaaacatacgccttaagaatgcggcaaccgatgtacttatcaccgcatatgagccattgttgataaaccccctgagtgaaagtgctgtggcagttgcagctggtccggcaatacctgctgaacaagtagggtgcttgccaatgtctgaggtcttcaaacttgcagtgacgaatttcaatgtgcgtgattggaaccttttcgatggtggcccttgaaccagagtggataatctctccaaaatcagatgtagagcatctggttgacatacggaagactactacctgttttctagatttacaattcattgtcagaaattatgctatctgacttaatcttccaaatactcctattgaacttacctctggaacattggctgagtttgtcatgatagattctactagtggattgtacgcagatggtctgtgtcgcttcatcggtaaagcaaactctgctcgttcctgttgaacacaggccatttaaatttagaaattagaattgatgctacgaaaaatccaatagtagcatgctttcagttt

SEQ ID NO: 35241 - DNA, 2323 bp, Zea mays subsp. mexicana
  Clone ID: UC-ZMFLTEOSINTE50H07_FLI
gggggaagctgcggccgacggccgagctcttgccgtccctatccacccctctcgccctcctctctgcctttcgctccgtccagccgccgcgtaaaatccgcggaaccagatgcccttatccgccctctgatcgaatccggcatcgccggcgaccttgatggcactggaggcgggtagcagcggcggcggcggcggcggatggggtggcgggttccgaagtctgatgcggcggaagcaggtggactccgatcgggtccgcgccgagggccagccgcagctcgccaaggagctcaacgtgccggagctggttgcgatcggggttggttccacagttggagcaggagtatatgttcttgttggaacagttgctagggagcacgctggtccagcattgacaatttcatttctgatagctggaatagcagccgcgctttcagctttctgttatgctgagcttgctagtcgttgcccctcagctggaagtgcttaccattattcatacatctgtgttggagaaggtgttgcctggttgattggctgggctctagtgctggaatatactattggtgggtctgctgttgcccgtggtatatctccaaatttagccttgttttttggaggacaggatagtgtgccatggattttagcacgccatcagcttccatggtttgatatcattgttgatccctgtgcagccgctcttgtttttgttgtcactgttttactatgcgtgggaattaaagagagttcatttgcacaaggagtcgtaacagttctcaatgcctgtgtaatgatatttgttattgtagctgggagttatattggcttccaaataggatgggtgggctacaaggtttctgacgggtatttcccacatggagtaaatggaatgcttgctggatcagcaactgtcttctttgcatacataggctttgatacagtcgctagtacagctgaagaggtaaagaatccacagagagatttgccattgggaattggggttgcattggctatttgttgtgcgttgtatatggctgtttctgttgttattgttgggctggtgccatatttcgccatggatccagatactcctatttcatctgcctttgcaaggcatggaatgcaatgggctatgtacgttgtgacaagtggtgctgttcttgcactctgctcgaccttgatgggctcacttcttccacagcctagaatacttatggccatggcacgagatggtctgttgccatccttcttctctgatgttaacaagcaaactcaagtacctgttaagagcacaattgtgactggcatctgtgcagctgctctggcttttgcaatggatgtttcacagttagcaggaatggtcagtgtaggcacactccttgcattcaccatagttgctgtctcgatcttgatactcagatatgtccctccatatgaggtccctttgccgccttctatgcaagaatcattccgtttgaaccaggaatgtgatgaggaaagggataggggtcttcttggagttgggaactgtaacttatctcagacaaaggatgtgattgtggcagtagaatcagtgaaggatcctctcattgataaaagactgcataaaggcaagatggatgagacgaagcgccgaaagatagcctctttaagcatagggtctgtgtgtgtaggggttctgatccttgcttcttcagcctctgccacatggttgccttttctcccgatatgtattggctgcaccattggagttgtgctccttctggctggcctcagcttgctctcctggatcgaccaagatgctggcaggcactcttttggtcattccggaggattcacatgcccttttgttccagtgctaccagttttgtgtatcctgataaatacgtatctgttaataaacctgagtggtgacacatggatgagagttggcatatggctgctgctgggtgttcttgtgtacgctttctacggacgaactcacagctccctaatagatgttgtctacgttccggcagcgcaagctgatgagatatacaggagttcatcaggatatgtatcatagaaaagaacagctgcagtcatgtgacacgatagagccacagaaagaccgagcggatgacagttacttaaaaggtggttgtccatcagctgtagaaaattggttatcagccggggaagacggaactgactgttatttctttcatgctcggctagcatgatctcagatatataacgcctgtttgtttcggcttttcgcagcttctggccaccaaaagctgctacggactaccaaacacttagctttttagtcagcttctat

SEQ ID NO: 35242 - DNA, 1855 bp, Zea mays subsp. mexicana
  Clone ID: UC-ZMFLTEOSINTE51A12_FLI
gtcggagcgcacacacacacaaccagatctcccccaaatccacccgtcggcacctccgcttcaagatgcagatctttgtgaaaaccctgactggcaagactatcaccctcgaggtggagtcgtctgacaccattgacaacgttaaggccaagatccaggacaaggagggcatccccccagaccagcagcggctcatcttcgctggcaaacagcttgaggacgggcgcacgcttgctgactacaacatccagaaggagagcaccctccaccttgtgctccgcctcaggggaggcatgcagatctttgtgaagaccctgaccggcaagactatcaccctcgaggtggagtcttcagacaccattgacaacgtcaaggccaagatccaggacaaggagggcatccctccagaccagcagcggctcatctttgctgggaagcagcttgaggacgggcgcacgcttgccgactacaacatccagaaggagagcaccctccacttggtgctgcgcctcaggggaggcatgcagatcttcgtgaagaccctgaccggcaagactatcacccttgaggtggagtcttcagacaccatcgacaacgtcaaggccaagatccaggacaaggagggcattcccccagaccagcagcggctcatctttgctgggaagcagcttgaggacgggcgcacgcttgccgactacaacatccagaaggagagcaccctccacttggtgctgcgcctcaggggaggcatgcagatcttcgtgaagaccctgaccggcaagactatcaccctcgaggtggagtcttcagacaccatcgacaacgtcaaggccaagatccaggacaaggagggaatcccaccggaccagcagcgtttgatcttcgctggcaagcagctggaggatggccgcacccttgcggattacaacatccagaaggagagcaccctccacctggtgctccgtctcaggggtggcatgcagatctttgtgaagacactcactggcaagacaatcacccttgaggtggagtcttcggataccattgacaatgtcaaggccaagatccaggacaaggagggcatcccaccggaccagcagcgcctcatcttcgccggcaagcagctggaggatggccgcaccctggcggattacaacatccagaaggagagcactctccacctggtgctccgcctaaggggtggcatgcagatttttgtgaagacattgactggcaagaccatcaccttggaggtggagagctctgacaccattgacaatgtgaaggccaagatccaggacaaggaaggcattcccccagaccagcagcgtctgatctttgcgggcaagcagctggaggatggccgcaccctcgcggactacaacatccagaaggagagcacccttcaccttgttctccgcctcaggggtggtatgcagatctttgtgaagaccctgactggaaaaaccataaccctggaggttgagagctcggacaccatcgacaatgtgaaggcgaagatccaggacaaggagggcatccccccggaccagcagcgtctgatcttcgccggcaaacagctggaggatggccgcaccctagcagactacaacatccaaaaggagagcaccctccaccttgtgctccgtctccgtggtggtcagtaagtcatgagtcgtttaagctgccgatgtgcctgcgtcgtctggtgccctctccatgtggaggttgtcgaagtatctgccgttcgtgtcatgagtcgtgtcagtgttggtttaataatggaccggttgtgttgtgtgtgcgtactacccagaactatgacaaatcatgaataagtttgatgtttgaaatt

SEQ ID NO: 35243 - DNA, 1348 bp, Zea mays subsp. mexicana
  Clone ID: UC-ZMFLTEOSINTE51B05_FLI
tcgcttctccaaggagaatgtcattggggaaggtggatatgggattgtttaccgaggtcgcctcgttaatgggaccgatgtcgcaattaaaaagctccttaataacatgggtcaggcagaaaaggagttcagggttgaggttgaggcaattgggcacgtcaggcataagaatcttgtacgccttctaggatactgtgtcgagggtatccacaggatgcttgtgtacgagtatgtgaataatgggaatttagaacagtggcttcatggtgcaatgcgtcagcacggtgttcttacttgggaggcccggatgaaagtcgttcttggaattgccaaggcgcttgcttatttacatgaagccatagaaccaaaagttgtacaccgtgatatcaaatcgagcaatatcttaattgatgaagaattcaatggcaagctttctgattttggactggccaagctcttgggtgctgggaagagccatatcacaacacgagttatgggcacattcgggtatgtggctcccgagtatgccaatacaggtctgttaaatgagaagagcgatgtctacagttttggggtgctactactggaagcagtgactgggagggatccagttgactatggtcggcctgctaatgaggttcatctggtggagtggctgaaaatgatggttggcactagaagagccgaggaggtggtggatcctgacatggagttgaaaccagcgattcgtgctctgaagcgtgctcttctagtggcactgcgatgtgtagacccagatgctgagaaaaggcccactatgggtcaggttgttcggatgctcgaggcagaagacgtgccttcacgggaggaccgccggagccggagaggccacagcagccacgcagacaacgagtccaaggcaagctcgagcgctccatcgacggggtgaccgacgcgaacggcacgtacacgatcgagctcaaggacagccacgaggaggacatctgcgaggtggtcttggtggagagcccgcgcaaggactgcgaccaggtgcaggcggacagggaccgcgccggcgtcctgctcaccaggaacgtcggcatcagcgacaacctgcgccccgccaacccgctcggctacttcaaggacgtgccgctgcccatctgcgcctcgctgctcaagcagttggactcggacgacgacgacgatcagtaatagcacatcgtcgacgaccgcagactggctggcactaaaccacaaatcctcttcacctggattacagatatgtaactgagaaaggaaaggaaaacaaaaatgtaactgcgtggctgtaccaaattctgagtgctggattcttgctattgtcacc

SEQ ID NO: 35244 - DNA, 721 bp, Zea mays subsp. mexicana
  Clone ID: UC-ZMFLTEOSINTE51B06_FLI
gcgagagaagtccgcttcatccgttcgccgcctcaaggacgagatggacacatcaagccctgcagcacttgtcaatgcacagatgctgaacatgtttgttgggcgaagagtgcgcacggttgttcaagtccaacacaatgaaggtggagtgcttgtcgggcagtccaccgatgggcatcagttgtgtgtcaaaagtgccatggacgtccccatatcacactttatggaggtttatggaattgctgaaaacagccagaccatccgtgctgaagtttgcacagattttggtcccaactttgatcccaaggtttttgatgagttgtgcaagctggcgagtggcaggttcaagcacctgttcctgtagagataatcatcgcatggaggatcttcagccaactgaagcttgtttgaaactgatatgtttcgcctttaaatttaagatttggctacatgttcgttcattgcatggaggaccttcagtaccctgttactcgtcagtattggacttctattagcatgcatgtataagcaacataggactgcgaatacaagcaaaatatatcatgtagttgaagaacctatggtctttttctacctttaggcaatccaaccctaagctttttatgttgctgtcgcttgcatttggaccctgagaagttgctacaattgtcatggagtttgatgagaggaaaaatgattctaatatgctagttacatgtcc

SEQ ID NO: 35245 - DNA, 1485 bp, Zea mays subsp. mexicana
  Clone ID: UC-ZMFLTEOSINTE51F04_FLI
caccccaccggcaccctcaccctcaggcctccgcctctttctcagcttctctccggttccttccttccggtcgccgattcttctacgcgaaagattcctggctgcctctcgtctctcgtctcgtttctcgcgtgcatggggctggacgtcggggagatcgggatgggcctggatctggggctggacctcaggctgttcgccgcgcggagcgccggagggatggccaagggcgctgcgccggcggggatccagtcctgcatcaggagcctcgaggtggagcgcaggaagatcgaggtgttcaggcgcgagctcccgctctgccttcgcctcctcgccgacgtgatcgacgagttgaaggaggaggctgccaagagaggagagtacgacgacggggcgacggtggtggacgacggcgacaaacggaaatggatgagcaccgctcagttgtgggtggacagcgacgccaaatcggacgagtctgacaaagagcaacagagtgaaatcacgtcgccgccggagcccaagttgttgggtggtggcgcacccacgccgataagggcggccggttcggcggtggcggtgccaccacccctaccgccgccgttgttcagaagagaagacagctccgccagctctggcctgtcgtcgttggtatcgtcgccggcaaccaaggcgcgcgcggtgccgatttctcctccggtggtggctgccagcggtactaccgccagcgccagattttgtggcaccaccatgccaccatgtggctccgaggtcatcaacatgcactcgcaggctcagcagcaagccagcaggaaggcaaggcggtgctggtcaccggagcttcaccggcggttcgttgccgctttgcacgaactcggtggccctcaagtggctactccgaaacagatcagggaggtgatgcaagtggacgggcttacaaacgatgaagtgaaaagccatctccagaagtaccggttgcacaacagaagatcctcccccggcgcggcggcggctccggtgagccagtcgatcatgctggtggatggcgtctgggctgctcaggagcaaagcagctcgcagtccgggtctcggcagggcccgctccagttctccaggccaggtgtggccgtcggtggcggcgacgacagcagcagcagcgacgacgaagacgacaacaagtcggaggatggctacagccgggaggctgcgtttgcggaaggtcggatgagagtgtagagagatagcgttgtcgcggcttgatcgagcatgcatcggtggattcttgagaccgagagagtggttgtagtgcagccaggcatgtatacagggagattgggcgcgcgcggccccgtgtgcgcccaagagatgaactgatcatgcggcgtttggaaagctgataggcgttttgtttgagtcgttgctgacttctgttaacttccgggcagatcacaaaatttttcgccctgagaataacttattaataat

SEQ ID NO: 35246 - DNA, 1749 bp, Zea mays subsp. mexicana
  Clone ID: UC-ZMFLTEOSINTE51H09_FLI
tcagctgctgcttttgtccaccaagcaacgattccctttccttccgccgcccaaatgccagtggccaccttcctcctcgtcgcgcttctctcgtgcggcgcacgagccatccggacgcacggcggctatgtctccgcggtcggggaccccggcatgcggcgcgacggcctccgcgtggcttgggaggcgtggaacttctgcaacgaggtcggccaggaggcccccggcatgggcagcccccgcggtgccgattgcttcgatcttctcgagacgagctccgacgaggaggggcggccggtgtactcggtggcgcacctggtgagcgacgccgacaaccgcctgggcgcgggcgacccgttcccggggtccccgccgggcgcggcccgcgtcacggacgccgacctctacgcgccggccaaggagctgtacctcggcgaccgctgccaggtggccgacaccccggcgccgtggcagttctggatggtcatgctcaagaacggcaacctcgacacaaccgccgccgcctgcccggagaacggccgccccgcgcgcccgttcccgcagacgtcccgcttcccgtgccccgccggcgccgggtgcatgaaccagccgctgctgttccacaaccgcaccgcgctggacgacgccggccgccggctccgcggcggcctgttcgggacctacgacctcgacgccgccgcgggtctcggcgctggcgacgtctccttctactccgtgacgtgggagaaggatgtggcggcgagcggtcgcggcggcgggtgggcattccaccacaagctgcgcacgtccaccaagtacccgtggctgatgctgtacctacggtccgacgccactaggggcttctccggcggttaccactacgacaccagaggcatgaccaagacagtgccggagtctccggacttcaaggtgcggctgaccctggacgtgaagcagggcggcgggcgcaacagccagttctacctgatggacatgggcagctgctggaagaacgacgggcgcgcctgcgacggcgacacggcgacggacgtgacgcggtacagcgagatgatcatcaacccggccacgccggcgtggtgctcgccgtcgcggatcgaccagtgcccgccgtggcacaccttccggaacggcagccgcgtgcaccgccgcgacggggcccgcttcccctacggcgcctaccacgtgtactgctcccccgggaacgcggcgcgcgcggagcagcccaccacctactgcgacgcctacagcaacccgcaggctcaggagatcctgcagctgctgccgcaccccgtgtggggcgagttcggctacccgacggccagggggcaggggtgggtcggcgaccccagggcgtgggacctcgacgtcggcgccatgtcccaggcgctctacttctaccaggaccccggcacgccaccggccaggaggcggtggacgtcgctcgacgtcggcacggagatatacgtcagcgacaaggccgaggaggcggagtggacgctcagtggcttcgacatccttgtgccggacaagtgtatcaagtcacagcaacgggccagcaacagctgctggtagacagacactttactgtcactgtacgttacgttgagtagcagtagcaggccagagtggtgtttggttccatgaaccactcactccatactagatgaggtggattatattcctcgtgttagtactaactaactataagaaataaaatgatgattgatc

SEQ ID NO: 35247 - DNA, 2327 bp, Zea mays subsp. mexicana
  Clone ID: UC-ZMFLTEOSINTE52A07_FLI
caagcgcgggcgccggcgtggccttgcgatggagagccccacgtcgacggcgtcgcgcccggacttctacgacttcctcgaccgcatgcgccgccccgccgccgccgacctcttccgctccatcaagagcttcctcgtttccttctccttccacgcgcccaacgccgaggaggacggcagcaaggtccaggccttcctcgcggagatggagagcgccatcagggaccacccgctctgggccaacgccaccgatcaggagatcgaccacgcgctcgagggcctggagaagtatgtcatgaccaaattgttcgaccgcacgtttgggacttccactgaggatgccgttaccgacatggacatctcggagaagattggtctcttgcagcagtttgttaagcctcatcacttggatatacccaaggtcctgcataacgaggcatcgtggctgcttgcagtgaaagagctgcagaagattaattcctttaaagcgccacgtgagaagcttctgtgcatcatgagctgctgtcaagtcatcaataacttgcttctgaacatatcaatgtcaaatgatcgaacattatctggggctgatgagttccttcctattcttatctatgttactatcaaggccaatcctcctcagctgcactcaaatctgaagttcattcagctctttagaagagaaacaaagctaatttcagaagtcgaatattacctgactaacctcatttcagcaaagatgtttataatagatgtcagtgctcactcgctctcaatggaggaaagcgagtttcagaaacatatggaatcggcaagactagctactcaagtatctgttgcaagcccaagtagctcacaggggcttcccacatctgcaagggcaaatcaggaggaaactgatatggcaggtttgcttattatactattcaatttattcggagaagtttgtttgaccatgaatttgcattccaaaacagtttttttttttgtcaccaagcaaaatgtgttcttttttgtttgaaaacaacataatgtggtttttattgtggtcctgttcaggaaccattttacctatcaaataaaataaaatgctaagctcttacggattttcctttaaatagttgttgtgtgtctgtaccagttttgaggtcgaatgatcatagcattcaaagcgatacatttgacaggttccagattccctttcatggactcagaaactgaaagcttgactccaggggaagtcaagcagctgcatgatatgtataagcgagttgtcacaagatacacgctgttgtctgaagccttaagaaagtcatcaatagacgaggatcaactccttaattcagtgcatgatccatgaggtgatgtgaagatgatgtctaggcatgatggtattaatcataagcaggtctcgtttccattagttgcagaccttataggggaaagaacgaggtcctagataaccaatgttccagcaagtccaacgcaatgcagggcacaacagctgtgagttgagcattacgcatgggaaggtgttatcttgttcctgatagccttggctcactagagttttgtagcattgtggtgccttggcatgacttgtacttaggttggggatcctttattcaccaggatggatcttctgaaatcagtgctgaaggaactggaaattggcacacatgacatattgccttctaactcgtacaatctgccaccggatgtctcacagttttagtgccgatcggcttcctgcaatggagaatgtgaaaatcgaacatggaatgtagggcagaaaaccactactgaggcaggcagggataaagatggagtaacataggctgggtcgctgggaaatgtctagatctcttgccatactacacatgggagtatgtgttggaccccaatgttctgtagttagtgttgagccttgaggttttagagctgtagtgttggggaaaatgtgagcgggtaacactgatttttaacagctgacgtgctgctccgggcaaattcagtcgggcgttatgctaatgaagattatgtcaaaggaaaatatgaccaagggtgaaaggagatttatgtagttcccttttagttacacatctgattttattttaagcaagtacggatgagggatatccgtggtcaagtttgatgcttcaggttgaggtgaaatttcgttatttggcgactcggtatgcccacctcactgtgtaatctttatatctcaagcgtgtaaaaggatgcccaaaatacaactgtatagatcatcgtggatcactcgatcagctcatatttattctatcaataaaggcaaatataagact

SEQ ID NO: 35248 - DNA, 822 bp, Zea mays subsp. mexicana
  Clone ID: UC-ZMFLTEOSINTE52G04_FLI
tccagcgaaggcactcagcctccgccatttcttcatctccaatctccatccttccatcttccgctccctcccctgcttgcgctcggcacgcaggcgacctcggcggcgctcgggctcgacctctcagcgacggcgtcagcagattcccctcgcctctggtactctgcgcaccggccggtgaccctgcgaaactattccagcacaggtacccaagtatggcggcaagacgcaatgttcggtactcgcctcttccttcagaggacggggatgacagcaattttattaaagaagatgtcgacctccgatacacttacactccgaaatcgtacagaaggatcccatggaagtcaattgccctggcattgttcctcctcctcctaggaacttcacttctctttctttcttacttcatattcacaggtcacatggagggtgatagttctcaggcatatggtctcttgttcctgggtttcctttcctttcttcctggtttctacgagactcgagttgcgtactattcatggcggggagcaccagggtacacttttgcatccataccagattattagcctttcagtttgcgctgctgttgcagtaaggataatgaacaagcaagcaacttcaaactttccttgggaaccaattttagtgataaaagagttaagcatgcatatgtggtggctcaaatgattgttgtgtttataggatgttattgctttgtcggtcagtaaaagaataattccttgtgatattgtgtaagagcaaaggttgattttgcaatttcttggtatttccttgtcaaatataacagaaattagtgcc

SEQ ID NO: 35249 - DNA, 1506 bp, Zea mays subsp. mexicana
  Clone ID: UC-ZMFLTEOSINTE53A04_FLI
gttgggcgcagagaatccccaagcaaacaaacagggtagagggagaggagaggagaggagaggttgggtctgggacaccatggctccgatgaagctgtacggggcggtgatgtcgtggaacgtgacgaggtgcgcaacggcgctggaggaggctggctccgactacgagatcgtgcccatcaacttcgccaccgccgagcacaagagccccgagcacctcgtccgcaacccgtttggtcaggttccagctctgcaggatggtgacttgtacctcttcggtatgatcctatgtcttcggatccttttttgcatggaaataggacagttgtttttattatacattgttgctgtgactaattctcgcttgtgttgtaccatgtgacatggttagcacatcactgtccacttaaatgatatctcagattttgctagaaggtagaagcacatgattttaagagatttgactaaatgaagccacatttatagatacaccatgatgttaaaagaaaaagattgtctgagtgcgaaatgtcatagtatcttgttctgtctcgtcatatgctgtcgcttggggagtgtgtattgttccatacgagtgaattacttggcaaacatgatgggttcaataagcttatcggagcaaacacattatttcacttgctcttcatggggcatgtagcttccatgtaaaatcaaatcaataggctgtcaaggtgtgtgcaccttcataaaggtgagcgtgcactcatgtatacatgagcatctgcgtctggactaggtctcgcaaaaaaaagagatagtcaaatgctagtgttgtttgcatctctaatgaataatgatgttgctttcctaattttattgttatttaaatattttccatctgtgtgctagaatcacgagcaatctgcaagtacgctgctcgcaaaaacaagccagagctgttgagggaaggaaacctcgaggaggcagcaatggtggatgtttggatcgaggtggaggctaaccagtacaccgctgcactgaatcccatcctcttccaggtcctcatcagtccgatgcttgggggaaccaccgaccagaaagttgtggatgagaaccttgagaagctgaagaaggtgctagaggtgtacgaggcacgcctgaccaagtgcaagtaccttgctggagacttcctcagcctcgccgacctgaaccatgtgtctgtcactctctgcctgtttgctacgccctacgcatctgtgctcgacgcctacccgcatgtgaaggcctggtggtctggtctgatggagaggccgtctgtccagaaggtcgctgccctgatgaagccatctgcttgaaacggttgccctgtcaatcggtgaatggaataagccaagtctgttctgggttgtttgcttgttcagtgatgtgtcttctatgacgaaagttgagtgcctatgtgtgagcatgcttgcttgtaacgagaccttgaattgttcggaaatgagcattcctgtgctcttcttt

SEQ ID NO: 35250 - DNA, 1616 bp, Zea mays subsp. mexicana
  Clone ID: UC-ZMFLTEOSINTE53B08_FLI
ttctgcggttctgccgtctacgcctccaatttggcctctctcccttgcaagtttaagcttcacattcagccatgggtaaggagaagtcccacatcaacattgtggtcattggccacgtcgactctggcaagtcgaccaccaccggccacctgatctacaagcttggaggcattgacaagcgtgtaatagagaggtttgagaaggaggctgctgagatgaacaagcggtccttcaagtatgcttgggtgctcgacaagctcaaggctgagcgtgagaggggtatcaccattgatattgctctgtggaagtttgagaccaccaagtattactgcaccgtcattgatgcccctggacaccgtgacttcatcaagaacatgatcactggtacctcccaggctgactgtgctgtccttatcattgactccaccactggtggttttgaggctggtatctccaaggatggccagacccgtgagcatgctctccttgcgttcactcttggagtgaaacagatgatttgctgctgcaacaagatggatgcaacgactcccaaatactccaaggcgcgttatgatgagattgtgaaggaagtctcatcctacctcaagaaagttgggtacaaccctgataagattgcctttgtccccatctctggttttgagggcgacaacatgattgagaggtccaccaaccttgactggtacaaaggcccgaccctgcttgaggctcttgaccagatcaccgagcccaagagaccttcggacaagccactgcgtctccccctgcaggatgtgtacaagattggtggtattggaactgtaccggttggtcgtgtggagactggtgtcatcaagcctggtatggttgtcaccttcggtccaactggcctgactactgaggtgaagtctgttgagatgcaccacgaggctcttcaggaggcccttcctggtgacaatgttggcttcaacgtgaagaacgttgctgtgaaggatctcaagcgtggttttgtggcctcaaactccaaggatgaccctgccaaggaggctgccagcttcacgtcccaggtcatcatcatgaaccaccctgggcagataggcaatggctatgccccagtgctggactgccacacctcccacattgctgtcaagtttgctgaactcattaccaagatcgacaggcggtctggcaaggagcttgagaaggagcccaagttcctgaagaacggtgatgctggtatggtgaagatgattcccaccaagcccatggtggtggagacattctcgcagtatcctccccttggtaggtttgctgtccgcgacatgaggcagacagttgctgttggagtcatcaagagtgtggagaagaaggacccgaccggcgccaaggttaccaaggcagctgccaaaaagaaatgatgcaacttgtcgttaatcctgtatctgcttttgcaatacctgacttgtcactccatcccgaagttttgtatgcggttgttgctgttattgtgtactgttaagctctgctgcggcgtgccctgttgtttgggtagcgtcaacgtcgagcgccacttgcgggtgtgcctttgtctgctatcagtagcggcaaaaattgaaagc

SEQ ID NO: 35251 - DNA, 663 bp, Zea mays subsp. mexicana
  Clone ID: UC-ZMFLTEOSINTE53C12_FLI
gtgcccccagcaccatgggccagcgactctgcatctaccccattattccagaggaagaaaactaatggagaccatggggcatcatcatctcagcctttcgcacagcagcaacaattggcagtgcagcaggacagttacatgcagagcagagctgaggcccttcaaaatgtggaatcaacaatccatgagctgagcaacatatttacacagttggcaaccatggtttctcaacagggagagctagcaatcagaattgacgagaacatggaggaaacagtggctaacgtggagggagcgcagggccagctcctgaagtatctcaacagcatttcgtccaacaggtggctgatgatgaagatattctttgtgctgatggtgttcctcatgatcttcatattcttcgtggcttgaccttctgtaccattctgcccgaggtgctctggccgctatgcgtagtattcttttatttttacgcatactacaccgtgtacacaattttcaccctggacgataagccatcgttcacccttttgtggccatgtaaattgggaggagttcgagtcctgttacgttactcttgattggcaatatctccactgtatttgatgtatcaactcgccagacagtaataggcaggtggcaaaaccgcttctcgttcttgtc

SEQ ID NO: 35252 - DNA, 1771 bp, Zea mays subsp. mexicana
  Clone ID: UC-ZMFLTEOSINTE53D12_FLI
cgccatggagacgaagcgggtggccatcatcggcgccggcgtgagcgggctggcggcgtgcaagcacctgctggagcgcggctgccggcccgtggtgttcgaggccggcaccgtcgtgggcggcgtgtgggcgcgcgtgccagacagcacggcgctgcagacgccgcggcccatgtaccagtactccgacttcccgtggccggacaccgtcaccgaggtgttccccgaccaccggcaggtcatgtcctacctggacgcctacgcgcgccacttcggcgtgctggactgcgtccgcttcggccgccgcgtgctcgggatggagtaccacggcgtcgccgaggacgacgtggcggcgtgggaggagtggggcggaaacggccaggcgttcggctgcgccggcgctggcgagtggcgcctcaaggtggccgacgccgagggacgcattgagacacacaaggcagacttcgtagttctctgcatcgggaggttcagcggcgttcccaacacgcctacattccctccaggcgaaggtccagaagcgttcgacgggcaggtgatccactccatggactacgccaagatgggcaccaagaaagccagggagatgatcaaaggcaagcgcgtcactgtcgtcggctacctgaaatcagcggtcgacattgccgccgaatgcgctgaagtgaacggcgctgaacatccatgcacaatggtggtccggacgaagcactggatcataccagactacttcgcttggggagtccacatatcgttgctattcctaaaccgcttcgcagagctactgatccacaagccgggcgaaggcttcctcctttggctcctcgccaccctgctggcgcctttgagatggctgttctcgaagttcgccgagagctactacgccatcccgatgaggaagcacggcatggtgccggaccacagcctgttccaggcgctggccacgtgcctgatcgcgatccagccgaaggggttctacgagaggctggaagaaggcagcatcgttctcaagaggtcgaagacgttcagcttctgcagggaaggcgtcgtcgtggaaggcgaggtgtcgtcgtcgtcgctggtggagagcgacgtggtgatctacgcgaccgggttcagaggcgacctcaagatcaaggacatgttcgcgtcggagtacttccggagcgtcgcagttgggtcagcttgcactactgtgcctctctacagggagtgcatccaccctaagataccgcagctcgcagtgctcggttactcggagagcatcgcgaatctgtacacctcggagatccgggccaagtggctggcccatttcatggacggcggcttcaggatgccgagcgtcgctgcgatgcagaaggacgtcctcgagtgggagaagtgcatgaagaggtacgccggcggcaggtacttccgcaggtcctgtatagggctccttcacatctggtacaatgatcagctgtgccgggacatggggtgtgatccgaggaggaagaagggctttcttgaggaactgttcggagtctatggccctgctgattatgctgaccttcaccccgaccgcaagaaagacgactagaccttctgaggcggcactcgtaatctagaccttcattataaagtgggtattgtgggtaccaacgttcacagctcctgttaatgtccatatcatatggatgctgaatatataaagtgggtattattgtgcctattaatatcgcaaaccgaataataaaaatggtcgaacaggtcgatt

SEQ ID NO: 35253 - DNA, 1878 bp, Zea mays subsp. mexicana
  Clone ID: UC-ZMFLTEOSINTE53G06_FLI
ggaagagtcaaagggcatcgatgcgaaagcgtccgggcctggtgggtccttcgacatcaccaagttgggcgcctccgcgcacgcgtgctcgcctctcctggaaccgtctccgccgccctcccgcgtcggcgtcgcggcgcaagagggtaccctgaatttcgtcagtgccaagtgacgaccgcttttgcccatttgtgatagctgaatctctgtggttcaaaggcgattgattttggtttgctgacgcacgcctaatgagctcccaagtctccacatcacacggtcttcatcccccggggaagcttgggacatttgagtcaccccatgcctggccgctgtcagcgcctacggcccagcccgaagcgggacgcggtgatgaccaggaggtcaggctgttgtcggttgcctggaaccaagattgtggatgcttcgcggctggtaccagcaatgggtttaggatctttaactgcgaccctttcaaggagactttcaggagggatcttaagagcggcggttttgggatcgtcgagatgttgttccgttgcaacatccttgcccttgtaggaggcggctccaatgtgcagtatccgccgaacaaggtgatgatttgggatgaccaccagagccgttgcattggagagttcgccttccgctcagatgtccgagccgtaaagttggcgaaggactacatcgtgattgtcctcgagcgcaagatatttgtctacaactttaccgatttgaagctgctctaccagattgacaccctgtcaaatcccaaaggactttgctgtctctctcataattccaatacttcagtattggcctgccctggggtgcaccagggtcatgttcgcgtggagcatttcgggctgaaaatggcgaagacaatctcagctcatgattcacacatctcttgcatgtcactgacaatggatggtctcctactggcaacagctagcaccaagggcactttgatcagaatattcaacacaatggatggcactcgcctacaagaggtacgcagagggcttgacagagcagaaatatatagcattgcagtgtcgcccaatgtgcagtggttggcagtgtccagcgacaaaggtactgttcatattttctccctgagagtcagagttgctggggaggatgcaagcaatgagcaacgcactgctgaaagtccacggatggatcaccagagctcttccagttctattgatcctcttattcaggcgaacactggatccaatgcgagttcatcactgtcatttatgagagggatcctgccgaagtatttcagttcagagtggtcatttgctcagttccatttaccagaagtcacccgttacatagtagcctttggtgctcagaatactgtaatgatggttggcctggatggcagcttctacaggtgcagcttcgaccaagtgaacggagggcagatgttacagaaggagtatttccggtttctcaagtccgacagcccacctttaaggagcgcagccatctgacctacctctctcaccctgtaaataccgaaggttgtgcccggtccattgtacatatcaccatcttctcgccggctaaagttattacaggcagcgggaataaggagagctggccgtgtcggatcgccgcaacccacaggattccaaccttgaggtttctggagcggttggtgtcccatccaagctgcaagcatcatttgccatctctcttctttcttctagcgagaaccacaaccacccattggtacactacatataacgtaaaaagttcgataacgaatttgaccgtgtggtctgcaatgccgtgtaagaaatctccgacttgttcttgcctgtggcttgttgatcttgatgatgactgctgcgcaagtgc

SEQ ID NO: 35254 - DNA, 913 bp, Zea mays subsp. mexicana
  Clone ID: UC-ZMFLTEOSINTE53H08_FLI
gcacaaaggacccttttatgcatcatcaaagagcattgatcaacttattgtgaatcttgggaaatgggccaagtaggaaattttgttagaacatatttttggttgttacttcttagttagggcatcttatgctagtagcatgtttgtggcaggttataccgaattgcttccatgggttttgcaacatttggtgtcttccttcttgcaaagcgtgcactacagcattttctagaaaaaagacggcggcatgaactgcaaaaaagggttcttaatgcagcagcacaaaggcaagctagagaagctgaagggagcaaaggtacatcagacgcagagcctaacagtaaaaaagatcaattagtgttggacatatgtgtcatatgccttgagcaagagtacaatgctgtttttgtgccgtgtggtcacatgtgttgctgtatggcatgctcttcacatttgacgaactgcccactttgccggagaagaattgaccaagctgtcagaaccttccgccattgatggtgatatatgatgcaaaaaactggcatggtaccaccacatgtactgcttctgaaaccaatttgttcttggaacttggaagtgctggctgctatcaaccaacgacatgaactgcaatactgggacgaagcagcttcaatgagtttgctttttgaacagaacagtgagtgatgcaagttgcaagctcataattggcagttgagatactctcactccctagatagtgccaatgggtgctcttgcctgtaatgtactacaactctgtacaggacgctcttgtgtaagtgcacatagattagcagcttgcttattgacaacatcgatgccggtaatatgtactgttgcccatcgggcatttgtgcaaaggaataacaaaatcagctcgtttagttgtgat

SEQ ID NO: 35255 - DNA, 2563 bp, Zea mays subsp. mexicana
  Clone ID: UC-ZMFLTEOSINTE54E03_FLI
ggggtccgcctcctcccctactccggccgcagccgccgacgtcgccattctgccgcgccaatcgatagggttcgctcgctcccccctcaggcctcagggacccaatcccgctccctcctcgcgcacccattgcatctcgtcctcgtctcgtcccgctagtgtcgtttttgatctgattgatccgtggtgggtggactgcgtggcaaggtccgcgagtggctgggatggcgtcgtcggcgtccgcgccagcgtccacgggcccgcgctacgcgccgccggatccgacgctgcccaagccgtggagggggctaatcgacggcaacacggggtacctctacttctggaacccggagacaaaggttacgcagtacgagcgtcccgtcgctgctgtgcccgccccccaatcgcagccgcctgtctactccaggcccgatgacgggccgagaagcagcgcacctgccgagcagcgctcggaagctgcggtgagccgcccgcaatatgtgcctccctccgataacaggacaaggaatgatcacccagagtcaagctctgcatctggagtgaacctttcacaaagtgctctgtccaccaatcaagtttctcagtatgccaatgggagccaaatgtcgacagaagcatatcgtgccaagcatgagattactatcgtcggcaatgaggcacctgcaccattcatgacatttcaatccacaggcttcccatcagagattctaagggaggttctgcaagcaggattctctgcaccaactcctatccaagctcaatcatggccaattgctctaaggggtcgtgatatagtagctgtggcgaagacaggttcaggaaaaacactgggctatcttctcccagggtttattcttttgaagcgcctgcagcataattcaagggaaggtccaacagtattagttttgtctccaaccagggaattggcgacacaaattcaagatgaagcaatcaagtttggcagatcttcaagaatatcttctacttgcttatatggaggtgctccaaaaggccctcagctaagagagttggagcgtggtgctgacattgttgtcgcaactcctgggagattaaatgacattttggaaatgaatagagtgagcctgcaccaagtatcatatcttgtccttgatgaagctgaccgtatgcttgatatgggatttgagccacaaataaggaaaattgtgaaacaaataccaccgaaacggcaaactcttatgtatactgccacatggccaagagaggttagaaaaatagcatctgatttactggctaacccagttcaagttaacattggaaacactgatcagctagttgcaaataagtcaattacacagcatgtggaagttatcccacatatggagaaatcaagacgacttgatcagatcttgcgttcacaagatcctggatcaaaaagcataatattttgctccactaagaggatgtgtgatcagttagctcgaaacctatcacggcagtatcgtgcttctgctattcatggtgataaatcacaggctgagagggattctgtgttgaatgactttcgaagcggcaggtgtccagtacttgtagccactgatgtggccgctcgaggcttggacataaaggacatcagggtagtggttaactatgatttcccaactggtgtggaggactatgtccatagaattgggaggacaggtagggctggtgcaacaggatctgcctacacattcttcggtgaccaggattcaaagtacgcttcagaccttgtgaagattttggagggtgcaaaccaatctgtgccgccacagttgaaagaaatggctcttcgtggaggatatggtggaagatcacgtcggtgggcatcttctgatgactcttatggtggtcagggatatggtgctaaaagatcaactgatagcttcaataataacagcttcggcaaccaggctggaggtggttcaagctttcactcgagctccagtggcggtcagtttagtgataccactagcttccatggcagcttcgataacagtgtccgcaacaatcagacgggggacaatgcgagctttccacccagctccagcaacaatcagtctggggatggtctcagttttcatgaaaggttctatggatcacgtggaagggaccagagcagaacaagcaatgatggattccgtgccaggagcagaagtcctcctggcaagcccgtggaagtttccaactggtgattgcatccactaggtgcaatccaatttttgcgatggtgacgaaaccaagtagaagatggtaccctaacaagttatattatttccttttcttatcctgcttagatccaaggatgtgatggtctgaaccctaacggtctcctgctatcttgatttgacgtctgggagacgcttgattccgtgcctgtgggttgtaaggcgttaaaacttgactttgttagtgtactcccaatgatataacccaatcctgggtaaacaaacgcatggggatgaattttggacgaaaccatggacaactgatgtgtgtttaatgtcatgtacaatctatgtcg

SEQ ID NO: 35256 - DNA, 1150 bp, Zea mays subsp. mexicana
  Clone ID: UC-ZMFLTEOSINTE55B07_FLI
cccaacactcccagacccatttcctttccttcccctccggctccgcctcctcgaccaccccgacaaccccaagcgcctccggcgagctccacccctccaccggctgcggcgagaagcggcgggggctaactaagtctgtaggctgcggcggaggtgatccgggagccggagccggagccggagccgagtctagggcgatggggcagcagtcgctgatctacgcgttcgtggcgcgtggcaccgtggtgctggccgagtacaccgagttcaccggcaacttcaccaccatcgccgcccagtgcctgcagaagctccccgccagcaacaacaagttcacctacaactgcgacggccacaccttcaactacctcgtcgaggacggattcacgtattgtgtagttgctgttgaatcagttgggcgacaaatccccatagctttcctggacagagttaaggaagacttcaccaaaaagtatggaggcgggaaaacagctactgctgcagcgaacagcttgaacagggagtttggatcaaagcttaaagagcacatgcagtactgtgtggaccaccctgaggaggttagcaagcttgccaaggtgaaggcccaagtctccgaagtcaaaggagttatgatggaaaacattgagaaggttcttgaccgtggcgagaagattgaactgcttgtcgacaaaactgaaaatctgcgttctcaggcacaagatttcaggcagcagggcaccaaggtgcggcggaagatgtggctccaaaacatgaaaatcaagctgatcgtcctgggcatcatcatcgcgctcatcctcatcatcatcctgtcggtgtgccatggcttcaagtgcggcagcaagtgaggagggggacttacagatggccgtgcccttgccctgccctggcacctgcgagaaggaggagactacatgtggagttttttttgcttctttagtcgtcgtgttaagtcgtcctgcgccgataattcttggtggtcaccagataagagtcattcctgatgtcggtgttgattgctgttgggttggtcgggaaatgactgggtgaaccggggggcgaagtgggaggggggttgtgtcgtgtaattttggatccactattgtgcatgtatagccccgtgtgctgtgct

SEQ ID NO: 35257 - DNA, 1866 bp, Zea mays subsp. mexicana
  Clone ID: UC-ZMFLTEOSINTE55B11_FLI
cggcgtaggggttgggggaggccagcagttcgtggaccgcagcaaggtgaggattcttctctgcgacggcgacgccagcagctcccgggaggtgctgcggctcctctgcaactgctcataccatgtaacttgcgccaagtctccgcggcaggtgatcaatattctcaactacgagggcggcgagatcgacatcatcctggctgaggttgatctgccggtctccaagtgcttcaagatgctcaagtacattgccaggaacaaggacctgcgccacatccccatcatcatgatgtccaacagagacgaggtgtctgttgttgtcaagtgcttgaggcttggtgcggctgagtacctggtgaagccgctgcgcacgaatgagctgctgaacctttggactcatgtgtggcggcggagacggatggtaaagggcactatgctgattctgcgttagagaagcatgctcagctgagatgcttgtaggagttgctgtacctgcatgaattattctttaaatcgagtgctggtgttggcagcttggtttgcccgagaaaaacttcttcaatgacaacttcgagttggtgctctcagaacctagtgatgcaaataccaatagcgccaccctcctctcagatgagacagacgataggcctaaagaaaacacaaatcaagaaacaggcacctcaaatcagcttgaatacgagtctaatccttccgttgctgagcgcgaccagagagacaagatcggtgctccaggctctgccctagatgccagtcaagcatgtaagatatttcagccggacctttattctgccaactggtcttcctttttgttgttaaccacttcttgagttctatatctccatctgttttctgataattattttaattgccagcgactccgggaagaatgttttcacgtcctataaaaactaacctgaaggttgctgagtcgtctgcatttctagcatatgttaagtcaagcaccccagccaccagctcatttgatagcggactacaaagaggtgacagccggttagattctttggataaccatggtaattgctctagtgcaacagatagaagtgacaccggtactgatgtaaatatttggaataaagaagcttttgagatgcctgtgcagtatcctatggtatgcttttcttcctctagcatgcatatggagcgaagcaatgaaggccataatgacacttcaggaactccacctgcataccatttcccattttattatccagggatggtagaacacaacatggcactttcatcagtgcaaaattttcaagcaaacataaacagtgctcaagcacatacaccaccagcgatgcttcatcagtacaatgttttctcccaatgccatagtttacccatgatatcatcatttcagtttaatacttctggcatgagtatgcactcaagtcatttaccgacgcaaaatgtgtggtcatcggcatcgagcacaccaacgcctgacgaaacatgcaatcgctccgagagaagggctgcagcacttgctaaattcaggcagaaaaggaaagagcgctgttttgacaagaaggtgaggtatgtgaacaggaagaaacttgctgagacgaggccaagggtgcgaggtcaatttgttaggcatgcaagcaatatggatatcataagcactggagatgatatatctgaagacgaagatgacgatccaacctccagggaggtagatatgatttcttctccagagtagtggagaggtcctcttgtgtgaaaaattagagtgcagatggttactgctcactttgttacaactcagtaggactagacaatacattcttctactggcaacaaggcaatacaccctttttgctc

SEQ ID NO: 35258 - DNA, 2200 bp, Zea mays subsp. mexicana
  Clone ID: UC-ZMFLTEOSINTE55C06_FLI
gccaagtgttcgcaaccaacccctcttcctcgcccactgaaaggttcagaggctcccgttttagcatagcgaccgagacgaaggagtgggggggcggagagctttgggccctggccaggatgaagtttatgagactcggcacccggccggacaccttcttcaccgccgccgactccgtgaggtctgtctgcacggaggtggccacggacctgcagatcctcgtggataactgcctctaccatctccacaagttccccctgctctcgaaatgcatgctcctgcaagcgctgtgcgccgacgccggcgacgtcgtcgtcgagctcccggggttcccgggcggcgccgaggcgttcgaggcctgcgccaagtactgctacggcatcaccgtcacggtgagcgcgcgcaacctggtcccgctgcggtgcgcggcggcgcacctcggcatgtcggaggccgccgacaggggcaacctcgcggccaagctcgacgcgttcctcgcctcctgcctcctgcgccgctggaaggacgcgctgggcgtgctccactccacgcgccaccacgccccgctctgcgaggacctgggcctcacgtcccgctgcgtcgacgccgtggccgccctcgtcgccagcccggacaccgccccgccgccgaggtccacgtcggcgtcgccgtggtgggcgcacgacgtcgccgagctcggggtcgacctcttctggcggatcatggtcgccgtcaaggccaccggcgccgtccacgagaagaccgtcggcgacgcgctcaaggcgtacgcgcgccggtggctgcccaacgtcgccaaggaccagccgctcgaccgcgacgccgcggacgtgaagcaggtcgccacgaggcaccgcctcctgctcgagaagatcgtcagcctgctccccgcggagagggacgccgtctcctgcggcttcctgctcaagctgctcaaggccgccaacatcctgagcgcgtccaaggcgtccagggcggagctggtgaggagggtggcgtggcagctggaggaggccagcgtctccgacctgctcatcccgtcgctgtcctgcgtcagcgacacgctgtacgatgtgggcgccgtgtcggccatcctcgacgagttcgcgctgcggtgcgccgcgctcccgccggcgccggcgctggctctgtccgggagcctcgacgacagcccggcgcactcgggcggccaccggcggtcccgttcggcggagagcgtgagcttcgacggcacgcgacgctccttgtcggccgcacccgtgtcgcagggcggtctggtgcaggtgggcaagttggtggacgggttcttgattgaggtcgcaaaggaccccaacatgccgatggacaagctgctcgccattgccgaggccgtgccagacagcgcccggccggagcacgatggcatgtacaaagtcgtcgacacatacctcaaggcgcatccggagatgagcaaaagcgcgagaaagcggctgtgccgggtgctcaactgccggaagctgtcggagaaggcgtgcgcgcacgcggcgcagaacgagctcctcccgctgcgcgtggtggtgcaggtgctgttcttcgaacacgcgcgcgccgcggcgctggcgtcgggcgggcacgccgtggccgcggcggcggacctgccgagcaacatccgggcgctgctgtccaagtccgggtcgtccgaggacgacgaggcggaccgcgtcgacgagcagcggctccgggcgctggccgccggcgcgtcccccggcgacgactggagcgtggagggcctccgtcgcgcggcgtccaagatcgccacgctgcggatgaagctggcggaggacgaggacgaggaccgtgacgccgacgagttcgcgcgcaaggccgggctaccgcgcagcgcgtcgctgcggttcagggcgttctgcgctatccccgccgggaagccgaggcggatgctcagcaagctgtggccgctgggcagaagcggcgttagccactagtagcagacagtgttagctcttgtgatctcctgtttctctctctctctctctctttttccctgagggtgatttgtctgtctcttctacgagttcctcctctctccctctctctctctttttgttacgctttcaaggcaaattgtaccttgcatgtagttgtaatctcaacgggcacaataaaagatagaaattgcacaggc

SEQ ID NO: 35259 - DNA, 1730 bp, Zea mays subsp. mexicana
  Clone ID: UC-ZMFLTEOSINTE55C07_FLI
gccgggaagtcggaggcgccgcgctcgtcacgccgccggctccgacgagatggaggatggcgtatctacttatactgtggatgaggcacttgtgtccatggggtttgggaaattccatgcattcgtgcttgcatactctgggatggctaaaatctctgaagcaatggagatgatgcttttgtcatttgttgggcaatcagttcaagctgagtgggggctttctgcacatgaagaaagcctcataacaagtgttgtctttgtggggatgcttgtaggagcatatgcttggggcatagtttcagataactatggaagaagggttgggttcaacttcacagctattgttactggaggagctggccttcttagcgcttttgctccaaattacttatctttgattgtactgagatttatggtcggtgttggactgggtggtgggccagttttaggttcttggttcctagagttcatccctgctcctaaccgaggaacatggatggttatgttctcagcattttggactgttggcacaataatggaagcttctcttgcttgggccgttatgccagcttttggctggaggtggctgctggcactctcatcattgccatcgtttgccctgctactcttctacccagtgacacttgagtcaccaagatacctatgcatgaagggtagaatagctgaagcagttcatgttctggaaacaatgtcacgcgtgaactgtgtttctctcccctctggccgacttgtctctggccatcgggtggaacttcatgatatcggggattcttcagaaacggcacagttggtgacatctaataagaacaacactgctgatcgtggtagcaaatccgagatcggaggcctcagtgccatcttaaagcttctatctccaaacttaatcagatcgactcttctactctggactgtctttcttggtcatgcctttctgtactatggtcttgttctgctcacatcagaactaaatcatggaaataggatctgtggatcagaagagggggcagaagtgacaacaacagcccacatacatgatgagaatctctacagaaatgtatttataacaagctttggagaggtccctggtcttctcctgtcggctgccattgttgacaagatcgggcgcaagctctcgatgtcttccatgctttacatcagttgcctgtgcatatctccgcttatgttcgcccagacggaatcgctgacgaccgtctttttgttctgtgcccgggtttgcatctctgcaagcttcactgttctgcacatctacgcccctgagatatacccaactgctgttagggccacgggtgtcgggtttgcaagctcgattgctcgctttggtggaatcctgtgccctctcgtggccgtcggcctggtgcacgcgtgccaccagatggcagctatcctcatattcatcacggtgatgctggcttcaggcatcgccgtgtcatacttccccttggaaacaagcggccgaaagctgagcgaccacgtcgccgccgcgtaagagctgattaattgaagaactgactttttctgagggatacaccaatacagaatcaaggcccaaggggccattaatttttttgttcagttgttgacaaaggatacagtgggaaagaaagtgcaaaggaggcactagattgttacattattatactgttgcttctcaatagaaatctacaaaatcactatatgatttttgttct

SEQ ID NO: 35260 - DNA, 1348 bp, Zea mays subsp. mexicana
  Clone ID: UC-ZMFLTEOSINTE64B02_FLI
gcccgcgttcgcttcttccccagcatccagcaaggaaggaggaagaagaagagggaggagaggggacggtccgcgaatcctgcctagccttcgccgccttcctccgctcgagcgactcgccgaggaaatagcgaaagggcgcaatgagttcagcgaatggtacaaccaatgtccatgggaaagaagcagcattgtatgaggagcagctgttcaagattggtaaagttagaactgacctaggacaactatctggaaaatcagctctatattgctcagatgcttcaattgcaaggtacctgatagcaaggaactgggacataaggaaggctactaaaatgctgaagaaaaccttaaaatggcgttcagaatataagccagatgaaatccgttgggatgacatatctgatgaagcggtgactggaaaaacttaccgaactgattactttgacaagatcgggcggagtatccttgtcatgagacctggatgccagaataccaagaatgccaatggacaagtcaagtacttggtgtactgtatggagaatgcaattctaaatctgccacatggtcaggatcagatggtttggctcattgattttgctggtttcaatttaggcaacttgtcaattcaggtgacaaagatgacggcagatgtcctacaaggccattatcctgaaaggttgggtgtggcaattctttttaatgctccaaagttttttgagcctttctggaagatggcaagcccccttcttgagaagaagaccagaaacaaggtcaaatttgtatactcagatagacctgacaccatgaagatcatggaagaccttttcaacatggatgagttagaatgtgcgtttggtggcaagaacccagctactttcaatataaatgattatgctgcgaggatgagagaagatgacaagaagatgccatcattttggagccctgagaattcagctcttgcttctgagccatatcagtatgagcttgaagtggagaggaaggcgttatctatggcaagggcttgggcagaggaggaagccaaaaaggctcgggagcatgcacgcgcccttgaggaggcccggaaccaatgggagcgtcaaggaatcagagttgttgtcgaaggagaactgaaggatgacgcctcagctggggtgacatgggctaacgctggctctggctgaagagtcataatttagcgctctgtgtgttacaccagagttaagtctgcctgaacttatgtggcatttgtttgagtttctaccttcgtgccctgttttctaatgtaccgtggttgtgaaccggtcaatgttatctgaaataaaacattgcgtgccaagtttgtgtt

SEQ ID NO: 35261 - DNA, 1233 bp, Zea mays subsp. mexicana
  Clone ID: UC-ZMFLTEOSINTE64D01_FLI
cacacacacacacagcacaggggagggagacgagacgagatccaaaattccctggcggtgggctgtggctggtaataaagctcgcgccacgggaaccacgcacgcggacgccggcatattcgccaaacgcatcgcatcggcctcggccaccggcgcggctgccctcctcctcctcttgtccgtcgatccggagaggactttctctcgcctgctcgtcccttccgcccccgccggccggccggtcctcttcccggcccactccgttccgatcgaccatggcggctaccgcccccaatggcaatcccactgtcagctccctcgcggcaaccgttccggtccagacggttctgttcgacatcgacgggaccctgtgcgactcggatcccctccaccacgtcgctttccaagagatgcttctcgagatcgggtacaacaatggcgtgccgatagacgaggagttcttcatcaagaacatcgctgggaggagtgacgtcgaagctgcccagaacctgttcccggactgggagcttgagaaggggctcaaattcctagaggacaaggaagcaaaatacaggagtctggcaaaagagcgcttggtgcctgtgaaaggcctcgcgaaggtggtccagtgggtgaaagaccacgggtacaagcgcgcggcggtgaccaacgcccccaggatcaacgcggagctgatgatctcgctcctgggcctctcggacttcttccaggccgtcatcgtcggaggcgagtgcgagcagccaaagcccgcgccgtacccttacctcagggccctcaaggagctccaggtgtccgcagagcacagcttcgtcttcgaggattcgcctgccggtatccgggctggcgtcgcggcagggatgcctgtcgtcggtgtggcgacgaggaacccggagaagtccttggtggaagcaggagccgcgttgctcgtcaaggactacgaagatcctaagctctgggcagcgcttgaggagatggacggagaggaagctaagctgaagaaggccagcgaatgatctgatatgacgatgagccattgattagatttattgcagattaaatctgcctccagcatgattctgttcctagttatgcgctgcggagagagctcatctcatcagggtatttatgagattctagcttcgtatattgtttttcttcttcttgattgaactgagatcaaataagacaaagctgctgtgccttgttgtgtgc

SEQ ID NO: 35262 - DNA, 1455 bp, Zea mays subsp. mexicana
  Clone ID: UC-ZMFLTEOSINTE64E02_FLI
ccgcacaaattgaaggagaccctcgccaacctcgaagctagtccaaactagtgggaggttgagtgcagggatcgatcgaggaagacgagacaagctgcttcttcttcttctgctgccgcagccgccgccagctcagctctagctcaccacgagttactagccaatctgacaccgatccaccgccggcaccgaccgtccatggcgcggggcaaggtgcagcttcggcgcgtcgagaacccagtgcaccggcaggtgacattctgcaagcgccgcgcggggctgctcaagaaggcccgggagctctccgtcctctgcgacgccagcgtcggcatcatcgtcttctctgcgcacggcaagctctacaacctcgccaccaccgggaccatggaggagctgatcgagaggtacaaggctgccagcgccggagaagcgacgaccgacggctgcggcaggcacaacaggatggaccccaaacatgaaaccacggtgctgcaacaggaaatcaacctgcttcagaagggactgaggtaaattgtttgttactcacagctttgccttgcagttccccccctgtacaaatcgcctacaggtaaatcagtttgctttctgaagaataaactgctgctgcacccagacacgcatcatgtcactctaaaaccaaagcatttcacaaaaaggcatggaaaggcagtccgccattgattctgacaaaaatgattcgttccaagaaaaagaaaacaattctgacaagaaaggaagcattgttttcggtaggtacatctacgggaacagggcgaacgagcacatgaatgttgacgaactgaacgcccttgagaggtacttggagatatggatgtacaacacccgctctgcaaagatgcagataatggctcaagagatccaaacactgaaaagcaaggcatgtcaaaaccctgtacttattaactctacgaagacccgaggcttttagcacccatttacctcactaaaagtgtctgcgtgtacgcaggaaggcatgttgaaagctgccaacgagattctccaggaaaagatagtagagcagagtagtttgcttgacgtaggcatggtggtagcggaccagcagaatgggcgttttagcacagtcccactggtagaagaggtgatcagtagtaacccactgactatactgagtggctattctagctgtaggggttcagagatgggctactccttctgaccgtaataacaaataccctgggggctccttctgttgattactagtagtgtgtaatacatacagtcaataatgtctattcgtatcatgtaggccttagataagcccttcaggagtgcccctggtattgtgtcgtcgtgccttctacttttccagaatgaagaaatattgtctattgaggagatctgatgctgtgctatttcttccttatcaacggaaatatatctatgtttgtgttc

SEQ ID NO: 35263 - DNA, 2245 bp, Zea mays subsp. mexicana
  Clone ID: UC-ZMFLTEOSINTE64E12_FLI
agcggcagactggcagaggcaggctctcggctctcctcgtggacgaaaccaccggctcccgaaatccaaattggaacaggggattctgaacttggggtttgttccggggaccgattctggcatcggcagacgggatgtcagcccccctcgaccgacttgctaggccatgttttgaagggtttgtacataacgatgaaaggaaagagagcagatctgatgcagacaactcagaaggagataagaagactaagatcggatctttcaagaaaaaagcaattaacgcggggaacaaattcaggcattccctgagaaggagaagcaaaaagaagaccgaaaggggggattccatcaaggatataagggacattaaagaacttcaagatgttgagacatttcgacaatgcttaattgacgaggatttgctgccgccacagcatgacgattatcacatgatgttaagattcctaaaagcacggaaatttgatgttgagaaagctaagaatatgtggtcagacatgcttaaatggaggaaggaattcggggttgacaaaatagaggaatttgagtacgccgagttagatgaagttaaaaagtattacccacaattttatcatggggtagataaagagggaagacctgtctacatagaattaatagggaaagttgatgcgaacaagctagtacaagtgacaactctagatcggtatgtgaaataccatgtcaaggaatttgagaggtgcttccagataagatttcctgcttgctccattgctgcaaaaaagcacatagattcgtcgactactatttttgatgtgcaaggcgtgggtttcaagaacttctcaaaatctgccagggaattaatcacacgattacagaagatcgacaacgataactacccagagacattgtgccagatgtatataattaatgcaggccaaggcttcaagatgttatggagcacaataaaatcattccttgatccaaaaactgcttccaagattcatgttcttgggaataagtatcaacataagttgctcgaaataattgacgagtgtgaattgccagaatttcttggtggcaaatgcaagtgtattgaaggttgcgaaagatctgacaaaggtccttggaaggatcccaacataataaagagagtcctcaatggcgaggcgaactatggcaggcaaattgtgaccatatccagcactgatggaaggatagtcagttatgcttggccagtgcacccaaatagaaaaggcagtgatgcatctgccgagtctgggtctgaagtggaagacgtaacatctcctactgcatcaaggaacctgattacacatcctattttgacccctgttcacgaggagtcaaaattgtcggcacatggttcttcatctgttgttcatgcttctattggagaaaacattcctgttgtggacaagattgttgatgatggatggggtagtcccagatctagtccacaagctgcttcttcaggttcattgtccctgaggaatttgcatggcacatttcaaggactcagagctcaaactatcacatggctgacattcttgatgatgaccctttttgccatgctttgttctgtcccaagcaagatggctagaaggatctccaaccaatctggtaagcatgacgactatcatgttaagtatcctcaagagcaggagtgcaaggaggagtttcgacctccatctcctgccccatcctacacagaaaaggatgtgatttcatcgatgctgagacggctgggtgagttggaggacaaggtgcaggtgcttgaaacgaagccgtctgagatgccgtttgaaaaggaagaattgctcaatgcagccgtccgccgtgtggatgcattggaagctgagctgatttccacaaagaaagccctttatgatgctttgatgcgacaggatgagctactcgcgtacattgataggcaggagctgatcaaatttcgtaaaaagaagttctgcttctaagatttgaccgtggagcagctgttcatgtccggagccgtttatgtgtatattggattgcggctaatatgtagtagaatgtaacgtgtccatctttagaagtgtgtaaagtatagtaggaaagaaaataggtgcgttgtgttgtgcgcctctcctccccgaggtgaatgtgtggtctagcacttgtgtgctaccctaaattgtaatcttggaagttggtgtatagctgattgcgtgctaatacgtagttgtaaatg

SEQ ID NO: 35264 - DNA, 930 bp, Zea mays subsp. mexicana
  Clone ID: UC-ZMFLTEOSINTE64F10_FLI
cccgacgtgatcgctccagagaaaatttcgcgggtttagacaaacagcgattgggatcgagatcggggcaacatgagcaaggtgttcgagggctacgagcgccagtactgcgaggcgtccgcctccctcacccgcaaatgcaccgccgccgccgccctacagggaggtaatcctccacccctcccaaatctcttcgttttctagaagcaacctcaatctcggtaggctctccctccgaatcgtctcttggtaaaatatttggtcgcgcagagaagctgaagcagaaggcggcggagatccaatccggcatcgatggcgctgaggcactgataaggaagatggatcttgaagcaagaaacctgcaaccaagcattagagctgatctcctagtaaagatcagggagtacaagtcagatcttaataaccttaagggagcgctgaagagggttactagtattaatgcacaacagggggcgagggaggagttgttggagtcaggaatggcagatacattgggggtttctgctgatcaaaggtcaagattgctcagggcaaccgagagacagaaccaaacaactgataggctcagagatagccatagaactatgctggagactgaagaacttggtgtctctatcctgcatgacctgagtcaacagcgccagtctctcttgcatgctcatgatgtattggacgaggtggataacaacgtcggcaagagcaggaggaccattggaggcatgatgaggagaatggatagaaacaagtggatcatcggtctcatcatagcagttcttgtcttggctatcctcgtgattctgtatttcaagttcgtgcactagtggattgcgttgcgtacgttgcattggacggtacgtagttttctactgcgaccagaacgaagaggaaggcagctgtgaatttgcttct

SEQ ID NO: 35265 - DNA, 1358 bp, Zea mays subsp. mexicana
  Clone ID: UC-ZMFLTEOSINTE68A05_FLI
actccccacgcaaagccgccgccgttccctctcgtcttcccagttctcctacgccggtaatcccacgtcctatcagccgccgatccagccttacttccatccatccatccatctcgtcgcttcactctgttccgcgtgcgatcgagtagatcaagaggaggaggatggcgaggagttcgttcaagttggagcaccccttcgaaaggaggcaagctgaggctaaccgcatcagggagaagtaccctgacagaatccctgtcattgttgagaaggccgagaggagtgatatcccagacattgacaagaaaaagtcagccatttcacgagtatctctttagtgcatttgtattttctctatgagttttttcggacattatattttttctgtacttctaaaagttgccttagactgtctccaacagccttacataacccaactcttatttcaaaccccactctataaacagtagaggctgcagtacaaaacccttgcaaaatagtgttttgcacggttatatgcacgatttgttggacactgagctcaccaatacgaataagtggacgcgcaaaacattgttctagcactgttgatgtattatagacagtgtggagttaaaatgttaaatagacggtgggataggcgtaccctggtgacctcagccttaccaatttttgttattgatttttatcaaattcttaataatgcaaaactgttggctgtgggcattatccttgtgccaatgatgccttcaaagttgtttatctctactagcagcaagttccggacacttacaaacgtcccaaccaagagtctgtttcttctgcaagtagccatctagaaatggattgcttactccatttgtgtaatctttgcttgtacaatcttccagcattaattaattcatcagaatgaggtcttgtttatcggtacaaggcaagaccagctgcaacatttgtgtggcccctgatatgtgaattgtgattgcttgcaggtaccttgttcctgccgacctcacagtcggacagtttgtgtatgtggtacggaagcgcatcaagctgagcgctgagaaggcaatcttcatcttcgtaaagaacaccctcccaccaacagctgctctgatgtccgccatctacgaggagaacaaggacgaggacggcttcctctacatgacgtacagcggcgagaacaccttcgggctgttctgagtgggcgccgctatggatccacattgggcaatgcctcctgtaaatactaaacatgcatcacaagaatctgtgtccatagcataatctggtctgtctttcggtctgtcattacgcaacttgacgtgcaatgctaaacacatttaagtaataat

SEQ ID NO: 35266 - DNA, 1460 bp, Zea mays subsp. mexicana
  Clone ID: UC-ZMFLTEOSINTE68E09_FLI
gagaaaacgaaacgccgctccctcgcctcatcccttccctcctcctgcatcctacctccctggtacccgtcacgttcaccacgttcgcccgctcattcaccggcggcgtcgcccagctcggcctcccgccgcccacggaggccaggtccccgggccgcccgctcggtccgccacagaggcaaggcatggtggcgtctttagacaatgtgaggggcttgactttagccatgtcatctagtgcattcattggttctagctttgtgatcaagaaagttggattgaagaaggctggggataatggggtgcgtgcagcttctggaggcttctcatatctatatgagccgttatggtggttgggaatgataactatgattctaggcgaggtagccaattttgcagcatatgcatttgcccctgccgtacttgttactcctctaggagctctaagcatcatatttaggtagagctttactgtcatcgtagatttccttacacctagtgttgcgttcctgtttaatgttttgctcatgcagtgcagtgctcgcacacttcattctgaaagaaaatttgcacatgtttggcgttgttggttgcatactatgtgttgttggttctgttggtatagttttgcatgccccaaaggagagaaaaattgattctatgaaggaaatatggcatcttgcaacacagccaggttttattgtttattcatgcgtggcagtggcctgcgttcttttttgatatttcgggttgttgagcgctctgggcacagattgatgcttgtttacatagcaatctgttcattaatgggatctcttacggttatcagtgtaaaagcagttgccattgctctaaagctatcatttggtggatcaaatcaattcatctacgtccagacatggttcttcatagtagtagtcactatttgctgcttggtgcaattaaactacttaaacaaggctctggactcgttcaacacggctgtggtttctcctgtatactacgtgatgttcaccattcttaccattgttgcaaatatgatcatgtacaaggactgggcctcgcagactgcaacgcagatcgcaacacagctatgtgggtttgtgaccattgtcgcggggacttttctgcttcacaagactagggatatgggaaatccaccaccaccaccacctgaccaaatgtgcctgcaagaagccggggaatgtgctccacggtcaatgaccagttctagctgaacacactaagatgtcaaaatctcacagcctctatggactgaattggaattttgagctatatggtgacctttgtagatatattaggaaggagtaaagattggagtgcccagcagttggacataccgatgaagttttacgtttctgcaaaagaaagaatgaactgtatgaaggcatcggaatcttttgaagacatgagattcaaactagctacctaactttggt

SEQ ID NO: 35267 - DNA, 2374 bp, Zea mays subsp. mexicana
  Clone ID: UC-ZMFLTEOSINTE68G10_FLI
ttgtgcgccgccttcgcccgcatagcccggagagagccgtcatccttacctgcgccgaccgacgcctctgcagcttctccaggggttgcccgttgaggagggttaggcttcgtcatgtcgaagtcggacctggacgatctgcttcttcaggccgccggccggacggggaagaaccagtcccggcctagcaatccgcggtggaactctggggggagcggctccgacggcttcgacgacgacgacgacgaagactctgacgccgcgccgacctactcgaggaagaagccttcgtcgcaggtaccgctcaagaagcggcacaagccggagaagggcggccggcgtggcggtggtgggtggaacgacgaggatgatgaggacgaggatgggcgtcggagtggcggggaggactcggacagcgccccttcagtggggagtgacctatacaaggatgaagacgacaaggagcgtctggagaacatgtctgagttgcaaagggagttgatcctagctgagcggggcacccgcctcgacgactacaagctcaagcagcgggcacgtgcgtcctcctccaagacggacaaggtgggtgcgccaaaggatagcagcccacccccaccgcctagccggatgcggtcttcaacccgaactgacaagtctgggtccgccgctaagagcgcgctggacgagctgcgggcaaagcagcggatgcggcaacaagctccggaggcacgcaggttcacggatctactcccacatagtggctcatccattaggcgcagggctgggagcccaccaagtgatgggagcaacgatggcaataacagggggaggctgaatgaccatgggaggatttctggtgatggcagggatgatgaatttgatgaatcgccgagtaggcttgatccactcaagtttgatgatgtgaagagtattaccctcaggaggtcaaaactggtgaaatggttcatggagccattctttgatgatctaatttctggttgttttgtgcggctaggtattggcaagacaaagaatgggaccccgagttacaggctgtgcatagtgaggaacgtggatgcaagcgatccagatcggaattacaaactggaaaactactcgacatgcaaatatctcaatgttgtgtgggatagtgaggctaatgctgctcggtggcagatgactcaggtatcggactccccacccaacgaagaagagttcaaggaatggctgcaagcggcagagaagaatggtgcgcgcataccgactcggcaggaagtgctggataagaaagaagccattcagaatgcctataactttgtgtattcagcagcaactgtacaacagatgctgcaagagaaatcagctgtgagacgacctatcaatattgctgctgagaaggatcggttgaggagtgaattggagatggctcttagccgtaggaacgaacatgaagctgagaggattcgcgcgaagctgaaaaatctgcaaaacagggcacaaccagtgtcaaaagataataaggctgcaaagttggaggctatgaaccggaagaaccgtgctgataacttcaagaacgcttcagaattgaaacctgtaaatacatctttgaaggcaggagaagctggttatgaccctttctcgaggaggtggacaagatcaagaaattattatgcatcgaagccaggaggagataatgttgaagaaactgccaatgggtccagtagtaatgtagcgcctaacaatgaagatacaaagagcaaggctcaacctggtacagcagccacaacagcagctcaagtggcagcagctgatgccgggaagctcattgataccaatgcaccagtggatctgggaacagaatcaaatatgctgcatacatttgagcttcctatatcattgtctgctctgcaagaatttggtggagccaagggcctgtttgatggttacatggcaaggaggcagaagatagaagctacaatggggtacaaagtgcctgacaacgatggaaggaggcatgctttaaccctgagtgtgagtgattacaaaaggcgacggggtctcctctgaagtgtatctgtgattgtgctgggtgctcagcggattcaactatctgcctggcttcagcgcctctgcattgctgtgacaattgtccagatcatctgcattttgccttgtcttcctagaagtaacataaaacatgcggagtatacaatttcttttcataaatattacctgatgtatgactgattatgatactgacatcatgtttatatccgtggattgtgtgtgtcatcatcatcatcgtatccttgttagctgcaaaaactggattccataattagttcaattaaaataaatgcagctttcatttttc

SEQ ID NO: 35268 - DNA, 735 bp, Zea mays subsp. mexicana
  Clone ID: UC-ZMFLTEOSINTE70A07_FLI
caccaaggaccttcggcgcccgttcaggatccacatcttcccgagcgagttcttggttgacctcttccccttcggaccacctccaaggctcttggtgtagcttgccactctcaccaatcaagttttcatgtctgatctcgacattcagatcccaactgccttcgatcccttcgctgaggccaatgctggggactctggtgcagcagcagggtcaaaggactacgttcacgtgcgcatccagcagcgtaatggtcgcaagagcctgaccaccgtccagggattgaagaaggagttcagctacagcaagatcctcaaagatctcaagaaagagttctgctgcaatggtacagtggtccaggacccagaacttggacaggtcattcagctccagggtgatcagaggaagaacgtctcgaatttcctcgtccaggccggcattgtgaagaaggagcacatcaagattcatggtttctgagcaaccgccgggtccatatcaaaccaaccctgcatgcagggcatcttattatatataatatctgaggtggagcatatctatctggctgtgtactgcaagcaggcctagtacgccgcctgcgcgttcctcctattacacatataggcccctccctgcgtgtatgcttgttaccgtcgtgtcgaaccttgtactacgaggctccatcgaacatcgatggcttgcttctttatcagaacatgtttgaataaacgctatttggt

SEQ ID NO: 35269 - DNA, 1625 bp, Zea mays subsp. mexicana
  Clone ID: UC-ZMFLTEOSINTE70G02_FLI
tccgcggcgccggcggctctgcatgcgcgcgccctgcggaaactgatccatgatctgatcccacggcaccagcagcagcagcaacggtcgaccgccggaccggccggccggcgcgcgcgcgcggtggcaaataaagagcttagagccgccggccgggatctatggggcgcgaggcggcagcgacgaggccgcccaagctaaggaggggcctgtggtcgccggaggaggacgagaagctgtacaatcacatcatccgatatggcgtcggctgctggagctcagtcccaaagctcgctggcttggagagatgcggcaagagctgcaggctgagatggatcaactacctgcggcctgacctcaagaggggcagcttctcccagcaggaggaggatctcatcgtcagcctccacaagatactaggcaacaggtggtcccagatcgcgtcgcagctaccggggaggacggacaacgagatcaaaaacttctggaactcgtgcatcaagaagaagctccggcagcagggcatcgaccccgccacccacaagccgctcaacgacgacaacgttgctgatgctgctgctgctgcggacaacgacgccgccgtgacgccgcaccaccatcgtcgtcatcaggacgaccactgcggcgccgccaatattgataataataataataataataacaacaacaacaatcggcagctcccctcagccgacgaccactgcttcgccatgagcagcgacgaccctctcgcgccacactccccgaccgtcagcttcgacccactgtccgtcaccaacgtccccacggcaatgcagcagggctcctacggctcgttccgctccgacaacgaccacctctgcgactacggcggcggcggcgtcgacgtggtctcggacgccgccacggcgtacagcgccccctacacaggcggcggcggcggcggagacagctccagcaacagcaacggcaccggcacctgggcctgcagcggcggcgagccgatgccgccgcacgtggccatgttcggccgcgatgctgcccaggcggcggcgtaccatcagttcgtcgacccggccaagtacagcccctggcagcagcacccggcggcgaggctccatgatcacaacgtcggcggcgctgctgcgggcttcccgatacggtccatgtcgcgggacctgccgggttcctgcttcgacctcgcccgcagcgcgctggaggacgagttcagcgtcgacttcctctgacgtacgactacgccgacgcgcgacgtacggccaggaggtcgtcgttggtgcatgtcgtcgtccaacactcactcgatcgacagacacacacacacacatacacttttcattcactactactgctactattacctcagtcctcagagatcacccaaaaaacaagacacacactccttgtgtctgccatattcattcgttatccccccccccccttcttttcatgtggtccggtcatactttatttggacccatcgatcaagttggttaattaacacgttttggtggtatgtcgttatactgtgtttataataagggttttatctgtattattatatatacacctcaattatattcatgggaaccaaatttttttgttgg

SEQ ID NO: 35270 - DNA, 617 bp, Zea mays subsp. mexicana
  Clone ID: UC-ZMFLTEOSINTE74F11_FLI
gaccgaccagagtaccggacacacagcgaggggggaggaagaaggaagcaagagggaggaccgagcaggcctaggccctagggtagtcccgtccggcgggcgggctgactgcctggcgtcggtagggggcgatatctatatctgtcgatgggctactggtgggaccgcgtcgtgctgccggtgcggcgggcctggctcggcgtcgcgtcccgcttcggggttcgccagaccgggctgtggaggctgcggcaggaggtgagcacgtgcgagtacgaggacgtgcacgtgatgtgggagatgctgagccgcaccacggcgccggcgcctaggcggcccagccggttcgggccgcagccgcggccgtggggcagcaggttccgtctctgccgaggcttctagtgctgttgctgcggtgcggggtactagtgattccgcttcattttggcttctctctctctctcttgttctttggttttcgctgcttgtatgtaccgtcgtcgtccatccctcctggctctgagatgtacttccattcctcctcgtgtatccgtctccgcccgcctgctgcagatgatataccggggcatgtgaatgaacagagctgatttcggtcgggt

SEQ ID NO: 35271 - DNA, 420 bp, Zea mays subsp. mexicana
  Clone ID: UC-ZMFLTEOSINTE76B01_FLI
tgtgaacatacctactaatggtgctgaaattggtggagcatttggtggagaaaaagcaactggtggtggacgagaagcagggagtgattcctggaagcaatacatgaggagggcgacttgtacaatcaactatgggagcgagctacctctagcccagggaatcaattttggttaatcctgcagaaatgttgcgcgtggatctcggtgttttctgcagacgtggatgccgtatggaaagaactgatgcaaccgcatttgagatctcagcagacttgagcagcatttattggcgtcagttgtgaaacttaaactgcaggagcatcttgtacataaataaaataagatgtttgttgctcgtgggccgtggcacgttttggtaccggtgtccagtctactaataaaatctaatgcaaaacggtc

SEQ ID NO: 35272 - DNA, 787 bp, Zea mays subsp. mexicana
  Clone ID: UC-ZMFLTEOSINTE77E01_FLI
gggaaatcaacgaacccaaacagcgacgaatcagaaggaaaagtaggtctgcacaagattttgggttctaaggcagaggcactattgaacaagaaagggatatcatggccttggaaagggcgcgagaatgagggacctgatgaaagaaaccatgtgatattgccgtggttgcatggtggccaagagaatggtgtgaatcatcagaaggtttctgattctagtatatctccagacgcccaaggcgctgaacacaaccaacctagcaaaaatgaggcatcaggttcctggtcctctttcaacaataacagcacaggcagtgcaagcagcacgggaagcactaatagcagtgctctctacaaagtagatctcgcagaagcagaagtcggcgttgcgggaggcgtacaagaagaagaacctgctccccctcgacctccgccctaagaagacccgtgccatccgccgccgtctgaccaagcaccagctttctctgaagaccgagagggaaaagaagcgtgagaagtacttccccatgaggaagtatgctatcaaggcctagatcagaactgtgagatgctgtgcttagcatatcatcggctgtgttttaatttttggtttgtatggacatttgttgtgggtcggaagtacgatgtattcctctgtttccataaatggctagattggtttgactggcaattcgtattggcgttcatatttggtggcaacttctctttgtattctgttaaactagatgtttgctgttcattatatttgtgtgaccgtttgacct

SEQ ID NO: 35273 - DNA, 1228 bp, Zea mays subsp. mexicana
  Clone ID: UC-ZMFLTEOSINTE77E09_FLI
gtgcccacatttccgccaccggctaccacctgccgcctgcgccctgccctctctgtttttctagacctccggatcgctcagagattgagtcgtagtcgtagccgactggtcgccgcgtccccctttccccgcgcagcagcagagcaccatccggtgaccgagcaatggaggcggggggcgtgggcctggcgctgcagacgcgggcggcggccttcggctccggccagcgccggggcggcctacagtcgcccattgggaggctgagagtcgctgaaccggcgggagctgcggttgccgtgcgggttcgcgggtccaagcccgtcgtaccgctccgtgcgaagaaatcatccggaggtcatgaaaacttgcataactccgttgacgaagctctcctgttgaagagaaaatcagaagaagttctgttctacttaaacgggaggtgtatttacttagtgggaatgatgggttctggaaaaagtactgtggggaagatcatgtctgaagtcttgggttattcgttctttgatagtgacaaattagtggagcaagctgttggaatgccttcagttgctcaaatattcaaagttcacagtgaagccttctttcgggataatgagagtagcgtcttgagggatctgtcctccatgcgacgattagttgttgccaccggaggtggtgctgtcatccgaccagttaactggaaatatatgaagaagggcctatccgtttggttagatgtgcccttggatgctcttgctaggcgtattgctaaagtgggaaccgcttctcgtcctcttctggaccaaccgtccggtgatccatacacaatggccttttctaagctcagcatgcttgcagagcaaaggggtgatgcttatgcaaatgcggatgtaagggtttctctggaagagattgcatctaaacaaggtcatggcgatgtctctaagctgatgccgactgatatcgcaattgagtcacttcataagatcgagagtttcgtcatcgagcacgctgctgataatccagctagcgactcgcaagctgagtcacagatccaaaggatacagaccttgtaatatcttaatccttctgttttgtaccgaagcgtaccccctagagcatcgttggtttatttgttcgttgaagtgtcacgagggagagaaaaaaaaccctgaagtatttcttgttgtaagttgtaaaggaatggaataaaggagctaataatccg

SEQ ID NO: 35274 - DNA, 1648 bp, Zea mays subsp. mexicana
  Clone ID: UC-ZMFLTEOSINTE78C08_FLI
gcgctcgcggccaccgtcatgtacgacgccaacgtcctggccgtcctctccgaggtcctgtccgccgtcttctgcgaggtcatgaacggcaagcccgagtacaccgaccacctcacccacaagctcaagcaccacccggggtccatcgaggccgcggccatcatggagcacatccttgagggcagctccttcatgaagcacgccaagaaggtcaacgagctggacccgctgctcaagcccaagcaggacaggtacgcgctccgcacgtcgccgcagtggctcggcccccagatcgaggtcatccgcgccgccaccaagtccatcgagcgcgaggtcaactccgtcaacgacaacccggtcatcgacgtccaccgcggcaaggcgctgcacggcggcaacttccagggcacccccatcggcgtgtccatggacaacgcccgcctcgccatcgccaacatcggcaagctcatgttcgcgcagttctccgagctcgtcaacgagttctacaacaacggcctcacctccaacctggccggcagccgcaaccccagcctggactacggattcaagggcaccgagatcgccatggcctcctactgctccgagctccagtacctgggcaaccccatcaccaaccacgtgcagagcgcggagcagcacaaccaggacgtcaactccctgggcctcgtctcggccaggaagaccgccgaggccgtcgacattctcaagctcatgtcgtccacctacatcgtcgcgctgtgccaggccgtcgacctgcgccacctggaggagaacatcaagacctccgtcaagaacacggtgacccaggtggccaagaaggtgctgaccatgaacccctcgggggacctctccagcgcgcgcttcagcgagaaggagctcatctccgccatcgaccgcgaggccgtgttcacgtacgcggaggacgcggccagcgccagcctgccgctgatgcagaagctgcgcgccgtgctggtggaccacgccctcagcagcggcgacgcggagcgcgagccctccgtcttctccaggatcaccaagttcgaggaggagctccgcgcggtgctgccccaggaggtggaggccgcccgcgtcgccgtcgccgagggcaccgcccccgtagccaaccggatcgcggacagccgctcgttcccgctgtaccgcttcgtgcgcgaggagctcggctgcgtgttcctcaccggcgagaagctcaagtcccccggcgaggagtgcaacaaggtgttcctcggcatcagccagggcaagctcgtcgaccccatgctcgagtgcctcaaggagtgggacggcaagccgctgcccatcaacatcaactaaaacacgccaggcgccgccatccatgctgccgcccgcgcatggccggaggaggagaagaggaggaggaaaatacatgaaaaaataagacttgtacacgtgtatgtctccagattgtgccgccgtcgttctcgtcgttgacttttggttgtattggtcgatccatatgtgtgtgcgtgtgtggcgttgttctttcttctttgtgtagctgccctgccaccgcctgcgatgcgcatgccatggcaggtagcgttgtctaagatcctatactgttgtattttgaggtgaactacatctt

SEQ ID NO: 35275 - DNA, 899 bp, Zea mays subsp. mexicana
  Clone ID: UC-ZMFLTEOSINTE79E12_FLI
ccatgtcataagttgtggctacgaggacaagactgaatggggaactgagattgggtggatctatggttctgtgacggaagatattctcactgggttcaagatgcacgcacgaggctggcggtcgatctactgcatgcctaagcggccggccttcaagggatcggctcccatcaatctctcagaccgtctgaaccaggtgctccggtgggctctcggttcagtggaaatccttttcagccggcattgccccctatggtacggctacggaggacggctgaagttcttggagagattcgcctacatcaacaccaccatctacccgctcacgtccctcccgctcctcatttactgtatcctgcctgccatctgcctgctcacggggaagttcatcatcccagagatcagcaacttcgctagtatctggttcatctctctcttcatctcgatcttcgccttctgggtgatcgttcacctgtacccgttcctcaagggtctcatgggtcggcagaaccgcaccccgaccatcgtggttgtctgggcgatcctgctggcgtcgatcttctccttgctgtgggttcgcatcgatccgttcaccacccgcgtcactggcccggatactcgaacgtgtggcatcaactgctagggaggtggaaggtttgtagaaacagagagataccacgaatgtgccgctgccacaaattgtctgttagtaagttataggcaggtggcgttatttacagctacgtacacacaaggggatactccgtttatcactggtgtgcattcttttgttgatataagttactatatatacgtactgcttctactttgtggagagtggctgacaggaccagttttgtaatgttgtgaacaacaaagaaataagttagtttccattc

SEQ ID NO: 35276 - DNA, 1421 bp, Zea mays subsp. mexicana
  Clone ID: UC-ZMFLTEOSINTE90E01_FLI
ggccccgcaccctccgcggcgaacaccagatccggccaccgctccacctctgtccatctcacgccaacgctcactggcgtcctcgttcctccgtgccggggagcggcggagagctttccacctcgtcttagggacctctggcttccttccccctgccggcgatcggcggagatccgctgttctgacatcgtctcccgctgctgacttgtgaacaaggcagcagcatagttcagtttggaaacatgtcatcaaagaagatagagttggatcacaaggacatggtccatgattctgctatcgactactatggcaagcgccttgccactgcctcctcagactctaccgtgaagatcatcaacattggcgcggcaaatgccccatcccaggtccttgcaacgcttagtggccactatggtcctgtgtggcgtgttgcttgggcccatccaaagtatggtgctatccttgcttcgtgcagctatgatggccgtgccattatttggaaggaggatgcacgaggcaattggtctcaagtccatgtgttcagtgacaacaagtcatctgtcaactccattgcatgggctccgtatgaggttgggctttgccttgcctgtgcatcttctggtggtagaatatccatcttgacgatgcgagctgatgggggttgggatactgcaaccattgagcgagcacatcctgttggtgcgactgccatatcctgggctcctgcaacagcttcaatagctggcacaggggagtttgtttacaagcttgtctcaggagggtttgactcggttgttaaggtctggggattcaacagtggtagctggaagctggagagtgctcttatctctgacatgcacacagattgtgtgagggatgtcgcgtgggcaccagttttgggattggccaaatcgaccattgccagcgcttcacaagacgggaaggttgtcatctggaccaggggaaaggatggagacaagtgggagcggaagctcatgcgtgactttggttcccctgtctggagggtgtcctggtccttgactgggaacatattatccatagctgctggtgggaacaatataaccctctggaaggaagggtcagatgggcaatgggaggaggtgatgaaggttgaaacataggatgtccgtcaaggtttctgaagataaagtgtgttttactagtgtttcctgcagatccatgtttcgacgtggacaaagtttgccgttgtgtttcgacagaatatccaattcacttattttggtactttctgacgaggcaattatactcttggatggatcccgtgcgctttagagtggtaatttcagatcggtgagcctgtttagttctgtatatcctcaactttttttggtggaacatcagagctgctgcaagtaatgttatctaataagcactgtagc

SEQ ID NO: 35277 - DNA, 1732 bp, Zea mays subsp. mexicana
  Clone ID: UC-ZMFLTEOSINTE90H04_FLI
gaaaggctcctccatccacgaacaaacacttgcacctcctcgtccccacctccgtcctcgtcgatcccatccacccccagcgctcctcctcgccggcgggcttgctgggtctcgcgatcgtcctcctcctcggctgtgtcttctggggcggcggcggcaggaattaggtaagtggaggcaagggaaggggaggtttgaggtagagcggagccgcagcggcgatgccgtcgcacgcggatctggaccaccagatctcgcagctgcgggattgcaagttcctgccggaggtggaggtcaagacgctatgcgagaaggcaaaggcgatcctcatggaggagtggaacgtacagcccgtgcgctgccccgtcactgtgtgcggcgacatccacggccagttctacgacctcatcgagctcttccgcatcggcggcgacgcgccagacaccaactacctctttatgggcgattacgtcgaccgtggctactactctgtggagactgtgtcgttgttagtggctctaaaagtacgttatagagacagaatcacaatattgagaggaaatcatgagagcagacaaataactcaagtgtatggcttctatgatgaatgcttgcggaaatatggaaatgcaaatgtgtggaagtactttacagacttgtttgattatttgcctctcacagctcttatagaaaaccagatcttctgcctacatggtggtctctctccatcactggatacattggataatatccgcgcccttgatcgcatacaagaggtcccacatgaaggacctatgtgtgatcttttgtggtctgacccagatgaccgatgtgggtggggaatttcaccaaggggtgctggatacacatttggccaagatattgcacaacaattcaaccatacaaatgggctaagtcttatttcaagggcacatcaacttgtaatggaaggcttcaattggtgtcaggataagaatgttgtgactgtgttcagcgcgcctaactactgctaccgatgcggaaacatggctgcaatcctcgaaattggcgagaacatggatcagaacttcctccaattcgacccagctccacggcaaattgagccggacatgacgcgcaagacaccagactactttttgtagaaaaaacaggtgtggctaaaaaaagagagaagagacgaggggaagatgcaggaaatggacccgatgttctgttgtgtctgtattgtgatgccttgctaggtgagatttttcgtttctgttttgactcaacctggtcgttcaacctacgtcggctcatcgtcgaacgttgcccaggctgttaaagatgatttcactttttatgtgtagacatcgttgtacactaggcttttgcaatgctttcatataggacgtcactgtataaggtcagtcaccatgccgcgcccatgccaaccggacgaccggtgctaatgccatgctggatcgggatgagtaagcctgctttggcataagagttcagcaggccgatgaggacgtgggaggcgaaggaccgtgacgtttgaaagggagatggacgagattaaaaagatcgtaacttctaagaggtgaattatgaaagttagaactctttctaagttttggtagactgtttgttgttttggttattaatgacaacataagattattttaactaatgtatgttttgtagagataattgaagtcaggttaataataataacgattgtttaagc

SEQ ID NO: 35278 - DNA, 956 bp, Zea mays subsp. mexicana
  Clone ID: UC-ZMFLTEOSINTE91D11_FLI
gactaaactaaactaaaccaaaaccaagccagtgagcgccctttttcttccgttgctccatgtccatggcttcccgtccgcctcttcgtcgtcgacgtcgtcttcccctcgtcccgctcctcgttctgctctgcctctccccggcatgcgccgccgggagagtcccggtttcggtctactacgaagcgctgtgcccgttctgctccgcgtttgtcgtgaacgacctctccagggtcttccgcgacgggatctcctccatcgctgagctgcggctcgtccctttcggcaatgggcgtgtctcggccgacggaaccgtcacttgccagcatggagaggacgagtgccaactcaacgctatagaagcttgcgtgatcagaatatggcctgacgcggagcagcattttcctttcattcaatgcgttgagcatttagcactgactcggaaatgggacgcctggccgtcttgctttcatgaaactggtctcgcttatcaacctgctattgactgctacatctcagggtatggaaggcagctcgtactccagtatgctgccgagacaaatgctctgcagcctcctcatcggtttgtaccttgggtggtcgtcaacggcaaaccgctcggtgatgattacatgaactttgaggcatacatctgcagcgcttatgacggcaatcttccaaaggcatgcaaggggaagcacctagcaattgctcaggagacgaaagccagccgaggagacaaggtgtgcccagctagcaaaactatcagctaactcgcgtgcgaaaatttattttttttggaatttggataaaactgagtactactttgagtttggttctaagaggttctgcgtttctgctgtcttgttgggtctccgtctattttgaagttagttgaaataacagtgctgtcaaacctttgacagaaaaacatcaaatgcaaacatttcatgttg

SEQ ID NO: 35279 - DNA, 2540 bp, Zea mays subsp. mexicana
  Clone ID: UC-ZMFLTEOSINTE91E08_FLI
cgcagttagctagacataaaagggacaacctgaacttcaagttagcagaaatggagcgtcagcaacatgatctgcttgcacaattttgtcagcttctaagaaatatggttggtaagagttgtatcgtttgggttgtcaagcaagtgttcactgccactacacaggtcttcaattcgatcccaccatggataagtgacattagctctgggatgtatagagtagaagctggttgtttatttctaggtgcagtatcatcttgtctacaaagtggcttcagtccatggattcaaatcaccgaaacaatgctggaggccactttaacatggaaacatggtgctcttgatcatggagtatgtgagaatcatcctgtattgcacattactgctacaggacagtgggttcgtccaggcagtgaagtgtcaaaaattaaaaggtggaattgtcataagctttatcttgccttgtttgcacaagagattcgagagattgagctttctgaaaattcagtgatggagcacctgagcttatttgatcataaggtacagtcatctttgcaattatatgagggcaagcaatctcttgcattatatttacaagccagtctagtgattactctagcactctcatgctatacaagtgctggacataaaatagtgagtgtcaaggaattgcaagttccatgggatcctggtggtacgagttgcacatataaagttacaaaacgtcaacttgaggacaagctgaattttcagggggcggtaatgtcatgcccggcaagtgtcatagttcattttattgggcccatcagaagacagcccattgggccaagaacaaaccaaacccgtgaacaagggcagcggcgggcaggtggttggggacagaaaatcagaaaccaaagacattctcaccgtcttcctcatggaggcatggttcaggtgattctcgatctcctcacgtcccggtcttcaccgccggcggccacggggcgtgacatgctgttcgggaccaaggttccacaacagctctccaagtattcctgtcctgtgcccatgtcttaagttcagggttccactgacttctacctttagcgaagatgactcctatggcttgctctatcttccctatgggagcagacctaccctgtcctatggcttgctctgccttccctgtggtgacctctgctgttcttgctaggagtcaaaactctgcttgcagttgtagagatgagaattcatgagatgcaggcacattattggctgcttgagattctgggctgatgcacatcagcaaagtgaaggcaaatgcagaggctgggctagccgctgaggtgggtgccactagcagattcccatgggtagctggctgctgcgtgggccagtttttagcagagctccaagagcaacttccagactgaatcactgaattcatgagaagctgtgccaaacagtattttttttttctgtgaagtgattatttgctgattcattgaagtgattttctgaaatgaaccaggagactgggaaaacaattcttgtgattcactccgcgcacagaattattagtaaattattgagaatcaaataatcacttttcacaagagaatcaggttccacagaaaatctggagcgggaggagctctaccaaactggcccttaaatcactttcatcttctccatctccaactccaaagtgcacaaggataagaacgttgtgacagtgttcagcgcgcctaactactgctaccgatgcggaaacatggctgccatcctcgaaattggcgagaacatggatcagaacttcctccaattcgacccagctccgaggcaaattgagccggacatgacgcgcaagacaccagactactttttgtagtaagcatgttggcttcttttaacttctctaccgcagcgtctgccgtctgcctgtagatcttcaaaaatgtgttccctctagccgctctgtagcacctctcattctttggtgttgagattttttttctcctcttgtacccccattctgtatgattctgagatagcagagaagagaagctgcaatagaattgtcccgaaatatattctgcttttgtttttttttcaggaaaaaacaggtgtggctaaaaaaaagagaagagacgaggggaagatgcaggaaatggacccgatgttctgttgtgtctgtattgtgatgccttgctagacatcgttgtacactaggcttttgcaatgctttcatataggacgtcactgtatgaggtcaggcaccatgccgcgcccatgccaaccggtgctaatgccatgctggatctggatgagtaagcctgctttggcatagagttcaacagtccgatgaggacgtgggaggcgaaggaccgtgacttttgaaagggagatggacgaggttaaaaagattgtaacatctaagaggtgaattatgaaagttagaaggtttggtgattaacgacaacataagattattataactaatgtatgttttgtagagataatttaagtcaggttaataataataacaattgtttaagc

SEQ ID NO: 35280 - DNA, 469 bp, Zea mays subsp. mexicana
  Clone ID: UC-ZMFLTEOSINTE91H06_FLI
caaagccaaacgtaaagcatcagtgctgtcgtatcaaggcctgaggtcgagcaaatctggtgttgtgaagaaggtgaaagtgacccagcaacccagcaaccaagggaagcagaggaaaactgatgaaactggagcaactgctggcaaagctaagcgacccgctgtggctgcaagaaaagcaaagcagctggccaagaaacgcaaggtggatgcatcaacccctgagaatacacacaggagcaagaaaccaaggaagtaagttgtccattgcgctggtcgtttgcccttgcttcgcattgtaacaggagcttcactaaatcaaattctggacgatcttgtcagatgattgtgttactaggtagaggcaatgtgcgacctcaagtcaggttagggcaaatacaagagcgctctcgctactgtaaaccttgtaaccttatttggcacttgttttgttttactatttccctcc

SEQ ID NO: 35281 - DNA, 929 bp, Zea mays subsp. mexicana
  Clone ID: UC-ZMFLTEOSINTE92C06_FLI
cgttgatcaaacaaaaccaagcggtcgagctagataagacaaccatgaagatgcacgaggtcgaggagcctccagcggagatcacccgcgacgcccacccggcgcacgcgctgaggctggtggccaccgacgacggcgcgccgttccggtgcgacgggtgcaaggagcccggcagcggccaggggcggcggtacaggtgcggccacggctgcgacttcgacctgcacgtggcctgcgcgctggcggggccgactctgaggcaccccctcttcggcgagggcctcgagttccagctcctcccggaggcgccgccgcccgtcgacaagacgttctgcaacgcctgcggcctgcgggcgcccggcctcgtctaccactgcttcgacagggacctggacctccacccgacctgcgccgcgctgaagccggagagcgccttcccgggcggccacctggcccagctcggctgggaggccgccgagcaccgctgcgtcgcctgcgacgccgccgccgccgccggcaagaggttctgggcgtaccgctgggcctacggcggcacgcacgggtacctgcacgtggcgtgcatgaagaagatcgcctttcagagctgggaacaggcctaccaggccagcgtcgtcggcggcggcctcgtggaggcgagcgtgccgacgatgacagccgtgctgcacaggaagcgcaccgacgaaattacgggcggcgttaagattatcgacaccggcatacgcgggcagtacctttccagttcaacttggggtacttaaataattggtactatcgctctagtttattacacccaaaatactgctggcacacaagagggctagctgcctagctatagtgccggcctgtgaatcaagccaacgactttgtgtaccgttgccacctcagctgtgtttaataattgggttttt

SEQ ID NO: 35282 - DNA, 1209 bp, Zea mays subsp. mexicana
  Clone ID: UC-ZMFLTEOSINTE92C07_FLI
aaaacagagaaatattatgagtcgccaatagtttttgtgctcggctgtttcagaattaatagcccccaagatttttttattccacgcccgtttctaaaaagggagagtatggccgccccagcgtcgccgtactgttcccagtaaagacggccactccttccctccccccttctccccctccgtcttcttcccccaggggcatccgtgttttcactttttgctcccccacgttgaaccttgatcctcgtgctccctttcttgattctttctccgtaggatctcttgctaggagtagcctgccccgtgtgcgcgctcgcacggacatgcttgtttccgcgtcttgaaaggcgagaaaaagttgagatgggcgcttgcgcttcggtacacaaggacccggggcaccccaagaagcagtttcttgactcgcccaccaaggcgaaggccgccaacgggaagggtggcgggggcggcggtgttgctccggttggtgatggcttcggtgatctcaagtccaaggtcgacgctgaggctgagcagctgcgggcagagtttaaccccaagaacccggattctggtagcaaggatgaagtgttcttcgaatctcgagcctggttagattccgactgcgaggatgacttctacagcgtgaatggagatttcactccgtctcgtggcagcacacccgtctaccagcccagagcgcagacggtgatgagcagcatctttcagccagacacgcgcagttccaaatcaccggagccttctccgaccggacggaggaagctcgctgagctgctgcaggaggcaatgcaagacggtcccgaagaaagcgccgatgaggaggagcagcagcagcagcagtcgctatctgctgccgctgatgggaagccgccggtgtctgagtccacgtccagctccgcttgcagcaccgtgccaactccggtcgcagtcgccaagagccggaaggagaaggcgtggtacaccggacgctgttgcctgccgagctttgttcatagcctgaccttagacgagagtgagagggggcagaagatgagctctaggccatgtgctgtttgacggtggggctccagtgccctcctgagtcctgccctgagctgtatttagcgcgatatgttatctgaatgcccgattgggacgctgaagctactgtattgagatttgagagtactatatagtaatcaagtggat

SEQ ID NO: 35283 - DNA, 1751 bp, Zea mays subsp. mexicana
  Clone ID: UC-ZMFLTEOSINTE92E10_FLI
ctttcgcccgacacggacatcccctggcccctgccgctccccacccatctccgatctgcgattccttccagccgacgcctccgcatccacctccccggagccaccagcggccagccactggccgtccaaccatcgtccccaagcggcgagttgcggggtgtggcgaagatgatcagcaggcagctcgtgctgacctacctctacctgctgatctacatctgcctctcttcgggcgtcatcctgttcaacaaatgggtcctttctccaaagtacttcaaattccctttccctatcacgcttacgatgattcacatggcattttctggaatcgtgacattcttccttgtccgagtttttaaggttgttgcacccgtcaagatgactttccatatatatgccacatgtgtgattccaattagtgcctttttcgcttcaagtctgtggtttggcaacacggcgtacttgtatatttccgtggccttcattcagatgctcaaggccttgatgcctgtagcaacatttataatggctgttttctgtggtactgacaaattaagatgggacctcttcttgaacatggtattggtcagtgttggtgttgtagtttcatcttatggtgagatccactttaatgtgattggaaccttgtaccaagtcactggtatctttgcggaagccctcaggctggtcctaactcaggtccttctccaaaagaagggcttaaccctgaatcccattacaagcttgtattacatagccccttgcagtttcatcttcctgtttattccatggtatttactggaaaagccagaaatggacgtgactcaaattcaattcaactattcaatatttttcctgaatgcactttctgcattcgcattgaacatatccatattcttagttattggaagaactggagctgtcaccattcgagttgctggtgttctgaaggactggatacttattgctctctcaactattatcttccctgaatccgttattacaagtctcaacataattggatacgcagttgcgctctctggtgttgtcctgtacaattatctgaagatgaaagatgtcagagcaaaccagcttccagcagataataattctgatagggctacaaaggacaagaagtcttctagtatgttcaggcctgacaattccatggacaacagtgatgggactgtagcaggaggcctggcatcagaagctgcagcagttgatgaggaagcccctttgatcccttctgcacgcctctcctacgttacacggacccaaacaggcagctccagtaacagataaccatggtgtacctgttctgtgggttgaccaccatatatttttgttccggtgaacctgaaagaggtgctggtatacgtgtggaaaagaatatggttaaggaagctcctgcaagtcgcacctcatctcataccatgacgacacctggatgtctcctctcgatgtacctttttcgctaggcgtgtatatttcggggagatacctagaggtggattagagaacttgaagagataggctataacttttgcttagtatttggagaaacacgttaggccatgtgttggctatagtatttccttaaccaaacatatggaaatggtgttaaacgttagatgttgtgaagcacttcataggctctaatttgagtgttagtgttgtttccttttcggttctttcattgttcccttaagtactagcggattaccaagtgtgcatccggcaaattttgc

SEQ ID NO: 35284 - DNA, 578 bp, Zea mays subsp. mexicana
  Clone ID: UC-ZMFLTEOSINTE93E03_FLI
gttcccattaagacttcaacactatcaggatttgattccctcctatctattgtgcaaatgccaaaaggtattcctgttgcgactgttgctatcgggattgcagaaaatgcaggtttgctggcagctaggattctggctgcaagagatcctgagctccaggacagggtaactaagtaccaggatgatctgagggacatggttttggagacggcagaaaggctggaggaccaaggcccggaggaatttctgaagggaatggattgaccccttttgaagccctggctctggggcctgggaggaatacgaatgtatgggtcggcgataactcactgtccactcgattatggtttaagatggggagtcatcaagaagatactttaataggctcggctgcattcgattttccttacaattcttttttgataattgtgctatcttaacccatctcaacatgccctttttccttctaatatagggtatgaattgggtttagagggggaaaaaagaatgggagtaaacgttgtacgtacgaaaaataaaacggttcgagtaacgtaaaagacatgcctggaattttc

SEQ ID NO: 35285 - DNA, 1235 bp, Zea mays subsp. mexicana
  Clone ID: UC-ZMFLTEOSINTE93E06_FLI
tccgcgcattttatatgcaggcttgcgcctgtcacttctcccctgtccttgctccccctcgatcccgcatcagtgcgtcacattcaccgggaatggcaacgctcaaggtcccagccactgttcctcccgtcgccgatgactgcgaccagctgcgcaaagcattccaagggtggggcacgaacgaggcgctcatcatctccatcctcggccaccgcgacgccgcgcagcgccgcgccatccgccgcgcttacgccgaggcctacggcgaggagctcctccgctccatcacggacgagatctccggcgacttcgagagggccgtgatcctgtggacgctcgacccagcggagcgcgatgcggtgctggccaacgaggcggcgcggaagtggaagcccgggaaccgtgtgctcgtcgagatcgcctgcacgcgcacctccgcgcagatcttcgcgaccaggcaggcttatcacgagcggttcaagcgctcgcttgaggaagacatcgctgcgcacgtcactggggacttccgcaagctattggtgccacttgtaagtacttaccgctatgatggaccagaggtcaacacaaggttggcacactcagaagccaaactacttcatgagaagatccatcacaaggcttacagtgatgatgagatcatcagaatcctcaccactaggagcaaacctcagctgattgctacattcaatcattacaatgatgcatttggccaccgaatcaacaaggatctgaaggctgacccccaggacgagtacctcagaacgctgcgggcgatcatccggtgcttcagttgccctgacaggtactttgagaaggtggctaggcaggccatagcggggctaggcacagatgaggactccctgaccagggtcatcaccacccgcgctgaggtggacctgaaactgattaaggaggcgtaccagaagaggaacagcgtgccgctggagcgggccgtcgcgggggacacctctggcgactacgagagcatgctcctcgcgctcctggggcaggagtgatgagccgtactggtgcgctggtgccgttctgaccggcaccgtggtgtcgttcgtgatcgtaataaacctgattgcctagctgtacgtgaggctgtttcttcggtcctggtactgtcgctgcagcatgcatagcagtggaccagtggtgataaataagttactgtgctttcgacgaatgaacccaaatttttttgtgtc

SEQ ID NO: 35286 - DNA, 1596 bp, Zea mays subsp. mexicana
  Clone ID: UC-ZMFLTEOSINTE93E08_FLI
cgcagaggcgcagagacaggcgtcttcgtactcgcctatctccgcgactcaaagcttcttccatttcctaccgccgccgctgcagctccaccccattccgtcgacaccatgagggagtgcatctcgatccacatcggccaagccggtatccaggtcggaaacgcgtgctgggagctctactgcctcgagcatggcattcaggctgatggtcagatgcccggtgacaagaccattgggggtggtgatgatgctttcaacaccttcttcagtgagactggtgctgggaagcacgtccctcgtgctgtttttgttgaccttgaaccaactgtcatcgatgaggtgaggactggcacctaccgccagctcttccaccctgagcagcttatcagtggcaaggaggatgcagccaacaacttcgcccgtggtcactacaccattggcaaggagattgttgacctgtgccttgatcgcatcaggaagcttgccgacaactgcactggtctccagggcttcctcgtcttcaacgctgttggtggaggaacaggctctggccttggttccctcctcctggagcgtctgtctgttgactacggcaagaagtccaagcttggtttcactgtgtacccatccccccaagtttcgacctcagtggttgagccatacaacagcgtcctgtccacccactccctcctcgagcacactgatgtggctatcctgctggacaacgaggccatctatgacatctgccgccgttcccttgacattgagcgccccacctacaccaacctcaacaggcttgtgtcccaggtcatctcatccctgactgcctccctgaggttcgatggtgctcttaacgtggatgtgaatgagttccagaccaacttggtgccctacccgaggatccacttcatgctttcctcctatgctccagtcatctctgctgagaaggcctaccacgagcagctgtctgtggccgagatcaccaacagcgccttcgagccatcctccatgatggccaagtgcgatccccgccatggtaagtacatggcctgctgcctcatgtaccgtggtgatgtggtccccaaggatgtgaatgctgctgtggccaccatcaagaccaagcgcaccatccagtttgtggactggtgcccaactggctttaagtgcggtattaactaccagcctccaagtgtggtgcctggtggtgacctggccaaggtgcagcgcgctgtgtgcatgatctccaactccaccagtgttgtggaggtgttctcccgcatcgaccacaagttcgacctcatgtacgccaagcgtgccttcgtgcactggtatgtcggtgagggtatggaggagggcgagttctctgaggcccgtgaggatctggcagcgctcgagaaggactacgaggaggttggtgctgagtttgatgagggcgaggaaggtgatgatggtgatgagtactagaagtatcctgatgcggtcatcgtcaggcttgtgtgctgctcttgtccccggtgtggtttgcaacacctgatgttgtaagactttctggttatgtccgccccgctttgccactgggttattaagaacgtcgtt

SEQ ID NO: 35287 - DNA, 2332 bp, Zea mays subsp. mexicana
  Clone ID: UC-ZMFLTEOSINTE93G07_FLI
ggcgtgcgtggtctccttcctctcgtggcgacgaccgagcggccgtcgctgcttacgtgcccagtcctgttcgtcccttcgccggcgacggccacgacctggttataggcaaagtttgtcctgaactgttcatcatggtggaaggctgggtattctctgctttgttagtggtgtttctagcgttcacaacaccttgcgagtcattctacttgccaggtagttatatgcacacatatcagcaaggtgaagtaataagggcgaaggtgaactctctcacttccattgagacagaactacccttcagttactacagccttccatactgtcgtcccagagatggggttaagaagagtgctgaaaacttaggcgagcttctgatgggtgatcaaatagataattctccgtaccgtttccgtgtaaatgtcaacgaatctctgtatctgtgtactacaaccccacttgacgaggctaatgtgaagctcctcaagcagcgtagccatgatctataccaggtgaacatgattcttgacaatcttcctgtgaggaggttcacagagcagaatggaataaccatccagtggacaggctatccagttggttatattccagaaggcacttctgatgtctacatcatcaatcacctgaaatttaaggtcttggtccataagtatgaaggaggcgaagtaaaggtagttgggactggggaaggaatggaagtgatctcagagactgacaaagatgccaattctggatatgagattgtgggatttgaagttgtcccatgcagcgtgaagcgtgatcctgaatccatattgaagcttaatatgtatgataaagtcgatcctgtgaactgccctgtggagttggaaaaatctcaattggttagggagaaagagaagattacttttacttatgaggttgaatttgtaaacagtgatatcaggtggccatcacggtgggatgcatacctgaagatggagggttcgaagattcactggttttcaattatgaactctttgatggtaattctatttttggctggcattgtatttgtcatattcttgcgtacagtgaggagggacttgactcggtatgaggagttggataaggaggcccaagctcagatgaatgaggagctctctggttggaagcttgttgttggagatgtcttcagagaaccaacctcaccgaagctgctctgtgtcatgattggcgatggggttcagattttgggtatggcaattgttaccattttctttgccgcatttggcttcatgtctcctgcatcgagaggaatgttgttgacagggatgatagtcttttatatgttacttggaattgtgtctgggtatgctgctgtcaggctctggaggactttaaaaggaacgtccgagggatggaggtctgtctcctggtcaactgcttgtttcttccctggcattgtcttcattgtcctcactgtgttaaacttcatgctgtggacaagaaatagtactggagcccttcccatctcacttttctttggccttttgtccttgtggttctgtgtctccgtgccacttacccttttaggtggtttctttggcacaagggctgagccaatagaattccctgttcgaaccaatcagataccaagagaaatccctacgaagaagtactcattgctcttcatacttggtgctggaactctaccttttggaacactcttcatcgagctcttcttcattctttctagtatttggcttggaaggttctattacgtgtttggcttcctccttgtcgtgcttcttttgctgattgtggtgtgtgctgaggtatcagttgttcttacctacatgcatctctgcgcggaggactggaggtggtggtggaaagctttctttgcttctggaacagtggccctttatgtgttcctttactctatcaactacttggtgtttgatctcagaagcttgagtgggccagtttctgctattctctacattggatactctttcgttgtctcccttgccattatgctagcgactggtaccgttggcttcctgacgtcgttctcttttgtccactaccttttctcatcagtcaagattgattgaagatccagggttgtctttacacaaaatcacctgtgagctcaaatgatatgaccattgcatcttgaaggcctttcacagagcagtgctgtttgtaatgtagcttattaccgagagtctgagactgctgtaccttgtaatgaatagtatatttcagcagatgtgttttgaagtttgtcacactttgctacagcattttgttgacctgccaatactgtaggaaaagtcttgcgtttatc

SEQ ID NO: 35288 - DNA, 764 bp, Zea mays subsp. mexicana
  Clone ID: UC-ZMFLTEOSINTE94A01_FLI
gcgcagacaaagctggtccgtctcgcggagaggggaaggtggataggcggcacccacccatcacccatggctgggttgcaaagatcggcgaccacgttcagacggtccggctcgtcgggcctggtctgggacgagcgtttcctgaccgaggccgacgccgaggcgaaggccggcgccgcggaggatgcccagcagccggagctccggcactcgaggagcgtcggcatgctgcgccgtgcgggcggcggtggagacagccgcagcacgaagggcaaggagagtaggcagaagcaggcggagtcggcgcggcgcagcaaccagcaggtgttccggaccaaggacgtggccccggacatggatcccccctcgccgagggtgtcctgctgcgccttctgcgccgtcttccgcgggggctctggcggtactggccgcagggcacaggcacgccgccggtccaagcccaggaagaagtgacggcgtagcaacacgtacgtacgtgcggtacgttgttgtttgtgccatctgtaaagtccgggccatggttgttcgtgcgtgtacatgtttactatactaaatactagggtcatatatagatgagcttgctactcggtaatcggtatacgtacgccattatttagttcaggatagttcctccttttttgggtcggtcggttggtttcttgatccagatccatgcttttgaggtttgggcgacggttagatgttacttgtctactatatatgcagcagctatttatgagatc

SEQ ID NO: 35289 - DNA, 2086 bp, Zea mays subsp. mexicana
  Clone ID: UC-ZMFLTEOSINTE94A06_FLI
ccacctccgtcctcgtcgatcccatccacccccagcgctcctcctcgccggcgggcttgctgggtctcgcgatcgtcctcctcctcggctgtgccttctggggcggcggcggcaggaattaggtaagtggaggcaagggaaggggaggtttgaggtagagcggagccgcagcggcgatgccgtcgcacgcggatctggaccaccagatctcgcagctgcgggattgcaagttcctgccggaggtggaggtcaagacgctatgcgagaaggcaaaggcgatcctcatggaggagtggaacgtacagcccgtgcgctgccccgtcactgtgtgcggcgacatccacggccagttctacgacctcatcgagctcttccgcatcggcggcgacgcgccagacaccaactacctctttatgggcgattacgtcgaccgtggctactactctgtggagactgtgtcgttgttagtggctctaaaagtacgttatagagacagaatcacaatattgagaggaaatcatgagagcagacaaataactcaagtgtatggcttctatgatgaatgcttgcggaaatatggaaatgcaaatgtgtggaagtactttacagacttgtttgattatttgcctctcacagctcttatagaaaaccagatcttctgcctacatggtggtctctctccatcactggatacattggataatatccgcgcccttgatcgcatacaagaggtcccacatgaaggacctatgtgtgatcttttgtggtctgacccagatgaccgatgtgggtggggaatttcaccaaggggtgctggatacacatttggccaagatattgcacaacaattcaaccatacaaatgggctaagtcttatttcaagggcacatcaacttgtaatggaaggcttcaattggtgtcaggctcgttggctcggcgagccaactttttaggctcgccagaagagcaagccgggcttggctcgttacttgattcagaagttggattcaactcgagggccctgcagtgctgttcgggaccaaggttccacaacagctctccaagtattcctgtcctgtgcccatgtcttaagttcagggttccactgacttctacctttagcgaagatgactcctatggcttgctctgtcttccctatgggagcagacctaccctgtcctatggcttgctctgccttccctgtggtgacctctgctgttcttgctaggaggagtcaaaactctgcttgcagttgtagagatgagaattcatgagatgcaggcacattattggctgcttgagattctgggctgatgcacatcagcagaggctgggctagccgctgaggtgggtgccactagcagattcccatgggtagctggctgctgcgtgggccagtttttagcagagctccaagagcaacttccagactgaatcactgaattcatgagaagctgtgccaaacagtttttttttttactgtgaagtgattatttgctgattcattgaagtgattttatgaaataaaccaggagactgggaaaacaattcttgtggttcactccgcgcacagaattattagtaaatcatggagaatcaaataatcacttttcacaagagaatcaggttccacagaaaatctggagcgggaggagctctaccaaactggcccttaaatcactttcatcttctccatctccaactccaaagtgcataaggataagaacgttgtgacagtgttcagcgcgcctaactactgctaccgatgcggaaacatggctgccatcctcgaaattggcgagaacatggatcagaacttcctccaattcgacccagctccacggcaaattgagccggacatgacgcgcaagacaccagactactttttgtagtaagcatgttggcttcttttaacttctctaccgcagcgtctgtgcctgtagatcttcaaaaatgtgttccctctagccgctctgtagcccctcattctttggtgttgagattttttttttctcctcttgtacccccattctgtatgattctgagatagcagagaagagaagctgcaatagaattgtcccgaaat

SEQ ID NO: 35290 - DNA, 1831 bp, Zea mays subsp. mexicana
  Clone ID: UC-ZMFLTEOSINTE95A06_FLI
caaaatgatagtaaccaactgggcacaacaagttcgtctagtgtgcttgtgccaaacagcagaaaacagaatgctacagccaccaaacataaagtgcactcaaacccagcaacccccagtaggcaacggagcaatattcaccaaataaatgcccatccaagaaaagcgagggctgccaacacatttgctggaagcagtagtcaaggtagcagaaaggtggacttgcagccagatgctcgtgcaaatgtaagaaataattctgtatccaaagcaatcccgaagccaagaagattacaagacagaagagtgtactctgatacaagccagtcaagtgatagtattaattctgacaggagccagaggcggattcggcacaatattgtgattgatgagcagtcatctttttcaacaaacaaaaagaaagtcagcactgagattgtttcattcacatttacctcgccagttcataagtcactacatggcaagcaaatattagggaatcagaacaccgtgtcaacttcaagcaatacatcaaacactaaacttgatgccatagatggaaaatttttgggactccttttggagcagaaattgagagagttgacatctggtgtgagatcaccctacactaagccagccgaaggtgctcaagcgtaccacacttcaacagctttggaagatatggcatcagcatgtgaaacatctagcattgcttctactgattatgatagggagtcattacagtctttcagtgatggaaaagctactctgccctatacagatcttgctactagaagtgtccagtcatctcagcctgtgaagtacgatcatggcgtcacggaccgatcagagctcgagcatcttggccaaagcccccttttcacatgggaggtttctatttcaactgaaacctgcagctcatcagagagctggaggaggcctgcaaatggaggaacaagactgttcagttcgaccgaaggagcgacaacttctgattcgacgcgcttcaacaaactcctagaagcggacgcctcttcagaatactccgacacggcctcatcaatcacagtggccacagcagaaatccctcgatcagaaagtagcagctcgtggcatatggatagcagacaggaggtggagtttataagagagatactgaacgccagctctccctgccgcggcatctccccttatctggagcggttcagcaacggcaactcttcgggtattttggatccacatctactggaggagttaaatggcggcactaggctgctggccggtgaagagggcaaaggtcacagactgaggcggaggctgctcttcgactgcgtcaatgaatcgctgagcgtgaaatgcgcgcactacttcagcgccggctacagcttatggttcacggggatggcggttctgcagagcctgtcggcggcagaaatgcatcgggagatgaccagcctgacggtcgccgaggagtggatggtggacgagctcgtgtacagggagatgagtggtcctatggggagctgggtcgatttcaggactgaagcgtaccaggccggcggagacgtggcggcggagctgctgggttccttggtcgatgaagcggttgctgaacttctgacttgcggcggctagctcgtcgtcgtctttgtagctgatgttggattggattgggtcccccgcgctaacgataccagttgacagccgcaaggtttttgctccatgtattgttccttgtttgtatcctgtatatcggtaggtcgctcgagaaattcgtgtagcgtagcattcctaagatgaaatgtcactaacttacaattgttcgatggtt

SEQ ID NO: 35291 - DNA, 1770 bp, Zea mays subsp. mexicana
  Clone ID: UC-ZMFLTEOSINTE95D03_FLI
cttctccctcttgccggtcccgaataaagagcagcagcgcaagaggtcggtagagcgagaagaaggcaatggcggccgagagcttccttttcacctcggagtccgtgaacgaggggcaccccgacaagctgtgcgaccaggtgtcggacgccgtgcttgacgcatgcctcgcgcaggaccccgacagcaaggtggcctgcgagacctgcaccaagaccaacatggtgatggtgttcggcgagatcacgaccaaggcgaccgtggactacgagaagatcgtgcgcgacacctgccgcgagatcgggttcacctccgacgacgtgggcctcgacgccgaccgctgcaaggtgctggtgaacatcgagcagcagtcccccgacatcgcgcagggcgtgcacgggcacttcacgaagcggcccgaggagatcggcgcgggtgaccagggccacatgttcgggtacgccaccgacgagacccccgagctgatgccgctcagccacgtgctggccaccaagctgggcgcgcgcctcaccgaggtgcgcaagaacggcacctgcgcctggctgaggcccgacggcaagacccaggtgacggtggagtacgtgaacgagggcggcgccatggtgcccgtccgcgtgcacaccgtgctcatctccacccagcacgacgagaccgtcaccaacgacgagatcgccgccgacctcaaggagcacgtcatcaagcccgtgatccctgagaagtacctcgacgagaagaccatcttccacctcaacccgtccgggcgcttcgtcatcggcgggccccacggcgacgccggcctcaccggccgcaagatcatcatcgacacgtacggcggctggggagcccacggcggtggcgccttctccggcaaggaccccaccaaggtggaccgcagcggcgcctacgtggccaggcaggccgccaagagcatcgtggccagcggcctcgcccgccgctgcctcgtgcaggtgtcgtacgccatcggcgtgccggagcccctgtccgtgttcgtcgactcgtacggcaccggcacgatccccgacaaggagatcctcaagatcgtgaaggagaacttcgacttcaggcccgggatgatcagcatcaacctcgacctgaagaagggcggcaacaggttcatcaagaccgccgcctacggccacttcggccgtgacgacgccgacttcacctgggaggtggtgaagcccctcaagttcgacaaggcatcggcttaaggttgggagtgttcactgtggacatgaggactaccttcctctggctctgctgttacctgcaagcattgctgctgctggatgtgtgtgtttgatcagtgactggctgctgctccatagaagatgaacggagagaaggatgatgaagggctttggcaatcgccgctgcaactgcaacccatgccatgccggcttagtgattgggtataatttggcttggcagcagccagcattattatgtgctgatctgttatcttttactagtttggtcgtccgatatctttctttctttctttttccccccttttcgactctgtactgaaactgctgagagattcgcagtattgttgtatcgtattcatatgctactgttactctctctctctctctctctctctctctctctctctctctctctctctctctctctgtaactgctgagagttttctccgtccacttgtgcttgctctatcggtgacctttgagaaccatgaaaggtgatacgacatgtttcatgtg

SEQ ID NO: 35292 - DNA, 1622 bp, Zea mays subsp. mexicana
  Clone ID: UC-ZMFLTEOSINTE95E07_FLI
ttccattctattcccgcttccacacgtcggtcggcgcccttcgcgatcgtgtcgtttctccccgcagcctgcctgcctgccgcctgcctgcgtgtggggtgatggctaggcacttcaagtacgtcatcctcggcggcggtgtcgcggcggggtacgcggcgagggagttcgccaagcagggcgtcaaccccggcgagctcgccatcatctccaaggaaccagtggccccttatgagcgccctgcactcagcaagggatacctcttccctcagaacgctgcaagactgccaggcttccacacgtgtgtgggcagcggtggagagagactacttcctgaatggtactctgagaaaggcattgaactgatcctgagtactgagattgtgaaggccgatcttgcttcaaagactctgaccagtgcagctgcggaaaccttcacatatgagaccttgctcattgctacgggctcctcggtcataaagctcactgattttggtgttcaaggagcagaatccaacaacatattgtatctaagggacattgcggatgccgacaagttggttgcagctatgcaggcaaagaagggtggaaaggctgtgattgttggaggtggttacatagggcttgagcttagcgctgccttgaaaatcaacaacttcgatgtgaccatggtgtaccctgaaccgtggtgcatgccccgtctcttcactgctggtattgctcatttctatgagggctactatgctaacaaaggaatcaaggttgtaaagggcacggttgctgttggtttcgacgctgatgccaacggagatgtcactacagtgaagttgaagaatggaagtgttctcgaagctgatattgttattgttggcgtcggcggcaggccattgacgcgtctcttcataggccaagctgctgacgagaaaggtggactcaagaccgatgcattcttcgaaacaagcgtagccggggtatacgcgatcggcgacgtggccaccttccctctgaagctctacaacgagcagaggagagttgagcacgtggaccacgcccggaagtccgccgagcaggccgtgagggcaatcaaggccaaggagtccggcgaatcggtggccgagtacgactacctgccctacttctactcccggtcgttcgacttggcgtggcagttctacggcgacaacgtcggcgacgacgtgctgttcggcgacaacgacccggcctcggccaagcccaagttcggcagctactgggtgaaggacggcaaggtcgtcggcgtgtttctcgagggcgggtcggccgaggagaaccaggccatcgccagggtcgccagggcgcagccgccggtggccgacgtccaggcgctgaagcaggaggggatcgagttcgcttccaaaatctgagctcttggaaaggtgtaaaaaaaagaaaccttggtaccagttttagctgatttctttggcaattctactttgagccttttcagaccacttgagtgctttgttacacagtagttcagattagttgttagcccctccctaataatttggccttcgatgtgatgttgaaagaaccaccgtgggatgacgatcctattaataaagcatgtgatttgtagcgtc

SEQ ID NO: 35293 - DNA, 1921 bp, Zea mays
  Clone ID: UC-ZMROB73001A10_FLI
gcagtacgagcgatttataaactctttccggtcgctggagcacaatacccgcggcgagcctgactccatcgtcgcgctggccaaatggaggatcctcaacaggttgcacgaccggaacgagacattgtactacaggttgctaattgacaatatcaaggattttgccccgataatatacactcccactgttggcttggtctgtgaaaattacagcggtctgttcagacgaccccgtgggatgtatttcagtgcaaaggataagggggagatgatgtcaatgattcacaactggccagcagagaaggttgacatgatagttgtgactgatgggagtcgcattctaggcttaggtgaccttggtgttcagggcataggtatacctattggtaaactggatgtttatgttgcagctgctggtattaacccacagaaggttcttccaataatgcttgatgtgggaacaaataatgaaaagcttctggaggacaagctatatttaggactgaggcaacctcggctggaaggagaagaatacttggctgttgtagatgaattcatggaggctgtccatgcacgttggcctaaagcagttgtgcagtttgaagacttccaaatgaaatgggcctttgagactcttcagaggtatcggaaccgattttgcatgttcaatgatgacgtacaggggacagctggagttgctctagcaggcctacttggtgctgttagagcacagggccgtcctctccaggattttacgaatcaaaagatagtcgttgtgggagctggaagtgctgggataggtgtgcttagcatggctaaacaggcaatgttaaggatgcctgggatccacagaaccggggaagggcataatcaattctgggttctggacaaagatggccttattacgaaagctaggaaggacctggattctgcagtggcgcgttttgccagaggctttggtcctgatgaggtcccagatctctatgagggggctagtcttgttgaagtggtcaagaaagttaagccccatgtgcttttaggactatctggagttgggggcatatttaatgaggaggttctcaaagctatgaaagaatccgattcccctcggcctgcagtttttgcaatgtccaaccctactactaaagctgaatgcactcccgatgatgtattcaagcatgttggagataaagcgatatttgctagtggaagcccttttagtaatgtttctttaggaaatggtaaatctggttatgctaatcaagcaaacaacatgtatctatttcctgggattggtttaggtgcccttctttcaggtgcccggcatgtttcagatggcatgcttcaagcagcagctgagtgcctggcatcatacatcacagacgacgaaattcgaaaaggaatcctcttcccttcggtctccagtattaggcacatcaccgcacgtgtcggcgcagcagtcgtccgtgccgctgttgctgaagacctggctgaggggtgctgtgatgtgggtcctagggagcttgggagtatgtcagagtcggaagcagtggactacgtcgctcggaagatgtggtaccctatttacagccctcttgtgagcgacaaataataaatccgaagatctcgatgcctgcgcagaagcagatgttccattgaaggaatgtatcggatttgatatttttcttaaccatctctaaattagctgctcatctagaaagcatttcggcagagattggtgcccacgcatatggctaatgtatggctacattcatttgctctagacatgatttcgtcaccaggggacactcagttttgaaccgttgagcttcatactgccacgggaaccgtatttttcatcattattgtaatataaggcgccggagtttctgtcctgaaaataagcatgagatcagaagcg

SEQ ID NO: 35294 - DNA, 972 bp, Zea mays
  Clone ID: UC-ZMROB73001C09_FLI
gtttcaggcagcagcccacggagtccggcagccatccaatgctccaccaaacaacgctcatccctccctccgtctccgccgcctcctcctcgcctttcctccacgccgccaccacagccccggctccgggtggaggttcctgcaccccagccttcctgcgaggcgcctctgccatgccgtcgtacgcgcaccaccgtagcagccctctggacgatggcaggatggacgcgctgaagtgtaacaacagcgtcctgccggaggagaccaccgcggacgccgccggggcgttcgtggagaaagacgggttctcggtcgaggacctgcttgacctggaggagttcgccgagcctgacaaggacgtcgccgaacgcgaggatgacgacgcgccaccggcagccgccgcggccgcggagaggtcgaaagcggactcgcagccgtcgtcggtcgtgaagtacgacctccctccgctgctgccgccgccgccggagatggttgacctgccgtcgcacgacgtcgaggagctggagtgggtctcccgtatcatggacgactcgctctccgagctgcagccccaggcgcagccgaagccggccgctgctgtggtcgcgtcgtcggcagcgcggccccctctggcgcagcagcggcgtccgttcgcgcacgacggtacataccgggcggtggcggcggcgccgccgcaggccggcccgcagcggacgccgaccatatgcgcgctgtcaacggaggcgatgataccggtgaaggcgaagcgcagcaagcggtcgcggggcccggggtggtcgaggccgggcgcctcgttcctgcccgactcggcctcgtcctcgtcgaccacaaccacttcctcgtgctcctcgtcaggttccatctcgccgttcctccgtctagactcgtccccgttcggcggcgggctggagctcggcgagggccttttcagctacggccacctcctgccgc

SEQ ID NO: 35295 - DNA, 895 bp, Zea mays
  Clone ID: UC-ZMROB73001D10_FLI
gctttgaatgtgtaggagttatcagttccatatctccattgtgtatatccttgcattgggtaatttggggaaggaactacaaagaagaatatgcctatgtgtttgtgtatctgtgttttgtctaccatttgatgtgttgacaataatccatgattggtctgttgtcatatgcagtctataaagccagaactgatagtacaagtggagcctattgaggacccttatggcccatccataactgatgagaagttggatgccattattgtcagtaaggagacattaaatggtggactggctgtaaataggaaaagagaagagaaagggttcccactgttgaaggttcatttgtgcttgcttctatattttctttaattgattttattctactactcgatgcactatgtagctggctcaaatgtgaatgatttaaatttcaggttgaggttgttgatctcctttccggcggtgtggagggggaaaaattgagttcttctgctttaaggaaacttgaggcagaacaagctcaacaaagtgaaacaaaatctggtagccttgaagcttcttagggaggaaattgaatactttgatctggttagctgaatgcacaaatacgggggtgatctgctccaagctcagtgtgaacaaaaaatatgatcagagctgacagtttggttacctttctagaggaataatcttcgaacactggcccatggccctgtaacagtattgctctaaccttctaaaatcaacctggcaacatagactctcccctactaaccaaatttacaaattttgtattggcaatgccatctgaatgttaaaaggaaatcttcttgggtttgtataaatatctacaattgtgacaaagctacaaacgaatatggttccccttcgc

SEQ ID NO: 35296 - DNA, 384 bp, Zea mays
  Clone ID: UC-ZMROB73001F01_FLI
gcgacagtggattgtcgacgaacaagttgccgggtacacccaaggatatgaaaagggccttacttttgccactattaagggtgctgggcacacagttcctgagtacaaaccacaggaagcactagctttctacagccgttggcttgccggtgctaaactgtgaggaggcctattttgtgtgcaaaggtcatgcagtactgaatcaaacagaagttggataaagcatgcagcaataaggcagtcgaaggatcaaagtatccaacgcgccaactacaatgttgcattcattttcacatgttataccaatgcagttgctaattacctgcattgttcatgagttcacagtccatctaattggttgaccacaccgtctcatcttgcacc

SEQ ID NO: 35297 - DNA, 1742 bp, Zea mays
  Clone ID: UC-ZMROB73001F07_FLI
ccttaccttatcattattagctcctccaagcaagtcgcacacgacacatcatcatcaacagcctgacatggccggcgacgacggggcgcacggcgcgtcggcgcggctggagggcgtgctgacggacgcgtcgaccccgtgggcgcggcgcgcgtggggcgcggccgccatcgagctgccgctgctgacgcggctggcggcgccggcggtggtgatgtacatgatcaactacctcatgtccatgtcgacgcagatcttctcgggccacctcggcaacctggagctcgccgccgcctcgctcggcaacaccggcgtgcagatgttcgcctacggactcatgctgggcatgggcagcgcggtggagacgctgtgcgggcaggcgtacggcgcccacaagtacgagatgctgggcatctacctgcagcggtcggccgtgctgctgtgcgcgacgggcgtgccgctggccgtgatctacggcttctcggagccgatcctggtgttcctggggcagtcgccggagatcgcccgcgcggcggccatcttcgtgtacggcctgatcccgcagatcttcgcgtacgccatcaacttcccgatccagaagttcatgcaggcgcagagcatcgtgctcccgagcgcgtacatctccaccgcgtcgctggcgctgcacctgctgctgagctgggtggtggtctacaaggtggggctgggcctgctgggggcctccctggtgctgagcctcagctggtggctcctcgtcgcggcgcagttcgcgtacatcgtgatgagccccaggtgccgccacacctggaccggcttcacctggcaggccttctcgggcctctgggacttcctcaagctctccgccgcgtccgccgtcatgctctgcctcgagacctggtactatcaggtcctggtgctcatcgccggcttgctccccaaccctgaacttgcattggacgcgctgtctgtatgcatgactgttaatgggtgggtgttcatgatcgcagtagggttcaacgccgctgccagcgtgagagtgagcaatgagctcggcgccggccaccccaagtccgcgtatttctcggtgtgggtagtgaccgcgctgtcgacgctcatatctatcatgctcggcgttctggtcctctgcctgcgcaactacatcagctacttgttcacggagggcgaggtggtgtccaacgcggtggccgatctctgcccgctgcttgccgtcacgctcgttctcaacggcatccagcctgtgctgtcaggtgtcgccgttgggtgcgggtggcagcagttcgtggcctacgtgaacattggctgctactacatagtcggcgtccccctcggcgccgtgctcgggttcgtcttcaagctcggtgtgaagggcatttgggctgggatgatcggagggacctgcatgcagacggctattctagtgtgggtcaccttgagaactgactggaacaaggaggtagaggaagcacagaataggttgcacaagtgggaggctaacaagacgacggagccccttcttgcgggggtcagcaatgacaaataaataacgtaactgcgcgcggatgatcgatcgatccacaatatcaatcaatctccggccttcaccagtactagttcccttcatgcataatgttgggaactggcgtctttagattttctgtgcagtaaattaaatgaaccacggtaacgtcaatgtaaacgaatcacgcatgtttggtttgctt

SEQ ID NO: 35298 - DNA, 1574 bp, Zea mays
  Clone ID: UC-ZMROB73001H08_FLI
ttcacacgtaccgccggcggagaaggaaggaattggtcgccgccgcctgcctctctcctcctcctcctccgtcagtggctgtggccacgccgtgctaagctaagctaagctaagctaagcttgcgcaagtgacaagttctttggttggttggaggcagagccagatggcatcgtcgtcgcggctggatctcccgccggggttccgcttccaccccaccgacgaggaggtggtgtcgcactacctgacccacaaggcgctggacagccgcttctcctgcgtcgtcatcgccgacgccgacctcaacaagatcgagccgtgggatctcccaagcaggcaaggctaagatgggcgagaaggagtggttcttcttctgccacaaggaccgcaagtacccgacggggatgcgcaccaaccgcgccaccgccagcgggtactggaaggccacggggaaggacaaggagatcttccgcggcagtagcagtagtccccgccgcgtgctcgtcggcatgaagaagacgctcgtcttctacacgggccgcgcgccgcgcggaggcaagacgccgtgggtcatgcacgagtaccgcctcgagggcagcctgccgcacaacctccaccgcggggccaaggacgaatgggctgtgtgtaaggtgatcaacaaagacttggcgggcaaggctgggcaacaacaaatggcgccgccgccgcacgccgtgtccgtgggcatggagcgcagcgactcgctggccttcctcgacgacctggtgctcgacaacgccgacgacctgcccccgctcgtcgactcgacaacgtacgccgccggctccctcttcgccgcggcggggacgaccacgacgacgaacgacgacagcggcgggtaccaacaagccaccaaggcggagccgcagccgcagctgcccgcgccgagcaacagcccgtaccagcaccagcagcaggccatacggaggcactgcaaggcggaggcgccggcgccggcgatggtgctgagcccgtcgcgcgagacgccgggcgcggacatgttccagctccagcatgtggacgagctgctccagctggacggcggcttcatggaggactactacaacatgaacatgtggaaggtctagttaggctgggatcgaccggccggccggacactagtactatacgtaattagttccatttagtccctatttaatttgggtccatcggtttgccgggcggatggattgattagttggttgattggatatattaacctgttattagacgcagaagagtggaaggaaaggccggccgcgccgattggcatggacgaggtctgtctgacgaagatgtgtcgagacctcgccggcggtgtggtttgtgatgattggttagttggctaatcttcagtagctagctacgtactgagtaattagaacagctagcagtagtgtgtaaccgcgcgcgtgtcgttgcctctggtcgacaggattgaagcacgcattgtgtacataataataggtaggagtcgtcgtcgtcgtcgttgagtgatgagaaaaatggatgaaacatactatatatgctgttgatt

SEQ ID NO: 35299 - DNA, 1443 bp, Zea mays
  Clone ID: UC-ZMROB73002A06_FLI
gtctttccctcgcctctctctctctctctctctctctctctctctctctctctctcgaaacccacgtgaagcctgagcgccgaggcctcccctccgtccaccgatcccgccgctcccctccatccgcattcctggccacgagccgtgaaatcgggatccgctgcggccgctgatcccgacgacgagcccggattcgcccgccggccccatgggtcccgtcttctccggccgcatttgggacatatagccgtcgcgcgctcttcttcctgggtggagcgtccatgaggtggaagcagcagcgtccctagtgccagggtctgtcggctgagtgcgggggagaatgaaaggagtgtccgaaggcctgatcatcgggaccacggtcggggtggtcataggcgtgctgctggctctcgggacgctgctgtgcctgaggcggcgtcggcgttcccagacgcagataaggagcagcagctcgaggagggcgtcgactgtccccatccgcaccaatggcgttaacgcctgcgccatgctctcgaactcgaccacggggcaggagtctccgactccgcgggagctcgaagagcgtgggagttctctgtggatccaagggccaggtagaaagagcgtgatctctgcttctggggtacccagatatgcgtacaaggagctacagaaagctacaagcaatttcacaacattgttaggccaaggagccttcggccctgtctacaaagcagacatgtcttctggcgaggtactggctgtcaaagtgctgtcgaacaattccaggcaaggtgaaaaggagttccaaaacgaggtcttactccttgggcgactgcaccacaggaacctggtgaatttggtcggctactgcgccgacaaagggcagcatatgctactgtacgcgtacatgccgaacgggagccttgcgtcacacttatacggcgaagacagtgcgccactaaagtgggacttgagagtaagcatcgctctggatgtcgctcggggtctggagtacctgcacgacggggctgttcctccggtagtccaccgcgacatcaaatcccccaacattctgctggaccaggcgatgcatgctagggtcgccgacttcgggttgtcgagagaggagatggtcactcgcggcgacggcgccgccaacaacatacggggaacctacgggtacctcgacccggagtacgtgtccacgcggtcgttcaccaagaagagcgacgtgtacagctacggcgtcctgctgttcgagctgatcgccggcaggaacccacagcagggcctcatggagtacgccgagctcgccgccatcaacgccgacgacgggaggaggaccgggtgggaggagatcgcggacgcgcggctaggaggcgcgttcgacgcggacgagctcaacgacgtcgccgccgtggcctaccgctgcgtcagccg

SEQ ID NO: 35300 - DNA, 940 bp, Zea mays
  Clone ID: UC-ZMROB73002B11_FLI
ggcagcagcagcagcatgttcccacaggcagatgcgcatccagcccacgagcctctcgccggccgggtggccatcgtgacaggaggcgccgggggcatcggctcggcggtggccgcgcacctggcgtccctgggcgcccgcgtcgtggtcggcttcatcggcgacccggcccccgcggaccagctcgtggcggccctcaacaactcctcgccggcaggcaacagcgacccgcgcgccgtggcggtggcagcggacgtgtcggacccggcgcaggtggcgcggctgttcgacgcggcggaggcggcgttcgggccggagctgcacgtgctggtggccgcggcgggggtgcaggacgcgacgtacccgcggatcgcggacacgtcgcccgagcagtgggacctcgcgttcggcgtgaacacgcgcggcacgttcctgtgctgccgggaggcggcgcggcggctggcgcgcggcggcgcgggccgcatcgtcaccctctcgtcctccaacgtggggtcgctgcggcccgggtacggcgcgtacgtggccagcaaggcggccgtggaggccatgacaaaggtgctggccaaggagctcggagggatggggatcacggccaacgccgtggcgccgggccccgtggccacgcccatgttctacgcgggcaaatcggaggagcgcgtggccgccgccgcgcgcgagtgccccatggggaggctcgccgagccagcggacgtggcgcccgtggtggggttcctgtgcaccgacgccgccggctggatcaacgggcaggtcatccgagtcaacggcggctacgtgtgagtgtactgtgatgagagggaggaggcatagctagctagcttagcttggagtgtcagcgtgtcaccaaccgacaattacacgtgctccttcccttaataataataataataataataataat

SEQ ID NO: 35301 - DNA, 2037 bp, Zea mays
  Clone ID: UC-ZMROB73002C03_FLI
aaacaatagctaagtttcgttctgatttgcaaccaaatctcgggaaggcttcatcccaggttgctgcgattaaaattaatgttgttgctgttgctccaatagttggagtttgtgacagcaacaatgacatgtacaaagaacctaaagatcaagaaaccatcactggtccagtggcttggtcaccacaggctgtgcatgctgatgttgatttagacaatcacaatgaaccaattaatcctcctattgatggtactcaatcaatgtttggcgaagtcccaggaagagaaaagggaaaatcaaaatctgtatcttttgctctatcggatgtttctgggatagctagccctatagataccaattctgagatgggtaacatcggcgattcctgtagtgacaaattgactgatgaaaatttaagtaactcatctcgtcatatcgctgaaaagcattctattaccaaggaccaatattcaaatgagcaggaccatgagcgggagccactagatcatgctgttcaacagcaaccaaaatcggatgttggagaaagagcatcatctatgaaacgacgttgcaggaaaaaggtgcaaaaagttgggacacctaatcacactgttgatgattattttggtgaagactgtgtcgaaccttcattagctgaagaagataacgatactggtgatcattacactactggtaataagcataaggctaggaaaaagtcaaggggtggtgtagaagagtcacagcagcagaaagctcaaaaaaataaaagcaaggtgtcttcacggggccgcaaacggaccttgaaggatgaatcgacagagaagcctgagaagaagctaacccacagaatacgtcagaggataccaaaagaggttaaggctttactggaaacacctcgtgagcagataaaacccatgaagctttgtgcatcacatctcaggttgttacaagaagctagagagcgtgttgatccaaaagggattccatccgggccatcctctaatacaagaaactttcaactagatgatatggatgatttgggctacagagatgaggaagctaggttctttgacaacgatataacagaggagcatgtacaaaatgcaacaaaattgaactaccattcctacatgaacaaaccagcccggggaaaatggtcaaaatcagataccgacttgttttatgagggtcttcgacaatttggtatcgattttgcaatgatacaacaattattccctgataagactcgccatcaggtgcggcagaaatttaaatctgaggagagaaaaaatccattgctagtccatgatgctatagttcatcgctcaggagataatttgtatttcaaaaaggtaattaagcagctcaacattgaagatgttgtgctgccagatattaaaagtacacaaaaacaagatggtgcatcaagtgaaagaggccctggaaatgagaatgtactggatgatttaaacgaggaggaaaatagttcaaattggttgaacgaagagcatgacgtacagatggctgatgtggaagaagagcatggcgaacagatggatgatgtggaagaagagcgtgatcttggaaatgatggtggtgatgatgatcttggggatgtttttgattggtactagtttatgttaaacatggatgcgagcgtgaatatctgagttggtctagctctgcatgacagggggtagtttttaggaaaaaaaaattctttgcatccgggatacaaagaatctcttttagggctgatttggtgactaggtatcatgaagggattggaggagattgagagcctccaatccctcagtgatcccttgtcaccaaatgaacccttatagcctctaacatccaccacctcgtggtccatataagggcttgttcggttattcctgttcatgtggattagatgagattggaaaaaaatatgaaggattttaacttaaacccatccaatccacatggattgagagaaaaacgaacaagcgctaaatagaagaaaaataaattactattggattaagttgt

SEQ ID NO: 35302 - DNA, 2964 bp, Zea mays
  Clone ID: UC-ZMROB73002C11_FLI
ttctatcagcgctgagtgaaaagttgtatgtaatcaaaggaggatgtggagctgcaagttctgttaagatggtcaaccaacttcttgctggggttcatatagcttcagcagctgaagccatgtcatttgctgctcgactaaatttgagaacgagaagagtcttcgaaattatgcaacatgcaaggggttattcatggatgtttggaaatcgtgtgccacacatgctcgataatgattatacaccctattctgcagtggatatatttgtcaaggatcttggtatagtatcttgtgaaagttccaattcgaggatcccagttcacgtctctagtatagcccaccagctgtttatttcaggatctgcttctgggtggggtagatatgacgatgctgccgttgtgaaggtctatgagacattaactggtgtaaaagttgaagggaaggctccgatgctcagtaaagaagatgttcttcagtctcttccatctgaatggccagaagatccaattgataatcttgtacctattgcatctcatagtagcaaaaagtttcttgtagttttagatgatgatccaactgggactcaaacagttcatgatatagaagttttaactgaatggcctgttgaagcccttgttgaacagttcctcaagctaccaacttgcttttttattttgacaaactctcgttccatgactgctgataaggccatgctgctagtacaaactatctgtaaaaatcttaaagctgcggcagagaaggtccctggtgttagttatacaatagtcttgagaggtgattcaactctacgtggtcatttcccagaggaagctgacgctgctgtctccgtattaggtgagatggatgcttggataatctgtccattttttcttcaaggtgggagatacactattaacgacatccactacgtcgcagactctgatagattaattcctgctggtgaaaccgaatttgccaaggatgcagtttttggctataaatcttccaatctcagacagtgggttgaagagaagaccaaaggacgggttttggagaaccaagtttcaacaatttccataactctcttgcgtaaacaaggaccaactgctgtttgtgagcatctctgtagcttggagaagggctctgtgtgcatcgtcaatgctgctagtgacagggacatggctgtctttgcttctggaatgatccaggctgaattgaaaggaaagcgatttctctgccgcacagctgcaagttttgtgagcgcaaggattgggatcaagccaaagccacctatctgtccaaatgaccttggcttaaaaagagctttaactggaggcctcataattgttggttcatatgtgccaaaaactacaaagcaggttgatgagttgcgatcacagttcgggcaatctcttcgagtcatagaggtgtctgtcgagatggtttcaatgaaatcaatggaggacagagaccaagaaatcagacgaattgttgaactagggaatgcttatatacaatccagaaaagacactctaattctcaccagccgccaactcattactggaaaaactcctgaagaaagcttagaaattaattataaagtgagttcagcactagtggagattgtgagaaggattgatagtaaacctcattatatcattgcaaagggaggaatcacttcatctgatattgctacaaaggcgctggaagctaaacgtgccaaagtcatgggacaagcattagctggtgtacccttgtggcagcttggtcctgagagtagatttcctggggtcccttacattgtttttcctggtaatgttggtgataacagtgctcttgctaaagtggtgaaaagttgggcttccccatctagaagttctacaaaagaaattcttcttaatgcggagaagggcggttatgctgttggtgctttcaatgtgtataaccttgagggaattgaagctgttgttgcagcagcagaggctgaaaagagtcctgctattcttcagattcatccgagtgctctaaagcaaggtggagtcccactggtagcatgttgcattgctgctgcagaacaatccagtgtgcctatcagtgtccactatgaccacggcatttccaagtcagacttgcttcaagctcttgaagcgggatttgattcagtcatggtggatggttctcatctaactttaggggataacatcttatacacaaagagcatatcttccttggctcatgcaaaaggtttacttgtggaagctgagttgggtaggctctcaggctctgaagatggcatgaccgttgaagaatatgaagcaagatttactgatgttgcccaggctgaggaatttattgatgagacaagcattgatgctctagcagtttgcattggaaatgttcatggaaaatatccacctagtggaccaaaccttaaattcgacttgctaaaggaccttcgtgcattaacattaaagaaaggagttagcttggtcctccatggagcatctggtctatctcatgagctcgtaaaggagtgcatagacttgggcgtgagaaaattcaatgtgaacaccgaggttcggaacagctacctggcgtccctcagaaagccagaaaaggacttgattcaggtgatggcgtctgctaaagaggcaatgaaagctgttgtagcagagaagctgcgcctgtttggatcgtgtgggaaagcctgagcgaagtacttgcgttgcgccggcaacatgcagtacaagaccgactgcatcatcgggttcgtgatgctgctgctactgtgcagttgcttacagttacagctcattgcgttgaacagctgaagtggttattgtactttgcagtgtagcgcaactaaggctaattcataaatcgtaataatgtatgtatgctgccccgctgtaaaaatgctccgtcgttaataaatgccatcgcgcttgctgtgcctttgttttt

SEQ ID NO: 35303 - DNA, 1224 bp, Zea mays
  Clone ID: UC-ZMROB73002D11_FLI
ctgcctcctctccgtctgcgactacatcgtccagttctacccgtccacgcagaccctgcccgatgggaccaaagttgaggtcatggcgaccagaccaaggtcggacatctacatcaaccttcccgcgctcgagaagctcgacgccatgctcatcgacattctggacagcttccagaaggcggagttctggtacgcggacgccgggacgaggtcgttcggctcggtcacctcgtcctcgtcgtcgaggatgtcgtgttcgtcgtcattcaggaggtcggctcaccggaacgacgataagtggtggctgccggtgccctgcgtcccggacgccggcctcaccgacaaggcgcgcaaggacctgcagcagaggcgcgactgcgccaaccagatccacaaggccgctgtctccatcaacagcggcgtcctcggagacatggaggtgccggagtcgttcatggccgtgctccccaagagcggtcgggcaagcgtgggggactcggtgtaccgcgtcatgcttggcgccgacaagttctcgccggagttcctgctcgacacgcttgacatctcgtcggagcacgacgcgctggcgatggccgaccgggtggaggccgccatgtacgtgtggcggcgcaaggctagcggcagccacggcaagctgccgtggagcaaggtcaaggagctcgcggccgacgacgacgacaagaacgtgacgctggccaacagggccgagagcctcctgctctgcatcaagcaccgcttccctggcctgtcgcagaccaccctggacaccagcaagatccagttcaacaaggatgttgggcaagcgatcctggagagctactcgagggtgttggagagcttggctttcaacattgtttcgtggatcgatgatgtccttttcgtcgacaggtcgataaggaaactgagtgataacctcaagtcctgagttctttatcctgcactgaagcttcccagcaaaaaggttttagatgtctgttggtgaagctgcagaagaagggtgcgtgactgtagtagcggtagtagggtgattttgctgacctagagagatgcaagcctctagctttgcaagaatgcacaatgcagagtagcgtgtctgaccaacagtgaacgtgtgtgattttcgtgtcctttttatttttcagctctcgcgctcttagcttggcagcacgaagattggtgaaagggatcaaaatgtccaatagc

SEQ ID NO: 35304 - DNA, 1260 bp, Zea mays
  Clone ID: UC-ZMROB73002D12_FLI
cgcgccgtgaccgtccgcaaccgccagcgccgcctcttcaccaacaaccccagcggcagctggaactcctaccgcggcaagagcgtctggagccacgtccccttcgagcacccggccacgttcgacacgctcgccatggacccggacgacaaggaggacatcctcgacgagctccgcgcgttccgggacgctaaggcctactacaccaaggtcggcaagccgtggaagcgagggtacctgctctacgggccccccggcaccggcaagtccaccatgatcgccgccatggccaacttcctcgactacgacgtctacgacctcgagctcacggcggtcaagaacaacaccgagctgcggaagctcttcatcgagaccaccggcaagtccatcatcgtcatcgaggacatcgactgctccatcgacctcaccggcaagcgcaaggacgacaagaagcgggcgtcggccgaggcagacgacaagcccaaaaccccaacggatcccgacaaggacgagggaagcaaggtcacgctctcagggctgctcaacttcatcgacgggctgtggtcggcgtgcggcggcgagcgcatcatcatcttcacaaccaaccacaaggacaagctggacccggcgctgatccggcggggcaggatggacaggcacatcgagatgtcctactgccgcttccggaccttcaaggtgctcgccaagaactacctggatgtcgaggagccgcacgagctgttcggccagatagaaaagctgctcgaggagacggacatgtcgccggcagacgtggccgagaacctgatgcccatgtccaagaagaagaagcggagggacgccaacgcgtgtctggagagtcttgtggaggctctgaagcaggccaaggaggatgctgctgctgctgctgctgctaaggcactagctgacgctagggcggccaaggaggaagcggaggaggcgaaggagaaagaggccaaagagaaagacgaggcaacaaatagcaaaggagcagcagacccagcagggaaggacactaagatgagcaatggagatgttactgccaataaggaaggtgatgacgagtgacaagtatagaatggagacgagctcgcttgctagtgaagtaatggagaaacatggctataaataatgacagtggcctatgtaaaatagtgcagtctctagtgaagattacagtcacacgtcgtcatcttccatgttaaaaagataaaaagatagacttgatttggattagtt

SEQ ID NO: 35305 - DNA, 2186 bp, Zea mays
  Clone ID: UC-ZMROB73002F02_FLI
ggcccgagtaacatttaaggttgtggttaaaaaaatcccctcgtttgtctcacgccaaagcacaggtctaaggtcccggtcgcagtcgtgttctcacatgggctacgatgccgctatgtatgggtggggcaggggttcaggcgttttctcgacctatgtgaggtcttcttaatataatgttcgggggctgtcttacccccacaggtcgatgttttttatctacctcatggaaatggctctgtccccactcccaccaaatacaccttgcatgcacatgcctatagaaactacatgaaatccatattttttgtgtccgttttggcacatatggtttcacttttggcaatatattgatgcacttgctgaccaacaaccatttggcatatgtcgtgattgtgatggccaaaattctatctgttctgatgtccattgattagcacatttgttgagagatccgttttgttctattttatgtttttacccaatcttcatcaccaggtgcatggaaaaaaaactaaggtaatgtagttgtctcttatgatggatcaactggcagcttaagggtgtgtttggttcagctttctaaaccagatttgttgccaaaaatctggaatctcaaccaaaggggtataatagcagaatatatttctgaaaatctgtagatttatatagttcaatttagaatcacctcatatcctagattttctagattcctgccatccatgttaccaagttatcatgcccttacagaatctacagttgacagtggttcaaccaaatatattttagctttctcacaaccgtctgctcgcagcagctcacagccagaataagatttttagaaatctatagctggacgaaacagaccctaagtctgaccaatcatttagtgtatcaaatgatatcaaagcactaacattttgacctttgccgtatactttagtcagcaaatcagcatagagaatttatttgaaattgggactgatccatgtaacttcagttttgcttgcctgaaacgatgactagggcccgtttgctccgctccttgctggagctgcctggcccagtcagctacccagcgtccgattttggacgctcggatgcctggtagggcacgaaccaaacaggaacccatactcaaaactgaaattttattctgccttttaggagtgtgaagggttgtgattttctgggttatcagttttttgggggagcacactgttttgacatactgtttactgctggatattttcataaacttcctatctctgtgacctgtttagtcatcttgtacttaattttcataacgtttactctattttgttcataacgtttactctattttgtgcatgatattctttttttggtaacatgttcctttgttgatgttctgttttccagcctacaacagagtgacgagactccaatggtctgggagatccttctttatatgtatgtcctttattcgccggactggcattacaggagcacaatgccaaccttccttttcctatatggtgctgcctttgctgtagttcatttctttgcccggttccaattcgtattcaagctgcattacattggcctctgcttcctctgcatcccccggatgtacaagtactacatacagaccaaagacgtggctgcgaagcggctcgcaaagctgtgggttctcacgttaacccttgggactctctgctggctagttgatcgcatcttctgcaagaagctttcgcattggtatgtcaacccgcaggggcacgcatggtggcatgtgcttatgggcctcaactcatactatgcaaacacattcctaatgttctgtcgggctcagcagcgcgggtgggaggcgcgaatcacctaccttcttggatttttgccttatgtcaaggtccagaaaccagagaagaagagggaatgatttgtctctgcttaacactgatgctactcagtccaccgccagtaagctaatgtctatcccccaccccatcccccacccaatgtgcgcagacaagttgtggcatttttgtatatgggcatccaaatgattacggactataaatgttctgatgtcacactggatttcggtaacttttgactggcacctgttttgtaccatacttaatcatcgaacggagattagttggagtggttggttggtgtcctagttttggccatctttcttt

SEQ ID NO: 35306 - DNA, 964 bp, Zea mays
  Clone ID: UC-ZMROB73002F12_FLI
cgctgtgacaatgaaccagctccttggaccagtgacgatcacggtgaccgtccaagaccattgccaaagataaaggagctgcaaggtgcaactgatataacagagaggaaagggcgcccttcatgggattatgatgataaagatggctggaaatgggtggtgcctccgccagtcagcaggaagcctgttctatctggggatcctgagaccgacaagcaaatccgtagagcaacaaagcgtgttcatttgtctgttgctgaaaggctgcttaaagaatttgcttgttcgatatgccgggcggtgattaaagaaccacttacgactccatgtgcccacaacttttgcaagacttgtttgcttggggcatatgatagccagtcttctataagggaaagaagccgtggtggtcggactctaagggcacagaagattgtgaagacgtgcccttcttgcccaactgacatctgtgattttttagagaatccccagatcaaccgagaaatgatggagctgattgagactttgcaacgcaaggctgttgaagaagccaagatgacttcagatgatgctgaggaatgtggtgatggtgattcggaggaaaatgatggtgatttggtgaagggagaggatgttagtggtttgaatgagggagagcaagacagtgcagacgctgatgctaatgttgaaggttctgtgaagattgtggttgaaatcaaggaggaaggaaaagatgataaaaggtcaaagatgggcgcgactgaagtggtggatgtgttagttgatgaagatgctgtgaagcagacgaaaaagcgcaaggttgatgctgaggctggcaccaacggtggcaagaggatgaagagcagtagtaccgtggaagaggttgctgtgtgcgtcactcctgtgaaacggagcaggaagagtggtgatatggatgatgagcgcaacggcagtcctgctgtgagca

SEQ ID NO: 35307 - DNA, 1082 bp, Zea mays
  Clone ID: UC-ZMROB73002G05_FLI
ccgggggtggacctccgcctactgctacccggagccgcgcccggcgttcctcggcagcgtgcccaccaacctcaacgacgtgctggtccagaacaagcgctggatgtccggcatgctcgccgtcggcgtctccaggcgccactccccgctcgcctgccgcccgctcctccgggcctccctgctccaggccatggcctacgcctacttcggcttcgccgcgctctgcgccgtccccgtgctctgctacgccaccctgccgcagctctgcctcctccggggcgtcccgctattcccctgccccgccgccaccgcggcggcgttcgcgtcctcgcttctgcagcacatggcggaggtgtgcgtgtccaggcggggtaggctggacctgcgcacgtggtggaacgagcagaggttctgggtgctcaacgccctcacagcccagctcttcggctgcgtcagcgccgcccaggagctgctcggcgcacgcgccttggacttcgacctcaccagcaaggccgccgtcgacgggagcctgtaccaggacggcgtgttcgacttcacgggctgctccgcgctgctgctccctgccaccacgctctccgtgctcaacgccgctgcgatcgtcgccggcacctggaagatgtcgtcgtcgtcgtcgtcatcgagcggcggcttccacttcgccccgcagctgttcctcatgtgctacggcgcggcgctcagctacccgctactggaggggatgttcctcaggcgggatcctgcgagggttccgccacgcatcaccgcactctcggtcgcattggcagccgtgctgcttgccgccatgcttggatgaacatcaaccgagagatgcacggcctgcttcaactcttgtctactgttctagatatactgtacttttaattactattcccactgtattcccaccgttgaagcacaacaacgcagtgaactaaacgacgaacgagaagaagcccaaggttaattagaactaatttatgatatacgttcggactaattattctacacatcaaagatatttatgtaatgcggtataatatatataatttgtttactattgc

SEQ ID NO: 35308 - DNA, 3284 bp, Zea mays
  Clone ID: UC-ZMROB73002H02_FLI
cgaggcagggagctttccaggctccgtcgtcccgatgactgcgcagctataacctcgggggcgcggcagcatgcgtcttaacgaaggataaagacctgctaagatggccatggccatggccaggttcctctcgtggttgttcacatgcttcgcagctctcgccgtcctggaggccacggtccctgctcgttcatggcgcgctccgagtcccaccccgaggcacgaagcgaggaggttcgagcagaagacggacaggttctgggagtaccaggagcagagcaatacctgggtacaagtacgcgcgccgttcgacctcatgtcctgcatcaacggcacctgcacaaaggtaggatcgatcgggcggctggcgagggagcctggacgacacggccttcctcccgtccagagccaggaggaggaggaggaagacacgcggcgggttcagggagatggtgcagaagaagaccctgtcctgcctgtaaggaggagaatttccttgacaagaatgtcagagtcgtcagtctgggtgacagggcagagcggctccatctacgagaggttctggaacggggtggtgtgggtgattgctcctcatgagctccctgcctcggctgggtatgccaccgcaactttcattgtcaatacaactatccttgctctgtctgaagctggaaccctctaccagttgcagctaaatgagcatgcccagcctatctggacagagatggcattcaactcaagccagcagtcagcgaatcttggattaaaaacacaaagtcaagctatgcgtataagaaatgggattgtatccaatgatggaaggaaacttttcctgtctatcatgaatggatccctgcttgaggtaacagaaattcagcctctaaggtggaattaccatgggcgtcctccaggtgcagacgtgtcgtatatatctgatgctggaaatctgcggccagggaccctgttcacagtaagttccactggagacctctatgagtttgacaaagaaacaaagccatcatggaaaaagcatatatggagtgaagaactggcgaaaaatatctcattaaaatcatcggctggctttgctttgcatggtttgtcagggtctaactcagtgtctcttttcctgataagcaaggatggccttttagtggagcggcgcttgcatagaaggaagtggaagtgggacaaacatggagctcctacgggtcagagacttagttcaattgcagaagttcagaaggatgaacttaatgatgcgacttcaatgtttttaacgacaaccacaggaaaagtatatgagtatcagtttccaaaatatacaggtggggcccagagcaataagataagaggacaatggataaatcacatgtcccctgagcatgcaaaggttgcaagaaacgtcccaggtgtacatgttcaagtcggcagaatggtattcccactagatgatggtaggcttggggaactacattttcctgggatggggggtactgattttggtccgagtgcccaaagtaccataagaagaaaactatcaaacaagtacgagtggtccatcctagacgcaccagaaacagaaggttggaatgcagaatattgcaccgaagagcacggtccgacaaattgtattagtggagcaaagaatatagctgcagacacagaatcaaatgacttgagcaataacccaccttccaggaggcgtaaagtagaagagaagcagcactacctaaatgttaacagataccagcagagtgatgaaactgaatcatacaactttctatcaaggaccattgatcttaacttccacatgcgggtgatgcatgcagacagatcgcttttccttatagcagacaatggattgacttttgaatatctaaacagcaatggtgtttggttgtggttaagacatgaacatgttacagccatgaaaggaacactaggaagctacaatggcagtttgtatcttgtcgacgtgcatgggaacttacacattagagaaagaaatggagatgaactgttgtggattaactgcacagcgatgaagaagggaagacaggttgcaagtgggtctccatgggatggcatccctggtttattgcgcagagtgacaacagatgatgcactcttctttgtcaacaagcgaggcaggctgctacagttcacggttgcgctgcggaaattcaagtggaaggactgccacagtcctcctgacaccaagattgctttcatagtggaccaggaggtcttcagaagaaacatcatcttcgtggtaggccgcaacggtcgcctctaccagtacaacaggatcacggagctctggcacaggcactaccaatcacctcacctgttcctatcgtgctccccagggacggccatgcggccatcgccgctgtccctggccggctccctgttcatggtgtccgagcacggggggctggtggagtaccacttcagcccacaggacgggtgggagtgggtagagcacgggacgccccaccggggcgtgaccctcgtcggcgcccctggcccgtgcttcgacggctcccagctgttcgtggtcggctccgacgggcacgtgtaccggcggcacatggaggggaggacgtggaggtggacgagccacgggcacccgccgtcggagccggccgccgttgacgaacagagctgcgccacaccggacacgggcgccggcgcgcactacgccgacgggttcagggggagctgcgacgggaaggtggcagccgtgcggccggtgccgttctcggaggacgccgtggtcttcgagctgcgagatggccggctggcggagctgcggcggccgccctccgcggacgggtgcggcgggtgggagtgggcgcggattatcggcacgccggccagcgcctgtatgaccagctactggacggccgtcgccacgtagccgccgccgggcgcgactcacggagctggcagtccgctggtcgcttggctgattgaggtctccttggaagttggaaatgatccacaacaacagcggtcacgtccatgtttcctcgaaagacggccacgtccacatgggtctaggccgtatgatggccagatttgggcgcccaaagaaaggcagaaaggaactctctcgaaaaaaaaaacggctaaccgttacattacatttgattgtctgtttggtaatgcatttttagaatactatagttttaaagcatatagtactatagtttacaattgtatataacataagtattacaatattattttaccacagtaaaattatagtatttctt

SEQ ID NO: 35309 - DNA, 1091 bp, Zea mays
  Clone ID: UC-ZMROB73002H04_FLI
tatgactgtacgagacacggcggtagtggcagctggcacgaagggagatgattaaaaataccgtggccacgctgatggtgcgcctccaccacctgcccctgccccgcgccgcgcccgctcccacctaccgttgcggccgccacctcgccctcgcgccccctctccctcggctgcgggcatcggccgccgtcatgtcaacggcggcggaacagacgatcgccgaccagaagcgcacgctgcgcgccgaggtgcgcagggcgctgaaggccctctctgccgaccagcgcgccagcgaagatctggctattcaaactacaatactggattcctcttggttcaaagcaagcaaacggttgtgcgcttatataagctgtcagcagttgcgagaagttgatacatcaaaaatactagcagagtgtctaccgtcgaatcctggacaagaggaactggcaaaggatctttatgttcctcgagtggaggataagaaccgtaacatgaggatgctcaaaatcaccaccatggatgatttagttaagaattcaatgaacattctggaaccatcgcctgtggatgctactgggaacaatcgtgaagatgtattgtcatcattgtctcctgttgatctttttttattgccgggacaagcttttgatagaactggtcgaagactggggcgtggtggagggtactatgacacattcttgctgaagtaccaagaacttgcaaaagagaaagggtggaaccagcctctcttagttgctctttcgtactcggtgcaaattatggacgagggcatcatcccagtcaattcaactgatgttcctattgatgctctggtctcatcgtccggtgttattccaataagtgctgcggcgttgcagaggatgcaatgaagttgattggcctctgtagccatgctttcacaacaagcaccttcttctgatccctggttgcactagcaaatacaccagcagatcaaggaaactgtctctttttttccccctcgtggctcctctcttgtatcatcttttacgttttaacagggtgaactggacgtctacatcttattccagccacttcagatttatttt

SEQ ID NO: 35310 - DNA, 1431 bp, Zea mays
  Clone ID: UC-ZMROB73002H07_FLI
ccacatcctcccctccttcctccttgggttcccagcccgtgcgcccgcctgtcgcagtcgcaccgcagccgccggccatggcctgcctcaccgacctcgtcaacctcaacctctcggacaccacagagaagatcatcgccgagtacatatggatcggtggatctggcatggatctcaggagcaaagccaggaccctcccgggcccggtgaccgatcccagcaagctgcccaagtggaactacgacggctccagcaccggccaggcccccggcgaggacagcgaggtcatcctgtacccgcaggccatcttcaaggacccattcaggaggggcaacaacatccttgtcatgtgcgattgctacaccccagctggcgagccaattcccaccaacaagaggtacagcgccgccaagatcttcagcagccttgaggtcgctgccgaggagccctggtatggtatcgagcaggagtacaccctccttcagaaggacaccaactggcccctcgggtggcctattggcggcttccctggccctcagggtccttactactgtggaatcggcgcggagaaatcgttcgggcgtgacatagtcgacgcccactacaaggcctgcctgtacgcaggcatcaacatcagtggcatcaacggggaggtcatgccggggcagtgggagttccaggtcggaccgtccgtcggcatctcttcgggcgatcaggtgtgggttgctcgctacattcttgagaggatcaccgagatcgccggcgtggtggtgacgttcgacccgaagccgatcccgggcgactggaacggcgcgggcgcccacaccaactacagcaccgagtccatgaggaaggagggcgggtacgaggtgatcaaggcggccatcgagaagctgaagctgcggcacaaggagcacatcgcggcctacggcgagggcaacgagcgccggctcaccggcaggcacgagaccgccgacatcaacaccttcagctggggagtcgccaaccgtggcgcgtcggtgcgcgtgggccgcgagacggagcagaacggcaagggctacttcgaggaccgccggccggcgtccaacatggacccctacgtggtcacctccatgatcgccgagaccaccatcgtctggaagccctgaggcaccccgtggccgtgtcgtgtcggtttgctccgcgtacggcgctggccgttgcatcgcagggcccagcggttgcgcaactattttcccttccccgttctgtttgcttgtactactactctaccgctagtcctgcatagcattttagctagaacacaacaacagccaaaaaaaagtattgttgcttgcttcgacgcttgccaccacttccattccatgccgtccgtccgcttccttcctgtgtaatcctcctccaataatagacgtgccatgttgcatcctc

SEQ ID NO: 35311 - DNA, 1640 bp, Zea mays
  Clone ID: UC-ZMROB73004B01_FLI
cgacgcgccgtcactgaatcctcagatcacggctagccgtaatcacgccactctgctgactcccggcgagcagtgtaacattttccttcagccatgggcaaggagaagactcacatcaacattgtggtcattggacatgtcgactctggcaagtcgaccaccactggccacctgatctacaagctcggcggtattgacaagcgtgtgattgagaggttcgagaaagagcccgcggagatgaacaagcggtcattcaagtatgcctgggtgcttgacaagctcaaggccgagcgtgagagaggtatcacaattgatattgctttgtggaagttcgagaccaccaagtactactgcactgtcattgatgcccctggacaccgtgacttcatcaagaatatgattactggcacttcccaagctgactgcgctgttcttatcattgactccactactggtggttttgaggctggtatctccaaggatggacagacccgcgagcatgctctccttgctttcacgcttggagtgaagcagatgatttgctgttgcaacaagatggatgccaccacacccaagtactccaaggcccgttatgatgagattgtgaaggaagtctcttcctacctgaagaaggttggatacaaccctgacaagatccactttgttcccatctctggtttcgaaggtgacaacatgattgagaggtccaccaaccttgactggtacaagggcccaaccctacttgaggctttggacttgatcaatgagccgaagaggccttcagacaagcccctgcgtctccccctacaggatgtgtacaagattggtggtattggaactgttcctgttgggcgtgttgagactggtatcatcaagcctggtatggttgttacctttggtcctagtggccttactactgaggtgaagtctgttgaaatgcaccatgaggctctccaggaggcccttcctggtgacaatgttggcttcaatgttaagaatgttgctgtgaaggatctgaagcgtgggtatgtggcctccaactccaaggatgaccctgccaaggaggctgctagcttcacgtcccaggtcatcatcatgaaccaccctgggcagattggcaacggctatgccccagtgctggactgccacacctcgcacattgctgtcaagtttgcggagctcattaccaagattgataggcggtctggcaaagagcttgagaaggagcccaaattcctcaagaatggtgatgctggtatggtgaagatggttcccactaagcccatggtagtggagaccttttctgaatatcctcctcttggtcgctttgctgtccgtgacatgaggcaaacggtggctgtcggagtcatcaagagtgtggagaagaaggatccaactggagccaaggtgaccaaggctgccgcaaagaagaaatgatgtgtctggctggttctgtgtttgcttgagggatacctagtggaaacgtaaaatatctcgtcttgttcacgtcattgtctgaactatgctcgcaacgtttgcctggtcgatttagaactgttattttcgttaaaaccagagtgttatttaagacttatccgaacatctggtgagccatatatggttactagttttgttactac

SEQ ID NO: 35312 - DNA, 1409 bp, Zea mays
  Clone ID: UC-ZMROB73004C02_FLI
ctgatcgatcctcctctcggccgcccgcccgttaattaggtagccgacagtatctatccagctaggtagccagccagcgaggagccgccgttgcttcctagctgcacctccgcccggccggccgaagaagacgccgacgatgaaggtgtcggtgctggcgctgtggtcggcggcggcggcgctgttgctggtggcgcaggcgccgtcggcggcggaggcctcccaccacggcggcgcgggcctcaagctggggtactacaagaagacctgcccgggcgtcgagaacgtggtcaagtaccacgtcgccaaggccatcaaggccaaccgcggcgccggcgccgcgctcgtccgcctcatcttccacgactgcttcgtcagggggtgcgacgcgtcggtgctgctggacccgacgccggcgaacccggagacggagaagacggcgccgatcaacatcgggctggcggcgttcgaggtgatcgacgagatcaaggcggcgctggaggagcggtgcccggggacggtgtcgtgcgcggacatcgtggtgtacgcggcccgggacgcgtcgagcctgctgagcaacgggcacgtccacttcgcggcgcccgcggggcggctggacggcgtggtgtcccgcgccgccgacgcgcagcgcgacctgccggactccaccttcaccgtgtccgagctgatccgcaacttccggcgcaagaacttcacggtggaggagctggtgatcctgtcgggcgcgcacgccgtcggcgtcggccactgctcctcgttccgcgcgcgcctgtcggcgccgccggcgcagatcgtgccggcgtaccggaacctgctgtcgggcaagtgcgcggcggcggcgggcggcgccgacgaccccgtggtggccaacaacgtgcgcgacgaggacccgcgcgccgtcgcggcggccttcccgtccttcctcgggaagctgcgcaaggccagggactttctggacaacagctactaccacaacaacctggcaaggatcgtcaccttcaactccgactggcaactgctcacggagaaggaggcgctggggcacgtcaaggagtacgccgagaacggcaccctctgggacgaggacttctccgacgcgctcctcaagctcagccggctgcccatgccgccgcacagcaagggcgagatcaggaagacgtgccgctgggtcaaccaccactgatcctgctcaagctctgcacccggccggacggaaatataccagatgggtcttcacgccgatttgtttcgatcttctttcattttgttgctgtatgtttgtttgattattatctgatgatatgcatgtgtttttttatgcggttgatctcttgttgtatcttgttctttcatgtatgtatggactatgggcaacagtaatctctact

SEQ ID NO: 35313 - DNA, 1339 bp, Zea mays
  Clone ID: UC-ZMROB73004D03_FLI
gggggtgccctacaaccagcagatcgccaactgctgcaaggccggcgtggtgtcggcgtacgggcaggacccggcggggtccgtctccgcgttccaggtctccgtcggcctggccggtaccaccaacaagacggtgaagctgcccaggaacttcacgctcatggggcccgggctgggctacacctgcgggcccgccgccgtggtgccgtccaccgtgtactggacgcccgaccaccggcgccggacgcaggcgctcatgacgtggacggtgacctgcacctactcgcagcagctggcgtcccggtacccgtcctgctgcgtctccttctcctccttctacaacagcaccatcgtgccgtgcgcccggtgcgcgtgcggctgcggcggccacggcggccacgcgggtccgggcggctgcatcgagggggactccaagcgcgcgctgtcggccggggtgaacacgccgcgcaaggacggccaggcgctgctgcagtgcacgccgcacatgtgccccatccgggtgcactggcacgtcaagctcaactacaaggactactggcgcgccaagatcgccatcaccaactacaactacaggatgaactacacgcagtggacgctggtggcgcagcaccccaacctggacaacgtcaccgaggtcttcagcttccagtacaagccgctgcaaccatacgggagcatcaatgacactggcatgttctacgggctcaagttctacaacgactttctcatggaggccggcccgttcggcaacgtgcagtcggaggtgctcatgcgcaaggacgcaaggaccttcaccttcagcatgggctgggcgttcccgcgcaagatctacttcaacggcgacgagtgcaagatgccgccgccggactcctacccctacctgcccaacgccgcgcccgtcgtcgcctcgcagctggtcctgtccgccgccgcctcggcgttcctactgttgctgctcctggtggcatgaccgtgaccgaaccaagggcaaggcctccgttttgttttcccgtctcgtcccgtgggcagggagcagacttcagtaggcagggcattttatttggtttttttgccaaggattcaacacttgggttttcgtcagaggaaaactgtcgtgtatgtagtgtgagttgcaggtcgtcggatccccacgtacaagacaatctttggatctagaatatgcaaaacgtgaatcagcacgccaggatcatcgtctcctacaagattggcagaaaaaaaatctcatgatgagtgatgtgtcaacagacctatatatatgtgataatcactggtttcaacggttgcctgaacatttgct

SEQ ID NO: 35314 - DNA, 1662 bp, Zea mays
  Clone ID: UC-ZMROB73004D06_FLI
ggacgggtcggatctgagacgagacgagacgatcccccctcccctcaaccggaacttgttttaccccatctcatcccactgactccacccacccacccgcccgctgcctccgccggatctcgtcggactcggatccgcccgaccacgaccaccccgcgtcgccgccgcgcagcagcagcagatcagagaagatggccggactcgacaccttcctcttcacctcggagtccgtgaacgagggacaccctgacaagctctgcgaccaggtctcagatgctgttctggacgcttgccttgctgaggaccctgacagcaaggttgcttgcgagacctgcaccaagaccaacatggtcatggtctttggtgagatcaccaccaaggccaatgtcgactacgagaagattgtcagggagacatgccgcaacattggtttcgtgtcgaacgatgtcgggcttgacgctgaccactgcaaggtgcttgtgaacattgagcagcagtcccctgatattgctcagggtgtgcacggccacttcaccaagcgccccgaggagattggagctggtgaccaggggcacatgtttgggtatgcgactgacgagacccctgagctgatgcccctcagccatgtccttgccaccaagcttggtgctcgtctcacggaggttcgcaagaatggaacctgcccctggctcaggcccgatgggaagacccaggtgacagtggagtaccgcaacgagggtggcgccatggttcccatccgtgtgcacacagtcctcatctctacccagcacgacgagacagtcaccaacgacgagattgctgctgacctgaaggagcacgtcatcaagccagtcatccccgagcagtacctcgacgagaagacaatcttccacctcaacccgtctggccgcttcgtcatcggcggacctcacggcgacgctggcctcactggccggaagatcatcatcgacacctacggtggctggggagcccacggcgggggcgccttctccggcaaggacccgaccaaggtggaccgcagcggggcctacgtcgcgaggcaggctgccaagagcatcgtcgccgccggcctcgcccgccgcgccattgtccaggtctcctacgccatcggcgtgcccgagcccctttcggtgttcgtggacacgtacggcaccggcgcgatccccgacaaggagatcctgaagatcgtgaaggagaacttcgacttcaggcccggcatgatcatcatcaacctcgacctcaagaaaggcggcaacgggcgctacctcaagacggcggcctacgggcactttgggagggacgaccccgacttcacctgggaggtggtgaagcccctcaaggcggagaagccgtcttctgcatgaggcgcctcctctgttttggaagaagcttttggtctggtctggtctggtctggtgtgcctgcgctctatcatgcttttttatggctcctacttgtgattcttgatctgccccttgcttatcatttgtactgtactgtcactgtcctaataagtggtacgtgtgcggggtcgtattgtgtctgcttattcacctactagaggattatttctggttttgctgcttatgtaatgcttttaaaaccatgaaagaagctacaggctcctacagctgctttgag

SEQ ID NO: 35315 - DNA, 1454 bp, Zea mays
  Clone ID: UC-ZMROB73004D10_FLI
gccgcgggccgcgcgcgaccgcgcgcggggcatggccagggactggaaggaggccgccgagaagaaggggggcgtcgagggcgccaagccgcccgacgcgcacgccttcctgcagctcgtcgccacgtttgccgtcgccgagagggaggacaggccgctgtaccgcaggattgtcgtcagcttctcctggcgccgccagatgccacgcctcgcgctcaccctcggactcgaggaacaaatggccgatatcattgaggaactaattgctaagaggcagcagcttgatgctgtaaatttcgcttatgaggctgggcttcaggagaagttcccaccagttcctcttttgaagtcctacctggaagactctaagaagacatcaaccgctgcttcagataattcaagcactagcagcggccaatcagggagcaatgtgaacaagaaagaacagtctgcactgcgagctgtcatcaagtgtgttgaggatcgtaaactagaagctgagtttccactggagggtcttcggaagcaacttgaagaactagagaaagccaagaccgagaagaagaaggcagcatcaagcgctaccagtggcggcagcggcggccctgcaaccaagcgcatccgtgcgagcactggaggcccaatgcctcctgccaaggcaggtcgtctcactaacaatgcttgcgtgtcttctctcccagctcccaccacattgacccagtctccctcccacgcgtcatacgccaacacctccccgtcccgcacctcatacgccaatacctccccatcccacgcctcatacgccacagtctccccaacccatgcatcatacgccacaccctcccctccccatgcatcatacgccacagcctccccttacccttacgacaggccggttggacacggcgtgtactgcacccggagcccgccggtgatcagggagccatatgtttacccagctgaggaggtagccaccgtcaacgtcggcattcccatggcctactccaccccgcccatgagctaccctgctgccccctacggcggctatggcaacgggatgccagcttacaccaatggaatggctcctgccttccaccaggcttactaccggtaggttcagtcaggaaacgaagaagtcgctgatgaatgacatgacaacaactgatgatgccaacgactcgaaaccccgctcaatggccctgttttgtagcgactgactacaacggtaggttgggtaccccatcttccatgtccttaccaccgctactactagatgtgttgtctttagctcctcgtctcatcttagtccgctaccgtaattttttttactactactaaggaacctggatgtaaattatgtatggtatcagcgagactgtcgtcgcagccttatgtaattctgttcagaacttttgaaaaacgaaaaaaaaagaagaaaccagcatgtaatcctg

SEQ ID NO: 35316 - DNA, 779 bp, Zea mays
  Clone ID: UC-ZMROB73004D12_FLI
taaaaacaagggagaacctcaatttggatgtccatattctttcctattgctggtgtgcagaacttataagatcagccttctcatcagccggttgtctagatggtttgaacatacattcaaatgagtttgcctttgaggattctgtttcaactggtgagatcgacagaaagatgcagtctccgctagacaaagttgaaaagttcaagagcatcagaagtgacgtggacagtacagtgccattcctatctgtttatattggagactcggttggagatttgctctgcttattggaggctgatattggtatagtcattgggtcaaccacaagtttgcgtagggtgggcaaacagtttggtgtttcttttgtcccattgttccctggtctagtagagaagcagaggcaactggcggaggaagatgcatccgtattcaaggcacggtctggagtcctctatacggtttctagctggtcagaaatacacgccttcgtactgggaagtgatttcagctgatggatgtgctgcttcttttcttccattttttttccgcttgagaagcaaaattgccggccgatgctgatgcacatgatacgtgaatcctcaatgtggtcattttatgaaagccacatgtcaattctggctaccagtatgtatgaatgaataccgataccagtttgtggtgtggaatgggttgagtttgtacccttgaattgtgatcaatgtttcattgattcgtctgtccttgttccattcggggctaatttctgggtggttgctggc

SEQ ID NO: 35317 - DNA, 1275 bp, Zea mays
  Clone ID: UC-ZMROB73004E08_FLI
cgcagttccgtccggcctgctcgcgctcctggtgttctgcatgcccgagtcgcctcggtggctggtcttgaagggccgcctcgcggacgccagggctgtgctagagaagacctctgccacgccagaggaggccgccgagcggctggccgacatcaaggccgcggcggggattccgaagggcctcgacggggacgtggtcaccgtacccaacaaggagcaaggcggcggtgagttgcaggtgtggaagcagctcatcctgtccccgaccccggcggtccgacgcatcctgctctcggccgtgggtctccacttcttccagcaggcttctggcagcgactccgtcgtccagtacagcgcccgcctgttcaagagcgcggggatcaccgacgacaacaagctcctgggcgtcacctgcgcggtgggcgtgaccaagacgttcttcatcctggtggccacgttcctgctggaccgcgcggggcgtcggcctctgctgctgatcagcacgggcgggatgatcgtctcgctcatctgcctcgggtcggggctcaccgtcgcggggcatcacccggacaccaaggtcgcgtgggccgtcgccctgtgcatcgcgtccaccctgtcctacatcgccttcttctccatcggcctcgggcccatcacgggcgtgtacacctcggaaatattcccgctgcaggtgcgcgcgctgggcttcgcggtgggtgtggcgagcaaccgcgtcaccagcgccgtcatctccatgaccttcctgtccctctccaaggccatcaccatcggcggcagcttcttcctctactccggcatcgccgcggtcgcttgggttttcttcttcacgtgcctcccggagacacgcggccggacgctggaggagatgggcaagctgttcggcatgccagacacgggcatggctgaagaagcagaagacgccgcagccaaggagaaggtggtggaactgcctagcagcaagtaggtggctatcccagagcacaggtcaagtgaagtagatggacaagatcattgtcttttcaactaattagatgggcaagaataactaagactgccctatgaggtgtcgtggttcaaccagagatcattctgctccttttcttttcccttcctttttcgagtaccattcccattcgtcgtggtcagtacgatgttgggtcgttgggagttagtggtgtcagagtccgcgtgtgctttgcaagccagggctgaacccacaatcatcagtaacaaaaattcttccgtttgctttgc

SEQ ID NO: 35318 - DNA, 1866 bp, Zea mays
  Clone ID: UC-ZMROB73004F03_FLI
tgaagtattctatactaacttggcattgcaaacattcaatgaaatttattgcaagtatgctaatagcacctacctcttttcagttaagtaaatttgtttaactgtgtttgtctagcggtacctaagtactgtcgcgaaaatttgtttctatgtttcctggaattttcccaataatattctttggtcttatcatttatttgtaattattaatgctctcaatcacagcaatgtcccctctaattattctttggagatagttatgaaaatgcttgcagacttgttcagctcagtttatgaaccatgaactatgcatatctcataacatagtgattaagttaccacgaaccattcatagctcaacttatgaattcggatgatgaaattagcatatcatagcattgcaggatgtcttcttgattgacatgttccgttgatacatcttactacgtgttgcagcaagaaactggcctgtgcaagaatctccttcaggagtatgctcagaagatgaattacgccattccatcttatatttgcactaaacaagcttcgggtgtagctcctttcgtatgcagtgttgagattggtggcatcctatacattggtgctgcagctaggacaaagaaggaggcagagataaaagctgcccgaactgctcttcttgcaatccaaagtcaatcagaaggtggtgcaaatggtgccaaaaagtacattgttgttcctgggcaaaggccagataaggagacgaataaaaatccaactgaaacccccataccacttagagtcaagaagcgtggttccaggaagaaatggaacaagaggaaattcaggaggatggctgaccgaattgttgatgctggaaaggatgcagaggggcttggaacgcttctacatgatgactatgaggaagctagaagaataggatatgagttacctacagatactgctatggttcaatttaacaaggaagttgtaatgacacaacctggtgaaggagataggatagtacaattggagccacccagagatcctgcagaggtccaatataacaaggaagctagaagtgttgaacaggacccacccagagatcctgcagaggtccaacataacaaggaagctagaagtgttgaacaggacccacccagagatcctgcagaggtccaacataacaaggaagctagaactgtcgaacaggacccacccagcaacacagaagtgtggaagcctgacaataaggctacaactacagagcaggagtcggtgagcgctttcatagcattgagatctaatggggattctacagatgtggaggcggcaccaggcgataccttgatgatgcagggccaggagtcggaagccacaatgcaagaagcatctcacgctggtgaacaggcccagcctaactaggaacctgaaagcaaaaaaaacttcctgaacaggaagaccgaaatgtaggtcgaatgcatgcattgctgtaggagaataagtccactggaggtacatgagcctaaaataatttgtggagtggtggttgactccagtggtaagtgccttccagagtgtaccggcatgcccaaaactgaaatttccggtttagatagaattgggggcgcggaagagggtgccatgtgtgtgtttgtgtgtgttgcctgtggatggaggaattgatgggagtatgtgaactgatgtagctagtctatgtttgttaccattgagggcttgttcggttagctctcaatccatgtggattgagcgggattggatgggtttgaatcccaaacagctcaaacttcttcacaattttttccaatcccatccaatccatgtgtattgggaataaccgaacaagccctgatgatgattgtgttt

SEQ ID NO: 35319 - DNA, 2189 bp, Zea mays
  Clone ID: UC-ZMROB73004F09_FLI
gcacaccctctctctctctctctctctctctctctctctgctgtgcccgcggctattaagcccgttctggatgagtcggtgagggaggacgacgaggagagccggggtcatcggatcgctgccgagggttctccgtttgtgcgacagagaggtggtggtggtgacggtgtcagtgcgtgcgtgcgtgcgtgccaatggcgccgtcgtggtgggggcgggacgcgagggccaacggcgtcgttggcggcggcacgcccgtggtggtcaggatggagaaccccaactggtgcatctccgaggtcgccgccgcggcgtcggaggtggacgcgccgccgccggcggcggccgggggcggcaaggccgggcggcggggcaagaacgcgcgccagatcacgtgggtgctgctcctcagggcgcaccgcgccgcgggccgcctcacgggggcggcctccgccgcgctctccgtggccgccgccgcgcgccgcagggtggcggcgggccggaccgactccgacgccgacgccgacgccgccccgggcgagagcgcggcgctccgggcgcgctcctacggctgcatccgcctcttcctcgccctctcgctgctgctgctcgccgtcgaggtcgcggcctacctccggggctggcacctcgaggtggacgtgggcgccgggatcctcgccgtcgacggcctcttcgccgccgcctacgcggcctggatgcgcgcccgcctcgactacctcgcgccgccgctgcagttcctaaccaacgcctgcgtcctcctcttcctggtccagagcgtcgaccgcctcgtgctctgcctcggctgcttctggatcaagctcaagggcgtcaggcccgtgccgccgctgcccgccgacaaggaggacgtcgaggccggtcccgacggcgtccccatggtgctcgtgcagatgcccatgtgcaatgagagagaggtgtaccagcaatccatcggtgcggtttgcagcctggactggccaaggtcaaatttcctggtccaggtgttggatgactctgatgatgctaccacttcggcacttatcaaggaggaggtggagaaatggcagcgagagggtgtgcgcatagtataccggcaccgggtgatccgggatggctacaaggctggaaacctgaaatcagccatgaactgcagttacgtgaaagactatgagttcgttgtcatcttcgatgctgatttccaaccacaggcggacttcctgaagcgcaccgtgccccatttcaagggaaaggatgacgtcgggttggttcaggcgagatggtcgttcgtaaacaaggatgagaacttgctgaccaggcttcagaacataaatctttgcttccacttcgaggtggagcagcaggtgaacggggcgtttctcaacttcttcgggttcaatggcaccgcgggagtctggagaatcaaggcgcttgaggagtctggaggatggatggagaggacgacggtggaggacatggacatagctgttcgagcgcacctcaaagggtggaagtttctctttctaaacgatgtcgagtgtcagtgtgaattgccagaatcgtatgaagcgtacagaaagcagcagcaccggtggcactcaggtcccatgcaattgtttaggctctgctttgtggatataatcaaatctaagatcggtttctggaagaagttcaacctcatattcctcttcttcctgctccggaagctgatactacccttctactccttcaccctcttctgcgtgatcctccccatgacgatgttcgtccccgaagccgagctccccgcgtgggtggtgtgctacatcccggcgacgatgtccatcctcaacatcctcccgtccccgaaatcgttcccgttcatcgtcccgtacctgctgttcgagaacaccatgtcggtgaccaagttcaacgccatggtctccggcctgttccagctggggagcgcctacgagtgggtcgtcaccaagaagtcggggcgctcctccgagggcgacctcgtggccctcgtggagaagcactccaagcagcagagggtaggctcggcgcccaacctcgacgcgctgaccaaggagtcgaagggcaccgaggaggagaagaataagaagaagaggaagaagaagcacaacaggatctacaggaaggagctcgcgctgtccttcctcctgctgacc

SEQ ID NO: 35320 - DNA, 614 bp, Zea mays
  Clone ID: UC-ZMROB73004F12_FLI
ggtggcgtgggaggtgttgcggcggcacttctctaagaagcggtccgtggacgtgaggcggatcaaccccaaggtgcccaaggaggaggccgtcgccatttccggccgactcctccagatcctctccgaccatgggcccctcaccgtcggcaacacctggaaccacgccaaggatgctggcatcgctggtctgaacagcaagacgcacatgaagatcctgctgaaatggatgacggggagaaatgtcgtgaagctgacctgcgtgcacgtgggcaacgcgaagaagttcctctactccccgtccactgaaagcagcagcagcgccggcgcatcaccgtcatccacatcggcctcgcagtgacggtcagtcgccgttaagccttggtgtggttcttgatgttgctttgtggatcgatggaggttgcctctggtcatggtgatcccatgtttaaccttgatgacgaacattggaaaaagcattttgttttatggactggaatagtctgcaaacatcacgatagcaatattgttctgctgctcatcagctgaggatgctgccctgtcctgaactcctgattttgcttttgatctactatgtgatgatttgctcttcc

SEQ ID NO: 35321 - DNA, 1889 bp, Zea mays
  Clone ID: UC-ZMROB73004G01_FLI
cctccccctttcggcacgcagccatgggcaaccgtgcgtcgcgccaccaccgccacgccaccgagcagcagccagagacgccgacccttcccaagccccagatccagccgccgccgccgccgacgcagacgcagcagtaccagcaggccccgccgccgccgaagccgaagccggcggcggacgcgagggcggtggggcgcgtgctggggcggcccatggaggacgtcaaggcgacctacaccttcggccgcgagctcgggcggggccagttcggggtcacctacctcgtcacgcaccgggagactgggcagcgcttcgcctgcaagtccatagccacgcggaagctcgtccaccgcgacgacatcgaggacgtgcgccgggaggtgcagatcatgcaccacctcaccggccaccggaacatcgtcgagctccggggagcctacgaggacaggcgctcggtcaacctcgctatggagctctgcgagggcggggagctcttcgaccgcatcattgccaggggccactacaccgagcgcgctgccgccgcgctttgccgggagatcgtcgccgtcgtccacagctgccactccatgggggtcttccaccgggacctcaagcccgagaacttcctgttcctcaataacaaggaggactccccgctcaaggccacggacttcggcctctccgtcttcttcaagcccggggacacgtttaaggatcttgtgggaagtgcatattatgttgctcccgaggtattgaagcggcactatggggcagaggctgacatatggagtgctggggttattctttacatccttttatctggtgttcctcctttttgggcagagaatgaggatggcatatttgatgctgtcttgcacagtcacattgatttctcttctgatccttggccttcaatatctaatggtgcaaaagatttggttaagaagatgctgcgacaagacccaaaagaacgcctgactgctgctgaaattttgaaccacccatggattagagaggatggagaggccccagataagccacttgacattacggtcatcagtagaatgaaacagttcagggcaatgaacaagctcaagaaagttgcattgaaggttgtggcagagaacttatcagatgaagagattatgggcctaaaagaaatgttcagatccctggatactgataacagtgggacaattactcttgaagagctaagatctggtttaccaaaacttggtactaaaatttctgaatcagaaatcaaacagttgatggaggcggctgatgttgatggaaatggtaccattgattacgcggagttcatatcagccacaatgcatttgaatagattggagaaggaagaccgtatactcaaagcttttgaatattttgataaggaccatagcgggtacataacagtagatgagttggaagaagctctgaagaagtatgatatgggagatgataaaacaataaaagagatcattgctgaagtagatacagatcatgatggaagaattaattaccaggagtttgttgccatgatgaggaacaatacccctgagattgttccaaaccggagacgcatgttctaactgtcatgtacaattttattgaatactttcaagaccaatatgcacccttagacataatcctggccccattttcttttgggaacaactgtaaggactcaatatttttttagatcaatttctctgcagccgggacatatttgtaccaaaataggtggtgttatagtgactcgtacttcgatgtttggagcatcatggactcatgggtggcaatgtttattcccattgtactcggagctctgttttttcagagtgttgccacttgtgaattgttctaatgtgttgtggtcttcg

SEQ ID NO: 35322 - DNA, 1367 bp, Zea mays
  Clone ID: UC-ZMROB73004G05_FLI
tctcgctataagatcaatgcaaaaatgggagaaggtcagtttggatggccatgtcttctgaaataattgattaaactcgcgtttggcatgctgtgcaacacatgcagcaggttatgtttgtaacgaatgtgtctggaatacattaggtacctttggtcaggtgttggagtgttgggacaaggaaaggaaagaaatggtggctatcaaaatcattaggggcattaaaaagtacagggatgctgcaatgatcgaaattggcatgctcgagcagcttggtaaatatgatgaaagtagatctagttgtgttcaaattcggaactggtttgactatcgtaaccatatctgtattgtctttgagaggcttggaccaagcttatatgattttctgcgggaaaacagttaccgctcattcccaattgccctagttcgggagattgccaaacaactgttggaatgtatagcatttatgcacgaattgtgtctcatacacactgatttaaagcctgagaacattctccttgtttctccggagtacattaaagtgcctgattacaaagtttcatcccgatccccaaaggagggatcctattacaagcgggtgcccaagtctagtgctatcaaggtgattgattttggtagcactacctatgatcaacaggatcagagttatgttgtgtcgacgaggcattatcgggctccagaagttatactgggacttggatggagttacccatgtgatatctggagtgttggttgtattcttgttgagctttgcacgggtgaggcgatattccagactcacgaaaacttggaacatctggctatgatggagagggttcttggacctttgccataccatatgttcaagagggcagatcggcactctgacaaatacatcagaaaaggacgcctgaattggcctgagggttgcacttcgcgtgaaagcatgaaagctgtgatgaaattgtccaggcttcagaacctggtgatgcaaaatgtggatcaagctgcaggagatttcattgaccttttgcaagggctgctgaagtatgatccatcaagccgtttaacagcacgagaggccctgaggcatcccttctttacccaagggttttggcgaagatgatgatactccttgcattctaccttgtttgtctgacttgatgtcttgcatttgacagtctgtacttttcagtggtgtatgtaggcggtagatcaatctgtataaagccgttgtagagttgtttcagtcttgtttggaacgtcgtgcagattaagttgtagcataatggaagtcaaatggatgcatttgactttaaatcctgacttgtttgaatttggaatgtcaatggaaatctggtttgagg

SEQ ID NO: 35323 - DNA, 1973 bp, Zea mays
  Clone ID: UC-ZMROB73004G08_FLI
acgccagtgcaggcaggcaggcagaagaggagtcgccaggaagcaaccgcgagggagctgcaagcgagcacagcagcagcgcagaaaaaaaattctggaataatttttcttccctttggctccgtgaggttccggtgctcgctcgctcgcctgagcttcgatcgagcccggtcggcgaggcaggcgcccgatcgccgctctccgggagcttccggggggccgtcggatggagccgtacgcggcggcgaagagcggcggggccgacgccggcaccggcaccggactggaagactcgatgcggaggctggggctcggcgacgacggggaagcaggggaggagaagcttccggagcggccgggcgaggcggactgcgcctactacctccgcacgggcgcctgcggctacggggagcgctgccgctacaaccacccccgcgatcggccggccccggttaatggagttggaaagaccgcagttacagtggagtacccagagcgtcctggacagcctctctgtgagtactatgcaaagaatggcacctgtaaatttggttccaattgcaagtttgatcatcccagggagggtggttttgtacctgtcacattgaacagcggtggattccccctgcgtctgggtgaaaaggaatgttcctattacatgaaaactggacattgcaagtttggagctacatgtaaattccatcacccagaacttggtttccttacggagacgcctggcatgtacccaccagttcaaccaccacctatttcctcctcgcatccatatccacatcttgccaattggcaaatggggaggcctcctgttgtgccagggtcatttttaccaggctcgtatccaccaatggtgcttccacatacagttataccaatgcagggatggaacccttatgttccacctatgaaccaagttacaccagctggaggacagcaagctgttccagtaggggcatcttatggtttgtcgcaccaggggcctacctctgccatgacttatggcagtcattatgcgcaattatattcttcatctgggacttcaagcagcaacatacaagaatatgcctttccagagcgaccggggcagcctgaatgtgaacattacatgaagactggaacctgtaaatatggggcagcctgcaaatatcatcatcctcaatacttcagtggaccaaagtctaactgcatactgagccctctgggtctccccctccgtcctggttctcagccatgtgcttactatgcacaccatgggtattgcaagtttgggccgacatgcaagtttgatcacccgatgggtactccaaactatagtatttcaacatcttcacttactgatgtgccaatcgctccatatcctcagagtttccctgttactcctatgccttcatatctgccatcttctgatctgcgtccacaatacactcaagtcaaggattcctctgctaatccaccaccatcgcctggaactacttatggtcctgttgggtctatatcaaaggtttatgctccccacacgcttatccgatccccggcttctgcagctgctggcatgcaagcgtcctaatgagacacggttgagagcattagtcctctctgtcatgaagatagttcttgggcaatcttctcaggtttttctaccattggcggaatgaggtctcgattcttttttgctccagttcgacttcccagcaattgtgaataaaggctgcagctgacatagaaaagtctcaataaatgcaaagataggaattggcaagctcattcacttgccatttttctgtccatctcggaaatgagaggagaaaattctgattgtagtaggatccagagctacgttattatcctgtataagatgcaccgatgcaagggattcgtatctgaaagctgatgggttctgtagctcaaaaccttttgtttatctcaccatcatatatatagagagggcagatcaccct

SEQ ID NO: 35324 - DNA, 1205 bp, Zea mays
  Clone ID: UC-ZMROB73004G09_FLI
ccacaccttctataatgaactccgtgtggcgcctgaagagcaccctgtgctgctgacggaagccccactcaaccccaaagctaacagggagaagatgacccaaatcatgtttgagaccttcaatgttcctgccatgtatgtcgccatccaggctgtgctttccctgtacgccagtgggcgtacaactggtattgtgttggactctggtgatggtgtcagccacaccgtgccaatctacgaaggttatgcccttcctcatgccatcctgcgtcttgaccttgctgggcgtgacctgactgacagcctgatgaagatcctcaccgagagaggttactccttcaccaccacggccgaacgggaaatcgtacgggacatcaaggaaaagcttgcatacgtggctcttgactatgatcaggagctggagaacgccaagagcagctcatctgtggagaagagctacgagctgcctgatggccaggtgatcaccattggggcggagaggttccgatgccccgaggtcctcttccagccttccttcattggtatggaagctcctggcatccatgagaccacctacaactccatcatgaaatgcgacgtggatatcaggaaggacttgtatggtaacattgttctcagtggtggcacaaccatgttccctggcatcgctgaccgtatgagcaaggagatcaccgcccttgccccgagcagcatgaaaatcaaggtggtggctccacccgagaggaaatacagtgtctggataggagggtccatccttgcctccctgagcaccttccaacagatgtggatctcaaaggctgagtacgatgagtcaggaccagcgattgttcaccggaagtgcttctaagctcaagggcccccttcgtccccattctatgtattcctttccttgagtgcttttcttataagctactatgtttgagattgccggcctttgagcaggcaatgttgttggatctgtatcttgtggatcactacaatgcatgcgttgctccatcttcttttcatgccaagtttgctgtcatacttgctagtggggaaaacaacaatgacaacagtggtgagaacagcaaccacaaaaaaagagaggatggaaattattgaagttcctaggatcgtattgtaactgtacttgtgcgagtaacattattggttctctttgtatatccatctctgagacatgc

SEQ ID NO: 35325 - DNA, 1857 bp, Zea mays
  Clone ID: UC-ZMROB73004H12_FLI
cactgatccacctcgccttctgcttccttcagcggttccgcccatcgactcgacagatccttgttcacgacctcaccctattcagatcccaagcggccacgcccaagcccaaaccctacccacccatctcaagttctcaaccagcgatgatggcagcggagccctcgccgtcggttccctccaccgccgctgaagacatggaaaccctcgccctcgactcatcctcgtcgtccgccgccgctacggcctccgcctccgaccccctccttcggccacctacctccccgaccgccgccgcgagcgacgaccccttcgtcatcgacgacttcctcgacgaggacgacttcaccgccccgccgcccagcgtcgccggcccgccgcccgccgtgcttggcgatgcggcgtccccagtgttccccaagatcaccgtatccgatcccaagaagcacgccgagcctagcggcgggggtgctgccggtgtgatcccagggtccggcagctacttttcttacctcatcaccacacgttttgcgggcggcggtggggaagtccgcgtgcggcggcgcttccgcgacgtggtggccctcgcggacggccttgccgcagctcaccgcggcctatttgtcccggcccggcccgacaaaagcgtcctcgaggggcaggtcttgcaacgccacaacttcgtgagccagcggtgcgctgcgctccagcgttacctctgccgccttgccgcgcaccccatcgtcggccagagccctggtctccgcacgttcctcacggagcctggtgccatccccgccttccagagtgaggcaccgcggtactggacaaccacggtgaatgctgctgctccgatggttcagatgaaagctgggagggacttgtttgggatgtttaagggtctcaagcagacgatggtgaatgggatggttgcaacaaagcctccacctgtggagcaggagacagatacagagttcctggcgcacaaggccaggttcgaggacttacaacagcagcttaccacaacatcacagcaggctgaagcgctcgttaaagcccaagatggttatagagaaactacaggtcacttgggaatgacattgattaagctggcaaaatttgaaagagagcaggcaacatgtaactccctaagaagacggtctggtgaaatccataactttgcaaattctgttttgaagatgagcaggtcacagataaaattgaactctgaaattgtgaaacacctgggtagtatccatgaatatttggagatgatgatatcagttcatcatgcatttacagatcgctctaatgctttacattacgtgcaaattctgtcagcagatttgttttccttgcatatcagggcaaggagacttgaatcgtcgtcagcaagagatatggggcacgagtggtcaacatatcagaaagtagaggggttgaaagaaacaataagatcagcggaagcagccaaaagtgatgcagttagagaatatgaaagtattaaggaaaacaacaagattgaaataaaaagatttgacaaggaaagacgccacgatttcatcgagatgctgaaaggttttgtgataactcaggtgtcttattcagaccattttgctaacatgtggacaaaggtaacggaggaaacagaagtatatgcaaacaggagcagctgatgtacgtatagggagtgtagaatagttgattttgatctatttaatttgctccaacatccaacgacaacaatcattcttattcttccccagttttgtcaccttgagttggttgtaaacttgtaatgccacatgagtcatgtgcagtcgtgaaattgggtcccggcagatgagcttctgtgct

SEQ ID NO: 35326 - DNA, 854 bp, Zea mays
  Clone ID: UC-ZMROB73005A03_FLI
tggaggtacagccaaggaacacgaagtacatgtcgctgggagacggacgcggcctgtgcatggaatgcctgggatctgcagtgatggacacgagcgagtgccagcctctgtaccattctatcagagactactacgaggggatggacatgagactggaccagcagatacccgtgctcttggttgagcggcaagcgctcaacgaagccatggaaggggagagtaaaggcccacaccacatgcctgagactaggggcctatgtctgtccgaggagcggactgtgagcagtatacttaggaggcccagaattggtggaaaccggttactaggcatgagaactcggccacagaagctgacgaggagatgtgaagttactgcaatacttgtcctgtatggcctccccaggctactgacaggttccatcctcgcccatgagctgatgcacgggtggctgcgcctcaaaggttaccgaaacctaaacgcggaggtggaagaaggcatatgccaggtcatgtcttacttgtggctggaatcagagattcttccgtcatcctcgaggcacgcgcagccttcatcatcgtcctcctcctcatcctatccagcaacatcatccgagaaaggtggaatatctcataccgggaagaagctgggcgagttcttcatgcaccagattgccaatgacacgtcgacggcctatggtgacgggttcagaactgcgtacgctgccgtcaacaagtatggccttcgccaaacactgagccatatacgcctaacaggaggcttccctgtataataagagtgacaaaaaagacacaaaatgtccatgcatgatcatatcgatatcaaaaggttatat

SEQ ID NO: 35327 - DNA, 1933 bp, Zea mays
  Clone ID: UC-ZMROB73005B01_FLI
ggggcggcggcgatggaggcggatgcggcgcacagcgggaggggcgaggcggaggatgaggaggtcgagagcagcgactacacgtcggaggacgagggcaccgaggactaccgtcgtggtggataccatgccgtccgcgtgggagactccttcaagcagggcgcctacgttgtgcagtacaagctcggatggggccacttctccaccgtatggcttgcctgggacacagtccactccagatatgtggcgctgaaggtgcagaagagcgctcaacactacacagaagcagccatggatgaggtcaagatcttgaagcagattgctgatggtgatcctgacgactcaaaatgtgttgttaagcttcttgatcacttcaagcactcggggcctaatggtaaccatgtgtgcatggtttttgagtttctcggtgataacctgttgaccctgataaagtacacggactatcgtggaattccccttccgatggttaaggagatatgccgccatgtgctcattggccttgattacctccaccgtacactttctattattcacactgaccttaaaccagagaacatattgcttgtgtctaccattgatcccacaaaggaccctcggaaatcaggcgtacccctagttccgccttcaatgaggacagacgagccacctcctaaggtgcctgcacaatcaggaaatggtggcctcaccaagaaccagaagaagaagatccggaagaaagctaaacgtgcagttgctgcaacttcagaaggaagtagtgctgtggcatctgcggacacagatgggtcagatgaccgaggagatctgggtacaacaaatgagggtagtcctagacaggatggagctaagaagcgggtgacacgagataggcgcggtagcaaaggggccaagaagatgatggcaatgaaggctgatctaaaatgcaagctggttgactttggaaacgcatgttggacatacaagcagttcacaaacgacattcaaacaaggcagtacagatgtcctgaggttatacttggttccaagtattctacatctgctgacatgtggtcctttgcatgcatttgctttgagcttgccactggggatgtgctattcgatccacatagtggcgataattttgacagagatgaggatcacctcgcgctgatgatggagctgctaggaatgatgcctcgaaagattgcgttgggtggtcggtattcacgtgatttcttcaatcggtatggggatttgcggcacatccgacgcttgcggttctggcctctcaacaaggtgctgatggagaagtacgagttcactgaaataaatgctaatgggatggcagattttcttgtcccaatacttgattttgttcctgagaagcgccctacagctgctcaattgcttcagcatccatggcttgatgttggtcccctccgacagcaacctaaaacacggccagagtcagcacggagtccaggtgatggtgtttcagagaagcaaaagaaagagaaagaagaaagagaggcaatggccgtagagttagggaacattgccatagatggtgcttcttccaggatggcaaatgacccccaatcaagcacaaataaaacaaccgctacctcttctaagaagtgagctgcatttgatttcatgagttaagctgtaaaacttgttttcattcgagaattgctccatgagtgggaaacatatgtttttttttaggtttgagatatgttaggatagctaccgagggaaaagaacagtaggctaaatatttgttgtatggggttgggtggacaaggttagatttgtcggggttgcagtaaccctagcccttttctttgagaacatattcttttgtacaattagaatccgcgatttgtttaatggtagcattgagcaactggaaacccgagacgagttttgcctt

SEQ ID NO: 35328 - DNA, 1201 bp, Zea mays
  Clone ID: UC-ZMROB73005B07_FLI
attctctggtatggttctcatcttgtgcggtcacatgggtccaccttctccaaggtcatcaaggtttttgttgtccttgtggtgaccgccaactccgtagccgagacggtaagcctggccccggagatcatccgtggaggtgaatccatccgatccatctttggcatcctcaacagagcaacaagaatcgagcctgacgatccagagtcagagagggtcaccaccatccgaggtgacattgagttgcggcatgtcgacttttcgtatccagcacgcccggacatccaaatcttcaaggacttcaacctgaaaatccaagctgggcgcagccaggcgctagtcggagccagcggctcagggaagagcaccatcattgctctcatcgagcggttctacgacccgtgcggagggaaagtggccatcgatggcaaggacatccggacgctgaacttgaagtccctgcggcgcaagatcggcctggtgcagctggagccagtcctcttcgcgtcgagcatcctggaaaacatcgcgtacggcaaggaaggcgcgagcgaggaggaggtggtcgaggcggcgaagacggcgaacgtgcacggcttcgtgagccagctgcccgatgggtacaggaccgcggtcggcgagcggggcatgcagctgtcgggcgggcagaagcagcggatcgccatcgccagggcggtgctcaaggacccggccatcctgctgctggacgaggcgacgagcgcgctggacgcggagtcggagtgcgtgctgcaggaggcgctggagcggctgatgaaggggcggaccaccgtcctggtggcgcaccggctgtcgacgatccgaggggtggaccgcatcgcggtcgtgcaggacgggcgggtcgtggagcacggcagccactccgacctcctggcccggccggagggcgcgtactcgcggctgctgcagttgcagcaccaccgtgtgtgacgacgacgagcctctcctccctctgatgataaaaatcttcggtttggaggcctgggcgaggtggcgggttcttcttcggtttcttgggttggttgggcggtggtcctgtcgtgcggatgtagatactaggccaaaccgtgctgtgttcttatgcataaacttggaacatgtgtgatctgtatcttctccctgggatgggatgtactaccatgaaatgcaactcttttggtcc

SEQ ID NO: 35329 - DNA, 2329 bp, Zea mays
  Clone ID: UC-ZMROB73005E01_FLI
gccggggccactttccccaaactgcccttcccaccatcccctctaggctccaaaaccaccacctagctgctcgtcgctccttgtctcgtctccttcactcacctccccccgcggcccgcgccaatggccgattcgccaaaccctagctccggcgaccttcccgccggcgctgggtgctcgccggagaagccggtcctggcggatcgacgtgtgtctgcgctcgccggcgccggcgcgaggtacaaggccatgtcccccgcgcggctgccgatatcgcgggagccgtgcctcaccatccccaccgggtttagccccggagctctcctcgagtcccccgtcctcctcaacaacttcaaggttgaaccgtctcccacaaccggtactctgagcatggctgcaaacatgaacaagagcactcatccggacatactgccttcgcctagggataattcagctgatagtggccaagaagatggaggctctcgggagtttgaattcaagcctcatctcaattctcaatcgtcggctactgcagtcaacaatcaaaatcatcatgacattcctatgcaaaatcatggctcaaatcatgcctcaccatctagcaatttgatgactgaaaataaacctctatgctcacgggaatcgagtcacacagcaaatgtttcaagtgctccaaaccaacctgtttcaatagtttgtccatctgacaacatgcctgctgaagttggtacatcagagatgcacctgataaatagctctgaaaatgctgcccaggagacacaaactgaaaatgtagctgaaaaatcagcagaggatggctataattggcgcaaatatggacagaagcatgtcaagggaagtgaaaatcctagaagttattacaagtgcactcatcctaattgtgaagttaaaaagctattagagcgttcgcttgatggtcagattactgaagttgtttataaagggcatcataatcatcccaagccccaaccaaatagaaggttagctgctggtgcagttccttcaagccaggctgaagaaagatacgatggtgtggcacctattgaagacaaaccttcaaatatttattccaacctctgtaaccaagcacattcagctggcatggttgataatgttccgggtccagcaagtgatgatgatgttgatgctggaggtggaagaccctaccctggggatgactctaatgatgatgatgacttggactcaaaacgcaggaaaatggaatctgctggtatcgatgctgctttgatgggtaaaccaaatcgcgagccccgtgtcgttgtacaaactgttagtgaagttgatatcttggatgatgggtatcgctggcgcaaatatgggcagaaagtagtgaaaggaaaccctaacccacggagttactacaaatgcacacatacaggatgcccagtcaggaaacatgttgagagagcatcacatgacccgaagtcagtgatcacaacatatgaaggaaaacataaccatgaagtccctgcttccaggaatgcaagccatgagatgtctgcagctcccatgaagccggtggtgcatcctattaacagcagcatgccaggctttggtggcatgatgagagcatgcgatgccagggccttcaacaatcaatattctcaggcagccgaaagtgacaccatcagtcttgaccttggtgtaggtatcagccctaaccacagcgatgcaacaaaccagatgcagccctcagttccggaacctatgcagtatcagatgcgacacatggctcctgtgtacggtagcatgggacttccaggaatgcctgtgccagcaatacctggaaatgtagtagctagcagcatatacggctccagagaagaaaaaggaaacgaagggtttactttcaaagctgcacctttggaccgatcagctaacttatgttacagtagtgctggtaacttagtgatgggtccatgagtgcctcttctgatggctatacctccatgaatcacacctatcaccgtcgtcatgaagttctcttcggaagatgctctaccgtgtatcatcttcacataattggaggcggtcaaggtatacctgggagctgcagcgatggcacatgatgtcttttgctgtgtggatgaactcgctgtatgtgacgctgcagctaaacattcgttgtacagcaaaccagttatgattaattagattatgataatttggttatgtaaacttctttctggacagaaccgaagagccatctggtggcaaagctttgttatctcctgcatatgaacgatgccagtttgatattcatatgaaatgaaatatatcatttcac

SEQ ID NO: 35330 - DNA, 1188 bp, Zea mays
  Clone ID: UC-ZMROB73006A12_FLI
gtatgaatatactcccttcgttttgtttttgaagccatgatcaaaaaagtcgctagccaaaactagcgacatgttgtcacaagaccagcgttttgaattacaccgaaaactcaggattacataccgaaggcttatatcatttttttcatggaagattacggtcccagtaaaacactccgacacatgcctcgacaaggcacacaccattccccagaattatatactctccgaagatcgcctgcaggagagccaactcaagatgctatcatttggtgatgtccccccaagcaggaacatggtggcggcactgaagacggcgtggattgcccttgtaagttgttttttgccggacgcgtggggaacccaactcgtcaagtccagcggtgccgtccagagagagagcctagagcacagctagccccgccagccatggcggccgcggcgcgcgcgatcatctgcgagctggcgccgcagaaggtgtcgtcgacggcgccgaagaaacgtgacgccgggacaaaggtggtgctccagccccgtctctgcacgctgcggtcgtacggcgccggcagcggcgttgtgacgcggaggattctgaccggggaggaggacgggagcggggccgccgactcgggcgggtcctcggcgtcaccgttcttcgcctcgctcgccaactacatcgagagctcccgcaagagccaggacttcgagaccatctccggccgcctcgccatggtggcgttcgcggcggcagtggccgtggagacgacgacgggcagctcgctgttcaagaagctggacacgatggagatcgaggaggccgcgggggtgtgtgtggcggtggtcgcctgcgccgcggcgttcgcgtgggcgtccagagcgcgcaacaggatcggccagatgttcacgctggggtgcaacgccttcgtcgactccctcatcgacaacatcgtcgaggcgctcttctccgagggcgagctgcaggactggtccgatgacatgtaaacaaatatgcacatatgtatacgcagatggagaataatagtattagtagatagactcatagtcatagacagcacgtatatagtgtcaagtatatatagtaagtagatgaagctgtcaagtatttatagtaactggttcaagctaaagagaaggaagctcatagaatcaatactagaaattacaagt

SEQ ID NO: 35331 - DNA, 1786 bp, Zea mays
  Clone ID: UC-ZMROB73006B02_FLI
gacgatcgaggtgtacagcggcgacacgctggcggtcagggccgtgaacctggccaggtacaacgtgaccctccactggcacggcctccggcagctgcggaacgggtgggcggacgggccggagttcgtgacgcagtgccccatccgccccggcggcagctacacgtaccgcttcaccgtcgaggggcaggagggcacgctgtggtggcacgcgcacagctcctggctccgcgccaccgtgcacggcgcgctcatcatccaccccaggaggggcgtcccctaccctttccccaagccacacaccgaggcccccgtcatcctagcggagtggtggaggagggaccccatcgccgtgctccgccagtccatgatcaccggcgcgccacccaacgtctccgacgccctcctcatcaacggccagccgggagacttgctcccgtgctccagccaagagacgagcatcatcccggtggtcgccggcgagacgagcctgctgcgcatcatcaacgcggccatgaacaccgagctcttcgtcagcctcgccggccacaggatgaccgtggtcgccgcggacgccatgtacaccaagcccttcgagaccgacgtcgtcctcctcggccccggccagaccaccgacgtcctcgtcactgcccacgcagccccgggacgatactacctcgccgcgcgcgcctacgcttcggcccagggcgttcccttcgacaacaccaccgccaccgccatcttccagtacaagaacgcccccggctgccccaccacctccggggcaggggctggagccggtgccggtgccggcaccttcagcggcccagtaggccggtcctctaggtcctccggctacctcggccgcgcagggccgcagccgatgctcccgttcctgccggcgttcaacgacacgaacacggcgaccgccttctcgaacaggctccggagcccagtgccggtgaaggtgcccggcccggtgacccaggaggtgttcaccaccgtggggttcgggctcttcaactgccgccccggcccgttctgccagggccccaacaacacccggttcggcgcgagcatgaacaacgtgtcgttccagctccccgacaccgtctccctgctgcaggcgcactaccaccacatccccggcgtgttcaccgacgacttcccggcgctcccgcccgtgttcttcgacttcacctcgcagaacgtcccgcgcgcgctgtggcagcccgtcaagggcacccgcctgtaccgcgtcaggtacggcgccgtggtgcagatcgtgttccaggacacgggcatcttcgccgccgaggagcaccccatgcacatccacggctaccacttctacgtgctggccacggggttcggcaactacgacccgcgccgcgacgccgccaggttcaacctggtggacccgcccagccgcaacaccatcggagtgcccgtcggcggctgggccgtcgtgcgcttcgtggccgacaaccccggggtgtggctcgtgcactgccacatcgacgcgcacctcacgggagggctcgccatggctctgctggtggaggacggcgagtccgagctcgaggccaccgtggcgccgccgctcgacttgcccatctgcgtgctgtagagatttttcagtttgttgctggcgtgcgtcactacgtggagttacagggaggctgtgtcctgtgtgcatcgttctgtgtgtttgcatcggtagttgggcatttgcattcttggatttccatttgaatttgcaaaggaaaaggggaagtaaagtagt

SEQ ID NO: 35332 - DNA, 737 bp, Zea mays
  Clone ID: UC-ZMROB73006B06_FLI
ctttcatcgttttctctacatgtttctgtatatatatatatatggggatttggcgtcttctctgtagtcgacaataatcctttcccgtctaatcgagcagggaagcgaagaacagggaagcaaggacatggatgctttcagtgcagtgatggacaaggtaaagagccacccagaaatgatggagaaggtaagtgcagtgatggacaaggtgaagaagagccacccagaagcggtggaaaaggtcaaggacgaggtgaagagccttgctgacgctctccacctgcggagacatggatccaaagataaagaacctgagtctgaagagaaggccgtagaaggcgaggcagcgcagagcgtcgaggaggaggagggtacctctgctgacaagactgcagaacctaatgtgttggagcaggccgtacaggagattcaggctgtcgccgcagctttgcagcagacagcacctgaaactgaaactgaaattccagttgagactgctgctgctgctgctcctgaaactttggctgaaggagacaagcctgaagaaacaaacagggatgtggagaaagacgacccaaagaagcggctcgatttcgccgggttcttcgccatgctgtttgagaggttctgctccccggccaacaagaagaaagactgagtgattgcaggtcagctgtggatttctcgttttgtgatcttggacgtggaaattacattttactgggtggtgtacagtc

SEQ ID NO: 35333 - DNA, 570 bp, Zea mays
  Clone ID: UC-ZMROB73006B08_FLI
acggctggtcgagcggcgccgcccttggctaggtcttcgctgggtccttccccggcgacgagcgtccatctggggtcgactgaactgagcaggcagtaggaagagacactatgttgttcttctcctacttcaaggagctggtggggaaggaggtgacagtggagctcaagaatgacttggcgatccgcgggacgctccactcggttgaccagtacctcaacatcaagctcgagaacacccgcgtagtcgaccaggacaagtatccccacatgctttcagtgcggaactgcttcatcaggggctcggtggtgcggtacgtgctgctcccgcaggacggcgtggacatcgacatcctccacgacgccaccaggagggaggcgcgcggaggctgatcctgatgcgcacccgctccctcacctgctggctgctgcttcatccccgattgtacgaagcatgcatgtacggtgtgtggtagacagatgccccagtttagttctttggtgcttgccttgacatagatattccaggttggatgatgacctgaatcacctgatatattattgtcatatc

SEQ ID NO: 35334 - DNA, 1828 bp, Zea mays
  Clone ID: UC-ZMROB73006B09_FLI
agcacttgttcctctgctgctcgcccacctactcctctgcgtccatggcgccaccgttacctcggtcgccacgcctccgcctctcccggtcctgcccgtcccgtcctacgcgcagctccggtggcagctctccgagatggcgctcttccttcacttcgggcccaataccttcacggactccgagtggggcaccggccacgctgacccctccgtgttcgctccctccgcactcgacgcgggccagtgggcgcgcatcgcggcgcagggcgggttcggccgcgtcgtgctcacggccaagcaccacgatggtttctgcctgtggccgtcggcactgaccgagtactcggtggccgcctcgccgtggcagggcggggctggggacgtcgtcgcagagctcgccgcagctgcgcgcgcggaggggcttgggctgggcctgtacctctcgccgtgggaccgccacgagccggtgtacggggacaccatcgcgtacaacgagcattacttgggacagatgacagaattgcttaccaggtatggagatgtagaggaagtttggctagatggtgcaaaaggcgacgccaagaagatggattatatgtttgatgcctggttttcacttatacatcagctacaagaaagggtagttatcttctcagatgctggaccagatactagatgggtgggagatgaggcaggagtcgcaggctatacttgctggtctcccttcaacaagagctctgtgacaattgggcataccactgctgaatactcatccagtggggatccttttggtcaagactgggttcctgcagaatgtgatgtttccatcagaccaggttggttctggcatgcctcagagaaaccaaaaaacgtgacaactctgcttgacatatactacaaatcagttggtagaaactgtctcctcattttgaatgtccctcccaattcatctggcctcattgccgatgaagacatacaagtcctccaggaattcactgagattcggcgtgcaattttctctcagaactttgctgccaatgccactgttacagcaaacagtgtgcgtggtgagcaagataatctgcagtttgcaccatccaaagtgcttgaagacgggatatactcctactgggctccgcaggaaggccaaacctgctgggaaatgctcttcgatcttgggcaatctacttccttcaacttgctccagctccaggagcctatacaactggggcagcgtgttattgagttccatgtggctatccttgtagatgaactgtggcaaacaattgttgaaggcacgacaatcgggtacaagaggctgctactgtttccagtcactgaatctcggtacctgaagcttaccatcgacagtgcgcgtgcagatccacttatctcgttctttggtgtcttcatggatcccttctcgtccatacatagtttgcagaatcatgtcaaaccaccccggacaaatagtaacgaagttacaatgttgaggatggcccatgcttctgtcaacaagagtattgacgcaatgtagttgttgagtgtacatctgtcagtattacttctagtctgccctggtcatttcaacatgccagaatcacttgcacgttgatttgttctttggactggagaagggccactcgatggtgggcaatgtgtgtatatcttcagatttgcttgccaaagctactaatacgagaactactctttctgcaatcatgcatggatatgttgttcccaagatcagctgttgaaacttcatgtagtctgtactagtgtctgttgaattatgtgccagcaggaagtctggggtttgaatgaagtg

SEQ ID NO: 35335 - DNA, 1304 bp, Zea mays
  Clone ID: UC-ZMROB73006D02_FLI
cagagctctcatcctctctctctctctctttctcgcgctcgctttgcttcctcgtcgaggtccaagttcctgcattgatggcgaccgaggtggctgagactcccgcgccgttggcggaggcggtccccgagacccccgcggaggcaccggcggcgcccgccgccgaggcgaagcctaccaaggccaagaaggcctctgcgcccaagaagcgtgccaacccgacccacccgccgtacgccgagatgatctcggaggctgtcacgtcgctcaaggagcggacggggtccagccagtacgcgatcgccaagttcgtcgaggacaagcacaaggacaagctcccgcccaacttccgcaagctcctgctcggccagctcaagaagctcgtcgccggcggcaagctcaccaaggtgaagaactcctacaagctgcccgcacgcgccccggccgccgccaagccgaagcccaagtccaagaccgctgtgaagaagcccaaggccggtgccaagaagcccaaggccgccaccaagcccaagccgaagcccaaggccaagtcccccgccaaggcgaagcccgccgcaaagcccaaggcagccgcgaagcccgccgctaagccgaaacccgcagcggccaagcccaaggcggccgccaagccgaaggccaagccagctgccaaggctaagccgaaggctgccgcggccaagccgaagccagctgccaagaaggccggccgccccgccaaggccgccaagacgtcagccaaggacacgcccgggaagaaagcggcgcccgccaagaagcccgccgctgcggccaagaaggcccctgccaagaaggccgccccagccaagaaggctgcgaccccgtcgcggaaggtgccgtcccgtaaggcgaagaagtagagcggtggtcttggcaggaatctagggtttcgtgctccttcgattttagatgtttactcgtttttgctctagttgtgggtggtgcgcggggtgggttactaggttgtaaatttgatgtcggaggctggggtacacatgggcattctgtaccagcggtggaaggcgccggcgacgatgacgaaccagtgtgtgttattattattagaagacaacgttgtatttctgtagctgaattgttgagttgcggatatcattgtgctgctaaggttaatgtgacgataaagttaatgtcaagagttaccttccttcgcgtgtatgtactctgattattcaggctgtttttggctgggattaatctggtcttatctgaattccctatctgaaatagagaattgttcggtgtgc

SEQ ID NO: 35336 - DNA, 1258 bp, Zea mays
  Clone ID: UC-ZMROB73006D07_FLI
caacgtcgccgctgcggcccaagaacggcgtcgagctggaggtgacggtgctgtcggcggactcgctgcgcctgccgacgtcctactggcctctgccgcggcggctgcggccgtacgtgaccgtgtcgtcgccggacgcgctgcgcagctcggcctacagcacggcggtggcgccggccggcggtacgggtacggacgagcacgcgtggggcgccacgctcgtcgtccccgtgggcgcgggcttcctcgagggccgcgccgacgtccgcgtctccgtgctgtcggagcccgccgcctgctgccggctcgtcggcgccacgccgctgggctggtgcggcatccccgcggccgacgtgctcgacggcctccgcccgccgcgcgcgctccgccgcctcagctactcgctgcgctgcccgcgccgctgcgggggcgggggcgcacccgggcggggccacggcgtcgtgcacctcgccgtgcgcgtgctcggcctgcgcgacgacgcgccggcgaggacggctgcgacagcgccgctggccgcggccactgcgccggtgcagcggggctggtgccgcgtcgcgatgggcatccccgtgtccggggccgcgtcggccgtcgtcggggtgcccttgtcgtcgtggggcgccagcgccacgtcacggtgaggacgcgcggcggcacaggcgcacagcaggaggtttggatggatgaaaggaggatcggcggagagtcggagacgacgaccagccgtggaaaaccgatggaaaaatgtccatcagcgagctcggtagacctggtcctgatcgcggcttcagtcaaagcggggtgccttccgtgcacctgccggatatttgtggccttcgctattttggaactggtactgaaggtaccacgtgtccaaatcaaagtcagcgcggctacgtgccctcgactaaatacgacaagattcatttggttagggggtgtttgcttagagagaataaagattagtctctagtttttagtcttttttgccaaacactatgactaaaatgatttagcctttcacataggtgctaaaatagactaaaagcctataattaccctgttgcccttacattctctctgtagtatttggttgtgagagcatgtttgtatggacaactaatattgtgagtatattccaagggcatttgagtctttagacagtgtatttaatgattttagaatatgtttagtccctaaaaccaaataagtagggactaaagtttagtccaaggac

SEQ ID NO: 35337 - DNA, 1308 bp, Zea mays
  Clone ID: UC-ZMROB73006E05_FLI
cgcgcggtcgcccttctcgctgcgccggtgggactcgaagaagctgctggtgtggctggtcgttctcctcaccctgctggtcctggcggtcctgggcgcgcggaaggcgcacgaggcgtggcgcgaggcggcgcggcggcggtcgggggcctggaagatgacggcgttccagaagctggacttctcggcggacgacgtggtggagtgtctcaaggaggacaacatcatcggcaagggcggcgccgggatcgtgtaccacggcgtgacccgcggcggcgcggagctggcgatcaagcggctggtggggagagggtgcggcgaccacgaccgcgggttcaccgcagaggtcaccacgctgggccgcatccggcaccgcaacatcgtgcgcctgctcggcttcgtctccaaccgggaggccaacctgctgctgtacgagtacatgcccaacgggtcgctaggcgagatgctgcacggcggcaaggggggccacctcgggtgggaggcccgggcgcgcgttgcggcggaggcggcgcgcgggctctgctacctgcaccacgactgcgcgccccggatcatccaccgcgacgtcaagtccaacaacatcctcctcgactccgccttcgaggcgcacgtcgcggactttggcctcgccaagttcctcggcggcggcggcgccacgtccgagtgcatgtctgccatcgccggctcctacggctacatcgccccagagtacgcgtacacccttcgcgtggacgagaagagtgacgtgtacagcttcggcgtggtgctgctggagctcatcacggggcggcgccccgtgggcagcttcggcgacggcgtggacatcgtgcactgggtgcgcaaggtgaccgcggacgccgccgccgcggaggagcccgtcctgctggtggcggaccgtcggctggcgccggagccggtgccgctgctggcggacctctacagggtggccatggcgtgcgtggaggaggccagcacggcccggcccaccatgcgcgaggtcgtgcacatgctctccacctccgccgcggcccagcccgacgtcccccacgccttgtgcaaggtcgtcgattaatttgccttatatatgacgattatgtatatgatccgggcagggttagcgcctgtgatctatttagcggctgcctttttggcgtcactcgtctcgtgtgtgatgatggctggatggatgtgtaaaacaaataaccagcaggtggctactcgtgaatgaaagttgccggttcttattctcatgcatatatattagcaacacacaaagtgagatggcat

SEQ ID NO: 35338 - DNA, 1229 bp, Zea mays
  Clone ID: UC-ZMROB73006E07_FLI
ctcctgcactgttgatggaaccaagctggtggtttctggtggatgtgcggactctggtgttcttctcagcgatacctacctcctagatgtgacaatggaaagacctgtttggagggagatacctgcatcttggtctccaccttcaaggctggggcactcgctatctgtctatgatggcaggaaaatcctgatgtttggtggccttgctaaaagtggtcctctacgacttagatctagtgatgtgttcactctagatttaagtgaagacaagccttgctggcggtgcataactggcagcaggatgccaggagctggtaatcctgctggggtcggcccaccacctcgcctcgaccatgttgtcgtgagccttcctggtgggagagttctgatatttggtggttctgtggcgggtcttcactctgcttcaaaactttacctcctggatccaacggaagataagccaacctggaggcttctgaatgttccagggcatcctccacggttcgcctggggccacagtacttgtgttgtcggagggacaaaggcaatagttcttggaggacaaactggagaagagtggacgctaactgaaatacacgagctttctctagcaagctcattagtctgaagatgggaaggtcccagcaagctttccagcttccttgaagcaatgtctctggagacagctacctgttcatatgacttgaggcagattttttttccaacagtggtgtgcaagcacaagcacaaaagggttggtgaagtggacaaccagacctgattacttgtgccatgcctgggagtcagctggtctaaaagtaggaataagttacctctgctgctgctgttcgtatgatctgaaatgatggaatagctggcatccataagctaatctcagttcttatcatgtttcaaatgggacactggcattatgtcgctggagcccctgatgcaacaggtaccctgccttctggttgcgcctgccttcggtgacaactgatgctgtggtcttctgttttttgacccatcaactgctgtgaagcttctttgttatgcttttgcgccacttcgtgcttactcaattgctgctttctggagaagctgtaacacagacacacctgctgtatttaattttgcctttcgtatcactttgtgcttacctcagctgttagtgatacctataacattttctttttaatctgattatcaaaggatgaattatgaatatc

SEQ ID NO: 35339 - DNA, 865 bp, Zea mays
  Clone ID: UC-ZMROB73006F01_FLI
atcacggccgatgaggagcgccgcatcgtggagctccacgcgcagtggggcagccggtggtcgcgcatcgccaggagcctgcccgggcgcaccgacaacgagatcaagaacttctggaggacgcggaccaggaagaaggcgctcgaggagaggagggctgccgcagcagcaacgtcgacggcggcggagtcggcgtcctcggtgatgacggtgtcgtcgtcgtccgagtgccgccgcccgcccgtatcgtcgtcgtcgtcgtcgtcttcgctacggcgggacgaagcgcggcgcagcggcgacgagaccgaggaggcgtccacgcccaccgcggcgccggcgaccaagcacgatgaggaaccccagccgcagccgcaggagtgctacgacttccccatggaccagctgtggaacgagatcgcggcagccgatgcggcggcgatgagctaccttgtcgtggacgcctgctggggcggagctgctgttggtggtcactgttattactacggcgccgccgcagcctcagccgcctcgccgccgccgccggcctcgccgccgtgggagtactgcggctccgatttttcgctgtggaggatcgacgaccaagagtactacaagaagatgctcgactcctcctcctgatcccggcccgcgactcatatcgtttggcgaggacacacgtacatacgcgctctgtgaatttgctagctcatatatattatccaggcgaggcgaggaacgagctgagatcatggtggtgagatgagatgagatgagatgagagagtagtgtgtattaatggtggttcagatcgagtagtgtgataaattaacagaatatatataataatttacgcttctctccg

SEQ ID NO: 35340 - DNA, 668 bp, Zea mays
  Clone ID: UC-ZMROB73006F09_FLI
ttcgaccccatccacttctcacctcaatctcgcgagaagcgaagccggaggaggagggtgcgaggagatcgcgagcagccggagccggagccggagccggaggcctagtagatgaagacgttcgatccgtggccggtcttcttccgccgggagtggaagcgcaattggcccttcctcacggggttcgccatcaccggcttcatcatcactaagatgacggccaacttcaccgaggaggacctcaagaactccaagttcgtccaggagcacaagaagcgctgaccaaccaggtgaaccccccgatcaagtccgcttctagatctcggccgccctggttgacgcttgtgtgcgatgcccctgcgctaggggatgggcgcaatgtttcggcgatctgttccggtgatgggtgtcactggcgctagtgttgccacgcggttcattttttccctttagactacccttagctagcctgtatcgatcatagttcataataccttccgttgatgccattgctgttagaatttgccgattggagtagcacggatgtttcagatagatttccatcatcgagatttttgcaattttggcactctaattgggcttcagactattggcatcgcgaagacgacaattgctttgctggcattataatcacacgccctttgaac

SEQ ID NO: 35341 - DNA, 1403 bp, Zea mays
  Clone ID: UC-ZMROB73006H07_FLI
cttccaaatcgaaggcgaacaaccgcttacctctgatcgtcggagcctcggtgggtggagcggttcttgttgcaatagttcttgctcttgttaccatcgtcgcaaggaggaagaagagaccaaagcagaacgaagagaggagccagtcttttgtttcttgggacatgaagagcacgagcggcagcagcgtcccccagctgcgcggcgcgcgcacgttcaacttcgacgagctgaggaagatcaccagcaacttctcggaggcgaacgacatcggcaacggcggctacgggaaggtgtacagagggaccctgcctagcgggcagctggtggccgtgaagaggtgccagcaggggtccctgcaggggagcctcgaattcaggacggagatcgagctgctctcccgggtgcaccacaagaacgtggtcagcctagtgggcttctgcctggaccaggcggagcagatcctcgtctacgagtacgtccccaacggcacgctcaaggagagcctcacgggcaagtccggcgtgcgtctggactggcggcggcgcctccgggtgctgctcggcgccgccaagggcatcgcctacctccacgagctagccgacccgcctatcgtgcaccgcgacatcaagtccagcaacgtcctccttgacgagcgcctcaacgccaaggtctccgacttcggcctctccaagcccctcggagaggacggcaggggacaagtcaccacgcaagtcaagggcacgatgggctaccttgatcctgagtactacatgacgcagcagcttacggacaagagcgacgtgtacagcttcggcgtgctgatgctggagatggccacggcgaggaagccgctggagcgcggccggtacattgtcagggagatgaaggtggcgctggaccgtaccaaggacctgtacggcctgcacgacctgctggacccggtgctgggctcgtcgccgtccgcgctggccgggctggagcagtacgtggatctggcgctgcgctgcgtcgaggaggccggcgccgaccggccatcgatgggcgaggtggtcggcgagatcgagcgggtgctcaagatggccggcggcccggggcccgagtccgcgtccaactccatgagctacgccagccggacgccgcgtcacccctacggcggcgacagccccttcgaccacagcaacagcgggttgccgtccgcgagggttgagcccaagtgaatctacagcgcgcgccgcgagtacatgcggaaaagcttcactcttcaacaaaagctagctctgaatgtacagggtattgtaattattagtgttataattttggttactatgataggtgtgcgattggattaagaactgatttcttgataacgattgtttacatgataattttggttgctatgt

SEQ ID NO: 35342 - DNA, 907 bp, Zea mays
  Clone ID: UC-ZMROB73011A02_FLI
cgccaacgtgcagactaaggaagcactgaccggccggtcatggcgaggatccacctctacgtcgtcgccgcggcctgcgccgtcgccctcgcgctcgccggcgacccggacatgctccaggacgtctgcgtggctgactacgcttccccggtcaagctgaacgggttcccgtgcaaggcgaacgtctcggcggacgacttcttcttcgacgggctgaggagcccgggcaacaccaacaacccggcgggctccgcggtgacggcggccaacgtggacaagttcccgggggtgaacacgctgggcgtctccatggcgcgcatcgactacgcgccgggcggccagaacccgccgcacacgcacccgcgcgccaccgagatcatcttcgtcctcgagggcacgctcgaggtcggcttcctcaccaccgccaacaggctcctcagcaagaccgtcgccacgggggacgtcttcgtcttcccccgcggcctcgtccacttccagcagaacagggggcacggccccgccgccgtcgtcgccgccttcaacagccagctccagggcacgcaggccatcgccatgacgctcttcggggccacgccgcccgtgcccaccgacatcctcgccaaggcattccgggtcggcagcggggaggtcgagcacatcaaggcaaacttcgcacccaagtagacgacgaccaggcagcgtgtctgcatttgttggtttctcaataaatatcccgcggcaacgattatattgctcggtcgatgtatcgtgtcgcagcgtgcagttttcgatttgttgttcttcgttttgagacgacattgctgaccacgctagttcttgttgctgctaatttgtgtggagccactgcttgtcctccaataaataacatgatcagccctttagtttt

SEQ ID NO: 35343 - DNA, 1094 bp, Zea mays
  Clone ID: uC-zmrob73011a04_FLI
atgtaggatgggctatggcgatgggtgttgattaaccatttcttttctctctctcttgtgcgtgccctgcttcttctctgtgcatgcgcatgtgtcggcggcgtactcgtgcaggtctgaggcgcaccggcaagagctgccgcctccgctgggtcaactacctccacccggggctccggcgcggccgcatcaccgccgacgaggagcgactcatcctccagctccacgcgcagtggggcagccgctggtcgcgcatcgccaggagcctccccggccgcaccgacaacgagatcaagaacttctggaggacgcgcgccaggaagcagaaggcggcggcgcagcagcagcagcagcagcaggacagccggagcagcaagacggcgacggcgtcggcgttctcagggtcagcgtcgtccgtgactaccaccacgtccagctgctctggctctcctagtccgaccagccgcggctgtggcacggccacgtcatcgtccgctctgaccgagtccgcgctgcggcaaagcggcggcgaagacgaggacgccgagctcgacgaggcgtccaccaccaccaccaccacggcaagccagcgtcaacaccaagacgacgaccaccagcagcagcaccaggagtgctacgcctcggaccacttctggaacgacatcgcggcggcggaggcggccatctacatgttgatcgacggcggctggacagggtccggccccggccatcccgccgccgatccgccttcgtcgccggcgtgggagtactgctctgattactcgctctggaggatcgacgacgacgagtactacgagaagatgctcgactcctcctcctgattcgattatccagccatcacacgcatatgcatatctatcattagcttatttctttcttttttttgtgctgattagtctagcatacagcagctatgagaatccaaagcttcggttcggctttcgttgcatctctttgtataatactgtaacatatctatatatatatatgtatgatatgatactgctctcgatcatatatattgtaccaatatgtgctaggatatatagacatgtagtataatcatcgtcgtc

SEQ ID NO: 35344 - DNA, 1274 bp, Zea mays
  Clone ID: UC-ZMROB73011B07_FLI
gttccgtttagctagggttccgtctccctccaccagacctgctcaacgccttccacgggcgcacctcgacgtgccttgagctagggtttcctctgccgctacctccgttttacgcggccggcgcgcagccatggcgatggtgcaggcgggcatgggcctcacccgggtcgtggtcctcgttggcgccggcgtcgccggctccgtcgttctccgcaacggtcgcctcgccgagatcctcggtgagcttcaggggatactcgacaaggggaacaaggggaaggacggaggagggggagacggggaaaccgatctcaacgaggctcttacctcgcaggtgcgccgccttgccatggagatccggcaacttgctaattcacaaccaataactgttctcaatggaggttctggacaatcaggagtatcaggcctgatagtacctgcagcaactgttggagcactaggttatggttatatgtggtggaaagggatctcgttctcagacctaatgtatgtcaccaagcgcaacatggcaaatgctgtttcaagcatgactaaacatttggagcaagtgcaaagttctcttgctgctgctaaaaggcatttgacacagcgcattgaaaagttggacgataaattggatcagcagaaggctctatctggacaaataagagatgatgtcactgatgcacgtctgaagcttgagaatattggttcagaaatcaagaacatcaaagaattggtttggggtctggatgggaaaattgattcaatggaagctaaacaggacttctcatgtgctggtgtgatgtacctctgccaattcatggagcaaaatggtggaaagcttccggatcgcctggaaggctccaaaatgacgacaaaacgttttggaggccaaaagttcttacagggattgcaactggcaatagaatcagggaattgtggcaaggacaccattgatatgctgttgaaagatgctgattcctctgataaaataaacaggacgtcctccatcaaatctgccagctaattattatctggtcgatactgattcgatgcccagtcggaatatttatagggttttcattacaagtaaatatgtaaatagctgcagccttttgcttgcaggaagtgcattttgtttaatttgtaagcttcgcaaaatgctagtagttgctactacgtaggaacctagtcatgctttaattttgtggtttcgctttgtgaaacgagaatgcaacacgtaataaacgaaaaacaccggttggctttac

SEQ ID NO: 35345 - DNA, 1866 bp, Zea mays
  Clone ID: UC-ZMROB73011C11_FLI
cctgttgctctgctgcacagcaatcgcctcgtttcatagtaaggaggaggaggttgaggcgaagatgatgcagcagatgcagcaggagcagtggaacgccgccgccgcggggctcctccggccgaccaagtcggcgccctgctcgcccatcaagccagcggcggcggcggccatgctgcggacccactccgactccttccacgtcgcgcacaaggtgcccgtcggcgacacgccctacgtgagagccaagcgcgtccagctggtggacaaggatccagagaaggcgatcgctctgttctggagtgcgatcaacgccggcgaccgcgttgacagcgcgctcaaggacatggccatcgtgatgaagcagcagaaccgcgccgaggaggccatcgaggccatcaagtcgctgcgaagccgatgctccgaccaggcgcaggagtccctcgacaacatcctcctcgatctctacaagagatgcgggcggctggacgaccaaatctcgctgctcaagcacaagttgcagcggatccaccagggccacgccttcaatggcaagcggaccaaaacggctcgctctcagggccgcaagttccaggtcactctcgaacaagaagccaccaggctccttggcaatctgggatgggcgctgatgcagaaggagaactacacagaggcggagggggcgtaccgtcgtgcgctgctcatcgggccggacaacaacaagatgtgcaatctgggcatctgcctcatgaagcagggccgcgtgctcgaggccaaggatgtgctcaagcaggtacgccccgcgggggtcgatggtctgcgcggtgccgactctcacctcaaggcctacgagcgagcgcaagagatgctgcgggacctcgagaccaagctcgtcggccgcccgcgcgctgaccagctcgacacgaactggctctacgatgcgctgctgctgggatcgtcctcgagcatctggcagccgcagccgtgcatcgaccatttgctgccacctccggctccggcatcaatcccagccctggccccggcgccgcgcgaccacttcgccgatgaaaacgccggactcagcaagaagctggcggcgctccaggcgaacatgcttaatgtggacgcgcagcccttctactctctgcgggtgccgccgcttgcagcgaagcctcataacacgctgcctcagcagaagccacatagcacgctgcctcagcagcagcagcagaagaagaagccagctcctgtccatgatcccttgggcaacctgaagaggacacggtccagcaattgcatggacaaggcaggagcagtggtggacaaggcgcaaagcatcgacgagaacagcggcaggaggaagtcgctctcagctgaggacagatggccagagctgcccgaccacagcgcgttcgacgaggccctcgtcgcggatatcctgggcccggtgttcgacgacaaaccaacagctgctggaactaacggccacggcaagctgccggcgagctgcgacacgagcccagcagcgaaggagaagatcagcaagaggctgaggatcttccaggacatcacaaagacagtgaacaatttctgattcggtttcggttttcttcacgttcctactcacaacaggcaggctcgaggtggcgatacacagagaaggagaaagagcttgttctcctgagagctcctgtctggcaactaaattaaacagggattctattcagtttaaatttaatgctgattttgattcaatttattaacaccaaaataacagctgattctttttccacgaggctctccttgtaatagaactatagaagtgggctgctgcatctcgttctaatttcgtttcttttgaataac

SEQ ID NO: 35346 - DNA, 1395 bp, Zea mays
  Clone ID: UC-ZMROB73011D10_FLI
ggggcaccaggcgcagcacggcacggacgacaccgaggagctgcttgcagcccaccggcagctgtggtgccatgccctgggctacgtcaagtccatggcgctcaagtgcgccctggacctgcgcatccccgacaccatcgaccgctgcggcgggagcgccaccctgggcgagctgctcgccgcaagcgagatcccggcgtccaaccacgactacctccgacgggtcatgcgcacgctgacagccatgcgcatcttcgcggtcagccacgacgaccccgccaaggccgacgacgcggccgccatctcttaccagctcaccccggcgtcccggctgctcgtcagcagcagcagcagcagcgtcgacgccgccgccgccggcgccggcgcctcgaaggagaacactactaccccgagcatcctccccaacatcgcccacctggtccgccccaacaccatctccctgctgttcagcatgggcgagtggatgaaggacgagagcgcggcgtccgtgtcgctgtacgagacggtgcaccggcaggggatgtgggcgtgcgtggaggacgacgcggccaacagggccagcttctacgagagcatggacgccgacacccggctcgtgatgcaggccgtggtccgccggtgcccgcacgtgttcgacggcatcaagtcgctcgtcgacgtcggcggcggccgcggcaccgccgccgccgccgtcgtcgccgccttcccgcacatccagaggtgcaccgtcatggacctcccccacgtcgtcgccgaggctcccgccggcaccgccggcctgtccttccacggcggcgacatgttcgagcacatcccgtcggctgacgcactcatgctcaagtggatcctgcacgactgggatgaggacaagtgcatcaagataatggagcgctgcaaggaagcgatcggtggcaaggaagcaggggggaaggtgataataatagacacggtgctcggatctcgggcagacgacgacgacgacgacaagacgtgcagggagacgtatgtgttggatctccacatactgagcttcgtgaacggggcggagcgggaggagcacgagtggaggaggatcttcctggcggctgggttccgtgactacaagatcacgcacacccgaggcatcccgtccatcatcgaggtcttcccgtgatgatcatggatcgagagtcgatcatatatgcatgtttgtacgtgtttgtgtcataataaatcgatcgatcatgttgtttaccctttttatttcggtatctagttgcatctgtgggcgggctaaaataaatcacggccggccgggcttcatcaagcccatgtatccagctgtgtgtaataatgcaatggaaaacgaaccaaaaagaatgcttccattccagc

SEQ ID NO: 35347 - DNA, 1679 bp, Zea mays
  Clone ID: UC-ZMROB73011E07_FLI
cgtagtcctactcttgtccgacccgcgcggccgccgccagcccgcgccctcggagcccccttccgcttctcctctccgggaatggcgtcggcgcgaggaccttgcggaattagtgtccgttctgacttcagttcagcctgccttattcacaaggctggagccccatcgaattctgtttctggcgtgatggctgttcaggttcaccgccaccgtaacaaggtccgcaatggccaagctatcaggtgtgcaatggcaactggaaaagagcagggtgcaatttccactgccagtagcggtgatcaaaccaagggcggtttgcgtggaaaattaaacaaagttgttttagcttatagtggtggtttggatacatccgttattgttccatggctcagggagaactatggttgtgaagtcgtttgtttcactgctgatgttggccagggtgccattgaattggaagggttggagaagaaggcaaaagccagtggtgcatgtcagcttgttgtgaaggacctcaaagaagaatttgttagtgaatatatatacccctgcctgcgtgcaggtgcagtttatgaaagaaagtatctgcttgggacttcgatggctaggcctgttattgctaaggcaatggttgatgttgccaaggaagttggtgcggatgcagttgcccatggttgcactggaaaaggcaatgatcaggttcgctttgagcttacattctatgctttaaatcctgaacttaaagtggtggcaccttggagggagtgggatatcacaggacgtgaagatgctattgaatatgcaaagaaacataatgtacctgttccagtttcaaagaaatcaatatacagccgagaccgaaacttgtggcaccttagccatgagggtgacatcctggaggacccagcaaatgagccaaaggaagatatgtatatgatgtcgattgctccagaaaatgcgccctcgaaacctgagtatttggagattggtatcattgctggtgttcctgtttcaatcaatggccgagacctctcaccagcatccctcctcgcggagctcaatgaaatcggtggaaagcatgggattgggcgtatcgacatggtggaaaacaggctggtcggcatgaagtcacgtggggtctatgagacccccggtggcaccatcatggcagccgcggtacgcgagttggagtccctgaccctggacagggagaccatgcagtggaaggacatcattgccctcaagtacgccgagctggtctatgctggccgctggtttgacccgctccggcagtcctttgatgccttcatggagaaggttaccgcgacgaccactggttcagtgaccctgaagctgtacaagggttccgtgaacgtcgcgtcccggaagagcccctacagcctgtacagggaagatatctcctcgtttgagaacggggagatctacaaccaagctgacgccgaggggttcatcaggctgtacggcctaccgacacgggtccgggcgatgctggagaagggtatctgagtagttgcctgcttgatttagaaataaaaacatctgtttcccagtgattgcagacagatgggtgtttggtggggagttcaccatgctgttttaccatccgtttacattgtccaaaccaaaatattatcattgctacatcagctgcttttctc

SEQ ID NO: 35348 - DNA, 1693 bp, Zea mays
  Clone ID: UC-ZMROB73011G09_FLI
gggggatcgtgttggtgtcaagtacaacagcatcaatgaggctgaagagcataagggagggcatggcatccccaaggtttccatgatacccctcatattcctcatattttatgaagtttcagggggtccctttgggattgaggatagtgtcaaggctgctgggccactactggcaattttgggctttcttctgtttgcactcatatggagcgttccagaagctctaatcactgctgagatgggcactatgttccccgagaatggtggttatgttgtctgggtttcttcagctcttggtccgttctggggttttcagcaaggttgggcaaagtggctcagcggtgtcatagataatgccctctatccagtcctatttctggactatgtcaagtccagtgttccagctcttggaggtgggctcccaaggaccttagcggtgcttatcctcacagttgcgcttacatacatgaactacagagggctgactatagttggctgggtggcagtctttcttggggtgttctctcttctcccgttctttgtgatgggattgatagctattccacagattgaaccttctaggtggcttgaaatggacttggggagtgtggattggggattgtatctgaatacactattttggaacctcaactattgggattcaatcagcacattggctggtgaagtcgagaatccaaagagaaccctaccaagagcgctttcttatgctctagttctagtggtgggaggatacctctacccattaatcacttgcacagcagcagttccaatcgttagggagcactggtcagatgggtatttttcagacatcgcaagaattctcggtggcatttggttgcactcatggattcaagcagcagctgctttatccaacatgggcaattttctcactgaaatgagcagcgattcttaccagcttcttgggatggctgagcgaggcatgctccctgacttttttgccaagagatctcactatggaaccccgcttattggcatcctgttctctgccttcggtgtgatcctactgtcctggatgagcttccaggagatcatcgctgccgagaactacctctactgcttcggcatgatcctggagttcattgccttcatcaagctgcgggtgtaccatccgaacgcctctcggccctacaagatccctttgggcaccattggtgctatccttatgatcatcccacctggtctcttgatcattgtggtgatggcactcgcgtcctacaaggtgatggtggtgagcatcctagcgatggtcttcggattcgtgctgcagccgtgtttggtgtacgtggagaagaagcggtggttaaggttctccatcagtgcagacctgcccgatttgcctgatgtgcaggaaattgctgaagatgatgctgtcccactcgtggtctaatattcggccattgtgctctggaggtgttgttcccaatcgagacatcctaggatggaatgtgacacactgggattcacgaccttgtatctcctgaatgagttccaaagccagaggtcttagacatcttgtataaggacacattatgttttcaccgtgctattgaacatcatgatggcatcatgcatcaaacagaaatgtaagccccagacagtgttcatcaaaggagatcctccagattatcaaatacatgttgcatctgctgtc

SEQ ID NO: 35349 - DNA, 895 bp, Zea mays
  Clone ID: UC-ZMROB73011G12_FLI
cgccccggccccccttgattttgcttgccgttcctactccagccctctgaggcgacccgcgcgcgcgcccacgcgtgcggacataggaggggtggcgcaacagctggaagacatgtaaatatttatgatctgcgcaatatgtctcaacctgagcaaaaaagagactcttctttgaaatatcaaacacgatgtgttcgatgttttcccaacggaacaggatatgctcttagttctgttgaagggcgagtttctatggaattctttgatctatctgagtctgctcaatctaaaaagtatgctttcaagtgtcatcggaagtctgaggccggcagggacaccgtttatcctgtcaatgcaattgctttccatcccatatatggaacatttgccaccggagggtgtgatggatttgtgaatgtgtgggatggcattaacaagaaaagactatatcagtactcgaagtacgcatcaagcatcgctgctctatcattcagtaaggatgggcatctgcttgctgtggcatccagctacacttatgaagagggagaaaaaacgcatgaacctgacgctatatttatccggacagtgaatgaagtcgaggtgaagccgaagcccaaggcattggcagccccccagtagtgctgtgacctgttctggaggctagatgacccgtacttctctgcgttgatgtcaattacattagttgacggagtgcttgtttgtgttgaaagagctgaaacgcctgtgtttcttaatctggaaccctcttctcccgttttacttgtccgtggaaacatttcatgttccagctggttgtatattccgaaacagaccatgtttaagttcactcggttcttcgttgacttaagttatttatcaaatatttaagtatcgt

SEQ ID NO: 35350 - DNA, 929 bp, Zea mays
  Clone ID: UC-ZMROB73011H09_FLI
cgcgatctaggggggcggaggggaggtggtagtggtagggtatacaggagtgctctgcccatggagaaggcggggcaacaacgccatgttatcggcggcggcggcaagaaggcgcccgcgctggggctgcagaagcagaactcgtggtcgccggacatcgagcgcgacgaggcgtgggagcgccggcgcaggggcatgcgccgcgggggcacggcgctgcgccgcgcccgcagcgtcacggacgacgacctcgacgagctccgcggctgcatcgacctgggcttcggcttcgagccggcgcccgccgccgcgtgcgcctgcgcctgcgccgggaggaaccgcctcctggagacgctgcccgcgctcgacctctactacgccgtccacggcggggcggcggaggcgccgccgtgctcgtgcggcgccgcgtcggaggcgtcctcgtccgaggagtcgccgctcggcagccccatgtccatactctctccaggcgacacgccggagacggtgaagatgcggctgaagcagtgggcgcaggtggttgcgctgtccatgctgagccgccactgagctctccgggccacggccgccgctaccttgtcgcattgggaggagagagaaaaaaccattcgagatgcacacaacagcagaaggaaggaatctccggcggtcgcctcaagcagaaaaaagaggaagagaaaaaaaatctgttagggtttggtcatttggtgggccgccgccgccttccaccttgctcgtcctatcttggactgctagctaatcatctttcttccaccatgattgtatgattccgttggagacaaaacatcatgcctaattactttgcttgcttattaatcctcttgcttcccccctaatccatattagtttctcatcttcgtgtatgtacatgattcctttcaagaggc

SEQ ID NO: 35351 - DNA, 469 bp, Zea mays
  Clone ID: UC-ZMROB73012A03_FLI
caaaggctgaggagaaaatagcagtcgagcaggaggacaagaatgccgagggtgggcctggacaagcaaacatctcagatatccctgcagcacacagggagttggacagtgaattcgcaaacatacatgtctctgaaacccctgaagatgttcccatctctaccgtgactgtccccgctgttacagatgaggagcccagcacggccactccagcagctgaagtttctaaaaagccagaagctgcgcagggattaatactataagtgatacagttttgcttcatacatggatgcaatgtaaatagacatgaaatgaggtagccattgaactcatttgtgatgttgtggttgacatcatcagatcgaaccctctttgaaggttgaaaatgattgggacctgaagaattttgcaatttgtacctggtactttttatcaaattatcagtcttacctggcagtgggaaactggg

SEQ ID NO: 35352 - DNA, 1401 bp, Zea mays
  Clone ID: UC-ZMROB73012B04_FLI
cgcgcactctcacctgccttccttctgccagctgctgactcatctatcagctcgctcgcacgctgcagaacgaacgaagctgaaggcggcggcggcggctagccatggggagggcgccgtgctgcgacaaggcgagcgtgaagaaagggccgtggtcgcccgaggaggatgccaagctcaaggcctacatcgaggagcatggcaccggcggcaactggatcgcgctgccgcagaagattgttgggctgaagagatgtggcaaaagctgcaggctgagatggctcaattatctgcgccgaaacattaagcacggtgacttcacagaagaagaggagcatatcatttgcagcctctacattagcattggaagcaggtggtccatcattgcagcgcagttgccggggcgaacggacaacgacatcaagaactactggaacaccaagctgaagaagaagctcctcggcaagcgcgcgccatcccggcgcgcgagggcaaaccaggatccctacctcgctgcgggaggcggcaacatgtgcagcaccagcggtggcaacagcgccgcgacggccacgcaaaccctaagcgcgtcggctctagagcggatccagctccacatgcgcctccaaggcatgtacggcgcgttcggttgcagtggcggcggcggcaacgacgaccgcaacgccgtcgtcggggcggcggcgccgcagtggccaaagcttgaggcgctgctgcaggcgaacaggctgctcccgggatcgctgccgacggacgccatggccacaacagtgagcgtgcaacagcggcaccatcagcatctggtcgaccaccagagcctcgcagtcggcgctggtaacgccgcagcagtcgagggcgagcaacagcagctcagctctgccgatgcggcaaactacatggcgctgccaggagggggctttttcgagcggcccaagctagggttttactctccatccgccgaggctgaagctaccgcggccgccgccagcgtagagatgaactcagtcgccccgatggttggtggcggctacggcggcgccggatttgaacagtatcatcatcacgacgtgctatacgaattcctgtacagcaattacggatcggtgggcgagctggcgcaggacgggcatgtccccacgttgccggagctgcagtgcccgaacggcgctgccgtcgatggagccgatgagaagttctcggtgtggaccgcatccgccgcctgcgattacggcgcggccggcggctatcagattcagctgggaaactccatcggtagcaatctgcacgattacgtgctaggcggctatgatcaatgggagtagggtttcggcgtcatgccgtatttgtgtgtgcaaaattcttaagctcatatatagttcattttcc

SEQ ID NO: 35353 - DNA, 1441 bp, Zea mays
  Clone ID: UC-ZMROB73012D02_FLI
agatatcacattctatgtggacagaaagcctgttgaagctcatcgggtcatcctttgtgcccgatctcctttcttcgaaaagaagttcaagacagactggaaagacaggaaggaagtgagattttctaaccaaaagttgtattttggcgccttatacagcctcatccatttcttctattctgatagactcgaggtagctgttgacgacatggaaaatttggcgcgtgcatgcaaagtttgcaagtgcgaggagttgcaaaaagttttggataaagaagttgtgcatcagaagtatgcggagtacaagtcagcaagagaactggatatggacagctcacagaaacgattcatcttacaagcgcaatccttgcctgaggaagatcgccttccatcagccttgcagcgtattctgcagacttgtctagcaaactcaagagaaggttactgtagtgaggaatcaaatgagatgataaggaactcagaggatgatgatcttgcagatctttatattaaagtaggtgataaggttttccattgtcatcaggtgattttggcctcaaggtcagagtactttagagccaggctatctcgaactgttgattttcttgaaggtaactgtggctttgaagctgctcagaatgttccgcttcttgaggagcatgacataagtgcagaagcatttgaaaagatgctcgaatacatgtaagatcctattgtaatatgctttaccactattgttttgttgttgctgttgctgttgctgttttctggcttactttttacttgtaaaacttaggtatactgataagctagagcatttggaccctggccaggctgaagaactatttgatgttgcatcaaggtacctgctgtttccccttaagcgggttgtagctgatatgctgctgccatatctcgaacatgtttcgcctgcagaactgtgccactggttgatgatgtcagacatatacggtgtcatgaaaataagggagtatatcttggatatcattgcttgcaactttgagatgtttgcagccacccgggagttccgggccttgctcttgactcttccaccaccatccggagatgactcactacggacaacacgtcccagtgcacctgggactggaggcaacaccgaccaaggcaacattcttgatgatttgcgtgagaagtggctagaagcagagggtgccgagctcgacgagagggatgagagtgcagctctgttcgacaagcgactggagatgcttatgctagttgcagagaaagaagccgatgatgaagacgcttgagtttcggagagtacgtgtgctagggtagcattgtttttgcattcttcactgcgcagttgtttaggtttgtgagttacaagttcatcttttgttgtatgaacttcaaacagatcagttttgacccatcaagtatccagtgagcaagt

SEQ ID NO: 35354 - DNA, 2269 bp, Zea mays
  Clone ID: UC-ZMROB73012D07_FLI
atcaatggcgttcactctccgcctcgggacagcatttctggtgctcctcctcttctcttgtgccgcagaggcgggcgaggttggtgtgaactatggaatggtggcgaacgacctgccgaaccctgcgtcggtggtgcagctgctcaagcagaacggcatcaccatggtgaagatatatgacgccaacgcaaccgtgctgacgtcgctggccaacacgggcatcaaggcgatggtgatgatgcccaaccagaacctggcccacgcggccagggacccggtgtacgcggcgcagtgggtgcaggacaacgtgaagaagtacttacccaggacgcagatcaacgccgtcgccgtcgggaacgaggtgttcgacgacccgaacgtggacaagatgaccctcgtccccgccatgaagaacgtgcagaaggcgctggcggatctgggcctcgccaacgccgtcaaggtgtccacgccgatcgccttctcggccgtcagggattcgttcccgccgtccggctccaggttccgggacgacatcgcgcagccggtgatgaagcccatgctgcagctcctgcagcggaccggctcgttcctcaccgtcaacatctacccgtgcttgacccagatgcagcagccggacgacatccccctggactacgccctggggaacgcccagcacgccgtgctcgacggcagcaacaagtactacagcctcctggacgcccagctcgacgccacgcactacgccatggaggccctcgggttcggcaacgtggaggccgttctcggggagaccgggtgccccaacaaagggaagataggaaagcacagaccaccccggcgtggcgtcggaagcagcaggcgccgtctgttggatgacggaggctcagagcctgaggcctcggtcgccaacgcccgagcgtacaacaactacgtcatcaaccgcgtgctgtccggcaacacgggcaccccgcaccgccctcgcgccgacatgcacgtctacatcttcgcgctcttcaacgagaacaacaagagcgccgatccggacgacgtggagaacaacttcggcttgttctaccccaacatgcagaagatctacgacttcaacttccgcggcggcggcggcggcggcggccaaccgccggcaggcccggcggcggcgagctggtgcgtggcgaacgcggccgtcggggacgacaggctgcagcaggcgctggactacgcgtgcggccacggggcggactgcagcgccatccagcccagcgggtcgtgcttcgagccggacaccaagctcgcgcacgcctcgtatgcgttcgacagctactaccagcggaacggccgggccaccagcgcgtgcgatttcagcggcgcggcctccatcgtctaccaggcaccagccgtcacttgcagcagcgcgaagccaagctggtgcgtcgccaagccaggggccgggggcgcacagctgcagcaggcgctggactacgcgtgcggccacggcgcggactgcagcgccatccagtccggcggctcctgcttccagcccgacaccgtggccgcgcacgcctcgtacgcgttcaacagctactaccagcggaacggccgggctagagtggcgtgcgacttctccggcgccggctctattgtttaccagcaacccagcttctgcgccgcgacggcaagctggtgcgtggcgaacccgggtgtcggggacgcgcggctgcaaacggcgctggactacgcgtgcggccatggcgcggactgccgcgccatccagcccgggggagcgtgcttccagccggacaacaaggcctcccatgcctcgtacgcgttcaacggctactaccagcgcaacaaccgggctagagtggcgtgcgacttctccggcgccggctctattgtttaccagcaacccaaggtgggaaactgtgtgcttccatcgaacgccggctgatcaactcgagaaacaaaactacatcacatttagcttgcttgaggcgacgatatgaagatgctaacatatatctcgatcagtatttctgggatgggaataaattttccatcgttctgcgtggcaaactattatctaataaattattaataaaatcctgcgcctgcaaatcgactgtgccgggtgctccctcccctcaaatctttgcaatagtacgtgtaataccacatgtcaacgtgttgtcttcactgctaataatgcatgctattggtacttctgtacaatctcttgatgaaaaataatatgaaataacctttaagtctc

SEQ ID NO: 35355 - DNA, 1749 bp, Zea mays
  Clone ID: UC-ZMROB73012E11_FLI
aaagcctcggcccttcaggctggctctgctcctcctcctcctcgccattgctgtgcgttctccgcctcaccagatttcgcaacagaaccttcgttccctgccgtctcttgtcggtctggccggccgaggtgggtgatctgtagagcgaaacgccgagccgggagaggagggaggccgcaccggcgattgtagaagcagaaccggtggaggagtagaggagggcgccgaatcgatgcgcggctccgcggacgccgtcgtggttgctcgggacgtggtggcctcgtcgagcccgtccaaggccgcgtcggcgttggacatgacgagatacccgaggctcagcccagatggcctcccgctgcccaatggcagcggcagcggcgcgagcaagaagcctgcagcgccggtgtcgccggcccccagatcgagcaaggatgacgtggcaccggccgtcgccaccgacagctcccgcatcgcggcgttcctagcctcgacgtcgctcgagcccaagccgcgcgctcgcgcaccgcagccacagccgacggctcctaactcggcgcccaccgcagccgtcgccgcgaacaggagccccgcgcgcgaccacggccacggccactgctccgaccactccgatcccgcctccccgagctccaccggggcccgcgaattgctgctccggtggggacagaacaagcgcatgcgctgccgccgcgactgcgcgtccgcgtcgccgcagcggcggcaggcgggcggcaagataccgcgccgctcatcgtcgccggcggcggacaatctgatgccgccgccgagcgcagcgccctacgcccgcgggtccaacctccgctacgccacgcctcgcccgccgcgctccggcgccagcgacgcgcaccacggccgcggggccctccccaacccgctcagcaacagaagcaccggggcctcaagggcatggagagcatcgacagcgactccgactgaccaccgaccgacggcagcaggccgaagggcgtgcggtggcagcaacgcggcgagacgaagaagaaggaggaggttcggcgacagcgaagggtgcgtgtcaacagccacgcgctctcggagactcacattgtcgcgctgggttaagggatgccaaaaagaacaagaggagggtggattcagtaggaaaaagacaattctttttcgtgttaaccatagcggcgccgtgctatatagccggcgttttgtatatctgggtagcgacgagacgatgtcgtagccggcgtctttttctttttcgtttcgttcgcgacactgggtgggttgcccgccgcgtttatttgtggttgggtttgtgcatactactagactgtctcagcaagaggaagcaactagacttttagaccctacttggcatagttcattcattacaacaacaagcactgcctaataaactaaaaggaagagcagcttctgtgcaggacaaggcgttcaagcatttaaaaacgagaggagaaaccgcttcacgatgatggtggcagaagaggcaatgagatggctccctaatagcgtgatgagagagacgtggtgcgagcagccaagccaagcacacttcccttgggtgccagaaaagggtgtgttttgttataaaatattttgtatagtgatcagccccctccctttacagttacttcccaagggacatatctcctggggaacattattttggcttgtatataagggagtctccctggtgtctcgatcatttgtcacttc

SEQ ID NO: 35356 - DNA, 1268 bp, Zea mays
  Clone ID: UC-ZMROB73012F06_FLI
cgagccgagtggtcacgctatggtaccgtccaccagaattgttacttggtgccactgagtatagtgtaggtgttgatttgtggagtgctggatgcattcttgcagagctcctgtatggaaagcccataatgcctgggcgcactgaggtggaacagttgcacaagattttcaagctatgtggttccccttctgaggagtactggaagaagtctaaattgccacacgcaacaatattcaaacctcaacaaccctataaacgttgcatcagggagacatttaaagattttcctacatcggctctgccattggttgaaactctgcttgcaattgatccagctgagcgacaaactgcctcagctgcattacacagtgattttttttcaaccgagccttatgcttgtaacccttcaagtctgccaacatatccaccaagcaaggagatggatgccaagttaagagacgaggaggctagaagactacgagcggctgcaaaggccaagggagaacagaaaaggactcgaccacgtgatcgatctcggagggctggaccagcaccagaagctaatgcagagattcaagcaaacttagaccagaggcgacgaatgataactcatgcaaatgcaaagagtaaaagtgagaagtttcctcctccgcatcaggatggaggtacgggtaatccgcttggatcctatcatcatatggagcctatgttcgagcaccaggatgcttccttcagtacagtagtccccatagagaaggggacctcacaaacatggtccgggccgttgtttgatccagcagctctcgggcagtcgaggcggaagaagcaaactaccctagatgctaaggctgctgcttactcaaagcagctccaaaaggaaaagggagggatacgagcccgataacaaaatgtcgttttcctggtgagcatgtggagggaccgtgggaaaggttcatcgcctacggatgaattttcttgttttgttcctctggtggttggaaacaggcaacaatgcgctgctgtagggtgaagtcttccggattgtgtacatgtcatgtggtagcgtttccaagtactgtttagatgcttctgaacaagctgccgtcacccggacgggactttaggggtttgagactcgtatttgtgctctttatggcaattcagttgcccatgtgtatatatggagcaattctttcttgtgtatgtacagagacggcggtagctttgatttcttaataatgaatcaagtgtgatggcgaccttcctc

SEQ ID NO: 35357 - DNA, 953 bp, Zea mays
  Clone ID: UC-ZMROB73012F09_FLI
cgcaagtttggcaccaccaccttctcatcacctatccaggaccaggatcgacgacgaggaatcaagcagccagcagcgaccgatcgagacgcagccctgtggctgtgccgctgtgggttggatccggccgattcgacagcacgcggcacctacggatgccccacgcacccgtctcctgagagaactcgatcgattgcttcatggggagcggcaaggcgtcgtctccgccaggccccactgccggcgggcgcggctcgccgccaggtgccgccgtctgctgcatgtgcggcgaccgcggcctcctgcccgagctcttccgctgctccgcctgctccgtccgctcccagcacacatactgcacggatcggtacccgaaggtggagtcatacggcgtctgcaactggtgcctcagggcggacgggggcgtggcttctacttctaactcgccgagatccgccggcaaagcggttgtccagcgcccggctcctcacggcggtgacaaaatcggcagcggaacatcacccaaggctgccgctcgtggcgacttcgcgtcttccaacctgagcaagcctatcaagaagcagccgcagcagcatgcgcagaggctgttgctgcggcggtcggcgtcggacctcggcagtcgcgtcgttcgtaccgaccacgacgcgccgccttcgcccggcgttactacgcgtggcaggccgagggtccggaggtacaagctcctggaagaggtgatcactagctagctaactagccgtacccggggcgtgtgtgttgtgtattaggtgtaaaattaaatatacgtgcgtttaatttgtgtatatatatctacttagctacatctaggggtagacacggcatctcttgcggtgctgccatgcatgcatggagatcgagcagtgtgtacgtatgtactacgtgctgatcatctcaggcgttaattcatcacc

SEQ ID NO: 35358 - DNA, 1701 bp, Zea mays
  Clone ID: UC-ZMROB73012G07_FLI
gccatggccacggccggcgccgtcatcgcggcatgcatcctggcgctgctggccccgccgccggcgcgcgcggcgggcggcgggcggtgcgcgggtgagtccttctccgcgaaccgcgcctacgcggcgtgcaacgacctgccccgcctcggcgcgtccatgcactggacctacgaccgcgcgtcgggcgacctccacgtcgcgttcgtcgccgcgccggccgcgccgggcggctgggtggcgtgggcgctcaacccgtcgggcgacggcatggcgggcgcgcaagcgctcgtggcggggcccttccccgacggcggcggcacgtgggccgtgcggacgtacaacgtgtccgggtacgcgctcggggagcccgggcccatcgcgttcccggcgtcggacctcgccgccgagctcggcgccgacggccgcgtcagggtcttcgggacgctcggcctcggcgccgccgccgtaggcggcgggggcgtgctgctgaaccaggtgtggcaggtcggcgccgccgtctccagcggcggcgtcccggcgccgcacgccatgggggcggacaacctcgccgccaaggccaagctggacctgctgagggcgaccaccgtagccgccggagccgacagcgccaccaggaagcgcaatatccatggagtcctgaacgccgtgagctggggcctgctgctgcccatgggcgccatcttcgcgaggtacctcaagacgttccgggcggcggacccggcgtggttctacctccacgtcacctgccagctgatcggctacggcgtcggcgtctccggctgggccaccggcatgaagctcggcaaggagtccaggggcgtcacctacaccgaccaccgcaacatcggcatcgcagtcttcgctctcggcacccttcaagttctggcgctgttcctgcggccgaagaaggagcacaagttccgcgtgtactggaacacgtaccaccactcggtggggtacgccgtcatcgtgctgggcgtcgtgaacatcttcaagggcatgagcatcctgggcgtggagcagcggtggaggacagcctacatcgccgccgtctgcgtgctgctcgtcgccgccgcggcgctggaggccgtcacgtggggcgtcgtcctcaggcggcgcaaggccgacggcaagaccttcagcagcgcacccaacggccacctgccgcattccgtctccgtgtgagtgggctctcgattgtatttaccggattgttatccttagtggcgtgtgtgactacgatagtaggtttagagtttgctggggttttggcctgccggcttgtattgtatgtccgttttggacggtcctctattgctctgcatacgtacatgcatacatggcatttttgtgtatgtgtatgcatccccttcccttcccttccagtgttgtgttgagctcatctagaaaatgggcacagctgggggcatcacttctcgagagtccggtcagcatcccggaggatccgcgacgatcacgcacacaacgcactcgggccacttttctgccgaagttgcgaaacctgctccctgtggaccatgatggatggttgtttgtgatgtcaaaacgcatcgctatcttctatcgaaaggtacgtgtagtagtgtcccggctacatttaccctgggccgtgagttatgttgtgtttggttctatgtcaaagtaagattagatggg

SEQ ID NO: 35359 - DNA, 441 bp, Zea mays
  Clone ID: UC-ZMROB73012G10_FLI
agatccttctggcatggtttaatcggttcctcaactctggggaggattgcccaaacattcagagagggtttgaggtgtggtggcggcgggcattctggaaaaggaactctgagccagaaccaccatcccgtttgaggattactgcgatctgcgagaactcttgatgacgacggttcatattcgacatggaatgtggcggatgttgtgatataattattgattttctgtgatatgtagtagtgtctagctgtttctcagtttttttttgttatgtctgattaggcagttagccaattacacatgtcatcttgatcctgtttcaatgcaatgtataccaggtacaatgtactactatgccgcaaccattttgattcgaagtgaagtagagtgactatttgtggtttgctatatagcataagcaaacaatggaaggattcagac

SEQ ID NO: 35360 - DNA, 2565 bp, Zea mays
  Clone ID: UC-ZMROB73012H03_FLI
ggatgaagatcttatgaatttgcttttctccttcctaaaacctgaccaccctcatgggacattgttggctggttactttgctaaggtagtaatttgtttggcgatgaggaagacacttcaactagttcattatgtgcagggccatcctgaaatagttagccagcttgttgatcttattgggattacttctatcatggaggttttgattcgcttaatcggtgcagatgaaactatgtattcaagccatgcagattctatgcaatggttagatgacatacaagtccttgagatgattgttgacaagttcagcacatcagattctgctgaggttcacgcaaatgctgctgaaatcctttgtgcagtaaccagatacgcccctccagcacttgctgcaaagatttccagtccaagcttcgtagggaggttatttcaacatgcttttgaagattcaaggcctaaatcggtgctggtccactcattatcagtgtgcatatctttgttagatcctaagagacttgtatcggcttcctaccaagctttccgtagccagttgagccatggaacacttgtcactgcaagtccagagacagtaaatggcatgctggatagcctaggggatttgttgaagctgctggatgtttcatctgccgaaaatgttctgccaacaacatatggaagcttacaacctccactcgggaaacatcgcttaaagattgttgagttcatctctgttctactatcaattggtagtgaagttgccgaaacgcgactgattcaactaggagcaatccagcacgctatagatctattttttgagtacccgtttaacaacttcttgcaccaccatgtcgagaatatcattgggtcatgtctggagagtaagcaggatcacctgattggccatgtccttgatgagtgtaaacttgttacaagaattctggaagcggagaagaactctgctctgtcgtcagatttaactaagcatacattgtctacagagggaagatgtccaccaaggataggaattgttggtcatatgacacgaatagctaacaagctccttcagctggccaataccaacatcatggtccaatcatatttgcagcaaaattctgattggattgagtggcacaccagtaccctaacgaagcgtaatgcattagaaaatgtttaccagtgggcatgtggtcgaccaacatcactacaggatcgtggtagggatagtgatgatgaagacttccgagatagggactacgatgtggctgcacttgctagtaatttaagccaggcatttaaatatggtatctacagtaacgatgacattgacgaggctcaagcatcacttgagcgggatgatgaggatgtatattttgatgatgaatctgcagaggtagtaatctcctcccttcgccttggagacgaccaagaaagtggctcgctctttacaaattccaactggtttgcatttgacgaggacaaggcactgaatgatggtttggttagcccagaagcttccccatctccaaattcagaaatatccgcactaaaagaggatgatgaagtcattcttggcgaagtaatagatgacacagaaggttctgaaccaactctaccagtctccaacaaagacgcaaacgaagagtctggtcacaccgtcttggcaaatggtaccattgacaaacaggaagatgatatcaggccactgactccggatgtaaaagagagtcaacccgagtttgtggaatggaaggaggaagaagctgaacctggtgatgttgctgagaaggatactgcagttcctggtattgaggttgaaagtgagaagcagctgaattccatggacgatgttatgctttgtgatgccgagttaggagaggaaaagaagagtggtggtatgcttggatcttcagcacctgaggcagaagcagcatcgcctgtttcatctgacatcgattcaatcaagcacccggaacaagctgctgacagtgctgtatcagagtatccaatgggcgaacaaaatcctgagatatgaaatgaatttgagggcagcagagttccgctcacgtgatggcggatgatgatggacgtgcaggaagcacttggaactggttggaccattactgtacaagcagtttgaggatcatgtgtgggttttctgttctactctcttggaggaaggtggtcccggaacatgcatctgatggagcctcaaaggttccacttagtctcatggagatgcttaggttcgatgtgtaacatattcatggagacgcaaaattcagaaagttgacttccctgcccttttccttaatcagtggggttctggttgtgtcactctggtaaatagccgataattgaataggtgatatctggtctggctacatgtccattactgtagttggtgctatttgtacgaaagttttggctcaaatgcagtcagttgattcttgtcatatttagaacttgtttgaaatttgtgtaaacgaaaaaaatatagcttctatttttcccaggtgcttggtgcttaattcatctgttataaatatagattttattttcccctct

SEQ ID NO: 35361 - DNA, 1931 bp, Zea mays
  Clone ID: UC-ZMROB73013B11_FLI
gcggcggcagcggcgtcacggctccgttctacctcgacccgatcgcgatcggcgcgtacggagccgtctcccggggggtgttcgtggccacctccgctggaaacgaagggccggcctccatgtcggtgaccaacctcgccccgtggcttgccaccgttggcgccggcaccatcgaccgtaatttcccggctgaaatcgtgctgggcgacggccgacgcttgtccggcgtgtcgctgtactccggcaagcctcttaccaactcatcgctgcctctgtactaccccgggaggactggcgggctctccgcttcgctgtgcatggagaactccatcgacccttcactggtgaaaggcaagatcgtcgtctgcgaccgcggcagcagcccgcgcgtggccaagggaatggtcgtcaaggaagctggtggcgcggcgatggtccttactaacggggaggccaacggcgagggactggttggagacgcccacgtcctccctgcttgcgcggtgggcgagaaggagggcgacgcggtcaaagcgtatgccgcgaacgcctccagcccgatggcgacaatcagcttcgggggcacggtcgtcggcgtcaagccggcacccgtggtggcctccttctcggcgcgtggacccaacgggctcgtcccggagattctcaagccggacttcatcgcaccgggcgtcaacatcctcgccgcgtggacgggcgccacgggtccgaccggcctggagggcgatacccgccgcacggagttcaacatcctgtccgggacgtccatggcgtgcccgcacgccagcggcgccgccgcgctgctccggtccgcgcaccccgggtggtcgccggcggcgatacggtccgcgctgatgactacggccatcgtgacggacaaccgcggcgggcccgtgggcgacgaggcagagcccgggcgcggcgcgacgccgttcgactacggcgccggccacatcaccctgggcaaggccctggaccccggcctggtctacgacgccggggaggacgactacgtcgcgttcatgtgcagcatcgggtacgagccgaacgcgatcgaggtggtcacgcacaagcccgtggcgtgccccgcgacggcgagcggggccaaggccagcggcagcccctcgggctccgacctcaactacccgtccatctccgtggtgctccgcggcggcaaccagtccaggacggtgacccgcacggtcaccaacgtcggcgcccaagcttcggcaacgtacactgcgcgcgtgcagatggcgtctagcggcggcgtgaccgtatccgtgaagccgcagcagctcgtcttctcccctggcgccaagaagcagagcttcgcggtgacggtgactgcgccgtctgctcaggacgcagcggcgccggtgtacgggttcctcgtctggtcggacggtggcgggcacgacgtgcggagccccattgtggtgacgtggctgcagcccatgtgactgtcaggtggggacaactctacggcctctgtggagcctgccctggctgggactgccgataaagatggcagcaggagtcaaggcgcagtggccagtgggccagtaacggtaaagtcgtgcggtcgggactgcgccattaaaggtgggtcctgcacgctcgctctgcagaattgattaaccgggcgtgctgtaacagtatgggcttatccgagtatagtgactactggtagtgacagtggtgtgtgaaaaactgataactctggtgtttctacttgcttgactgtgtatggaggcaacagtacttgcttgccactggcggacaggacacaggagcaacggaaagaaatggagcaacaggacaaagctatgaaaaacgagtactgctagctttggtatttctatgtggattatctgaatagttttatcgtccacttgcattctctcccgcat

SEQ ID NO: 35362 - DNA, 1079 bp, Zea mays
  Clone ID: UC-ZMROB73014A07_FLI
ccggtggccccaccatccagatcgactggtcgctcaaccaggcccgctcggtccggtggaacctgacggccagcgggccgcggcccaacccgcaggggtcgtaccactacggcctggtgccggtgacccggaccatccgcctggccaactcggcggcgaccatcggcgggaagcggcgctacgcggtgaacggcgcgtcgtacgtgggccccgacaccccgctcaaggtcgcagactactacaagatcggcggcgtcttctccgtgggcaccatcgccgacagcccccccgcctacggcggcgccgcctacctgcggacgtcggtcatgggcgccagctacagggactacgtcgaggtcgtgttcgagaacggcgaggacgaggtgcagtcgtggcacatcgacggatacgccttctgggtcgttgggatggatggagggaaatggtcgtcggcaagcaggcagggctacaacctgagggacggcgtttcgcggtacactgttcaggtgtaccccagatcgtggacggcgatttacatgcccctggacaacgtgggcatgtggaacgtccggtcggagaactgggccaggcagtacctggggcagcagttctacctccgcgtctggacgccgtccacgtcgttgcgcgacgagtaccccatccccaagaacgcgctcctgtgcggccgggcggccggacgccggaccaggccgctgtgagagtgacactgccgccggatcattcacagcttttgtcatgagaggatgacacactattggtttggtctttggagaagagcaggaacatacacaagtttatataccctcaactgaagggaggttcagaggaacgaaagtgttgcttgccgattttttttcattttagtttttttttccctttaaagtttcatatttacgtctctgctgaactaaaaccgtgttggaatttctgggtcaacactataacttatactccctccgtcccaacatagtatttgttttagagtgttaacggattcatacaatatttgatgtatgtgtatcatacatgtgtctagatttaccgttatctatttaaat

SEQ ID NO: 35363 - DNA, 893 bp, Zea mays
  Clone ID: UC-ZMROB73014A12_FLI
gattgcgtcactgtatcagttcttcaggcacttctgggtggtggtggcaagttttcttggggaaggcaaggaaaggggttacattcacgtctaaaccgcctcgtaaatgaatttgatcagatcaagtcaatctctgctttcaaggatgttcacagtaatactggcatctttggaatccatacatctactgatgcatcatttgttcctaaagctattgacctagcagccagagagctcacttcccttgcaactcctggacaagttgaccaaagccaactggaccgcgctaaagcctcagctaaatatgcgatactggcaaatttggaatcacaggcatcgctaacagaggacatggggcgccaagttttggcatttggtgaaaggaaacctgctgagcaccttctcaaggctgtagatggtgttactatgaaagatataacgtctgttgctgaaaagatcatttcatccccattgacaatggcatctcatggaaacgttctgaatatgcctacttatgagtcggtcagtggcaagttccgctcaaaatgaggagtacatgacccttcccttcattttatcaccttgtttgctggacaagttttaccagtaccttgtcattcacgtctaggccatggttcttggtcagtttcagaagaaataagcaacctcatgcagttttgttcgtgaaacctgtgatcacttcacaattattcccttttctcattcttttgcggaacattcgtgtggttaatgctggtgatagaccagtaacgtgcttgtaaatttaaccgaaccctggcccctcattcggtaccaaggccccaagagaatgtacaaaattgtcgtaaaactcttgacaaaaatgttgtcgcacatgaataatgattctacag

SEQ ID NO: 35364 - DNA, 2025 bp, Zea mays
  Clone ID: UC-ZMROB73014C12_FLI
ccggcggaggggatccagccgctgtccaagatcgccgtccacagggccaccgtcgaaatgcagccgtcggcgtacgtgcgggcgacaccgtcgctcctcggcgagcagggagaagacaccgagtgggtgacggtgaagttcggctggaaagaaccgtccgaggacgactggatcggcgtcttctctccgtctgaattcaactcgtcggctacatgtccgaacccatggccagcagaagaaccctatctctgcacagcacccatcaagtatcagttcgccaactactctgcgaactacatctactggggcaagggcagcatccggctgcagctcatcaaccagcgctccgacttctccttcgccctcttcaccggcggcctcagcaacccgaggttgatcgcggtgtcggagcccatatcgttcaagaaccccaaggcgcccgtgttcccgcgcctggcgcagggcacgtcccacgacgagatgacggtgacgtggaccagcggctacgccatcgatgaggcgtacccgttcgtggagtggggcgccctggtcgccggcggcgtccggcacaccgcgcgcgcgcccgccgggacgctcaccttcaaccgcggcagcatgtgcggcgagccggcgcgcaccgtcgggtggagggaccccgggttcatccacaccgccttcctcagggacctctggcccaacaaggagtaccactaccggatcgggcacgagctccccgacgggtcggtggtgtggggcaagccctactcgttccgggcgccgccgtcgccggggcagccgtctctgcagcgcgtgatcgtgttcggcgacatggggaaggcggagcgggacgggtcgaacgagtacgcggcgtaccagcccgggtcgctcaacaccacggacgcgctgatcgcggacctggacaactacgacatcgtgttccacatcggggacatgccctacgccaacggctacatctcgcagtgggaccagttcacggcgcaggtggcgcccatcaccgcccgcaagccctacatggtgggcagcggcaaccacgagcgggactggcccgacacggcggcgttctgggacgtgatggactcgggcggcgagtgcggcgtccccgccgagacctactactactaccccgccgagaaccgggccaacttctggtacaaggtggactacggcatgttccgcttctgcgtgggcgactcggagcacgactggcgcgtcggcacgccgcagtacgacttcatcgagcactgcctgtccacggtggaccgcaagcaccagccgtggctcatcttcgccacgcaccgcgtgctgggctactcctccaacgcctggtacgccggcgaagggtccttcgaggagcccgagggccgcgagaacctgcagcgcctgtggcagaagtaccgcgtcgacatcgccttcttcggccacgtccacaactacgagcggacctgccccatgtaccagagccagtgcatgaccagcgagaagacccactactcagggaccatgaacggcaccatcttcgtcgtcgccggcggcggcggctgccacctgtccagctacaccacggccatccccaagtggagcatctaccgcgactacgacttcggcttcgtcaagctcacggccttcaaccactcgtcgctgctgttcgagtacaagaagagcagcgacagcaaggtctacgactccttcaccatcgacagggactaccgcgacgtgctcagatgcgtgcacgacagctgcttccccaccacgctcgccacctagttaataaaactaccacttattggtagaataatgtgccccgtcgaggcacactgtactgtagctgtattcatgatagcgcacgtacgcagggagtggtgttgctgtgctctgctccctcgatctgtgtattaaatatcactagctagcccgtgcattaccacttattctcagttggtgccgtagggcttttgtgtgctggtgtggtttaatttccagataaggctatattcggtttcctgg

SEQ ID NO: 35365 - DNA, 1247 bp, Zea mays
  Clone ID: UC-ZMROB73014D08_FLI
cggcactcctcgcccacgggcgacgctgcgcagaggctggcgcactgcttcgccgacggcctggaggcgcgcctcgccggcacgggcagccgcttgtaccagtcgctcatgctccgccgcacctccgtcgccgacttcctcagggcgtaccgcctctacatgaccacctgctgctgcaagagggtggcgttcgccttcgccaacaagaccatccacgacgctttcgcgctcgccggcaggcgccgccggctgcacatcgtcgactacggcctcggctacggcttccagtggcccgggctgctgcgcggcctcgccgccagggagggcggaccgccggagctggtcaggatcaccggcattgacctgccgcagcctggctttcgccccgcacagcagatcgaggacaccgggcgccgcctcagcgattgcgcacgtcagctgggcgtgccgttcgagttccggggcatcgcggccaagcgagaggcggtgtctccagaggacctgggcatcgacccagctgccgaggtgctcgtcgtgatcagcctctgccatttcaggctgctcacggacgagatcgaggtcgagatcagctcctccgccgccgccgccgggcctagtgggcgtcgtcgtcccaccgccagggaccaggtgctctgcaacatccgccggatgcggcctgacgtgttcatccacggcgtcgtcagtggcggctacggcacgacctacttcccgacgcggttcagggaggcgatgttccactactcggcgcagttcgacctgctggacgccaccgtgcctcgggacagcccggagaggctgctgctggagagggacatcttcggccgcgccgccatgaacgtcatcgcgtgtgagggcgccgaccgagtggagcgccccgagacttaccggcagtggcaggcgcggaaccgtcgggcggggctcaagcagctccagctgcaggctgacgtcgtgaaggtggtgagggacaaggtgaaggacaagtaccatagggacttcggcatcgacgaggaccaggggtggttgctacacacgtggaagggacgtgttctctatggcctatccacatgggttgcacaacatgctgacccatgactaaaggccctctatggtgggcctccaacagctcctagaaaaatctaataacggggaagcttcttgatgggctttttctagaaatggagaggagctcctaaaaaaactaatagaaggggcctaaaatctctgtc

SEQ ID NO: 35366 - DNA, 2233 bp, Zea mays
  Clone ID: UC-ZMROB73014E01_FLI
cttcttcctgcactcgccgttcccctcgtccgagatctacaagacgctccccgtgcgcgaggagcttctgcgcgccctgctcaactccgacctcatcggcttccacaccttcgactacgcgcgccacttcctctcctgctgcggccggatgctcgggctctcgtacgagtccaagcgggggcacatttgcctcgagtactacggccgtacggtgagcatcaagatcctgcctgtgggggtgcacatggagcagctcaagacggtgctcgggttgccggagaccgaggccaaggtgtccgagctgatggagatgtactctggaaaggggagagtggtcatgctgggcgtcgacgacatggacatcttcaaggggatcagcctcaagctgcttgccatggaggagctgctgcggcagcaccccgagtggcgggggaagctggtgctggtgcaggtcgccaacccggcgcgagggagggggaaggacgtcgccgaggtgcagaccgagacgtacgccatggtgcggcgcatcaacgaggcgtacggtgagccggggtacgagccggtggtcctgatcgatgagcctctgcagttctacgagcgcgtggcctactacgtcatagccgaggtgtgcctggtgaccgcggtcagggacggcatgaacctgattccctatgagtacatcgtctcccggcaggggaacgagaagctggacaggatgctgcggcaggggaagccagaggagaagaagagcatgctggtggtgtccgagttcatcggatgctcgccgtctctaagcggcgccatcagggtgaacccgtggaacatcgaggccgtggctgacgccatggagaccgcccttgtgctgcctgagaacgagaagaggctgcgccacgataagcacttccgctacgtgagcacccacgacgtcgggtactgggctaacagcttcctcctggaccttgagaggacctgcaagtatcattctcagaagaggtgctggggcattggcttcggcctgcggttcagagtggtctcgcttgacctgaccttcaggaagctttccttggagaacatccttatggcataccggagagccaagacacgggcaattctgctggactacgatggcacgctgatgccacaggcgattaacaagagcccgtccactgaatctgtgcggatcctcaacagcctgtgccgggacaaggacaatgtggtgtacctatgcagcgggtatgaccggcgcacccttcatgagtggttcccttgtgagaaccttggcatagccgcggagcatggctacttcctgaggtgtaagagggacgcggaatggaagacctgtgtcgctgccacagactgcagctggaagcagatcgcggagccggtgatgtgcctgtacagggagacgacggacggctcaaccatcgaggacagggagacggtgctcgtgtggaactacgaggacgcggaccccgacttcgggtcgtgccaggccaaggagctcgtcgaccaccttgagagcgtgctcgcgaacgagcctgtgtcggtgaagaccacgcctcactcagttgaagtgaaaccgcagggcgtgagcaagggcttggtggctcggcgcatgcttgtgtcgatgaaggagcggggccagtgcccggacttcgtcctgtgcatcggcgacgacaagtccgacgaggacatgttccagctgatcgccaccgctgcctgcggggactcgctggcgtccaaggcggaggtgttcgcgtgcaccgtcggccgcaagcccagcaaggccaagtactacctcgacgacgcggcggaggtggtgaggctgatgcaggggctctcctacgtctccgaggagctggcgctggcgaaccagcgggatgaagacgaggactcctctttggacgacgtgtgggaataggaaggagcgttcccttcccgtgctgctcctgcggtaatgtctgtttgtgttgttggctcggctggagctttcgccgagtagtttaggtgtgtaaatgaggtatgcttttcagcgtaatgtattgccagtggtctagtctcgagagctggcttgaatctagtgatgctctagtactttggtttgtggtgctatttacctgatccgtggaaggcagtactatgagctatacaagatgcagacctgaaatctcattcatctgaagaccatgacctttctcctaggcgtgtgtatacgtctttggattttggaact

SEQ ID NO: 35367 - DNA, 1786 bp, Zea mays
  Clone ID: UC-ZMROB73014E05_FLI
ctccgtttgccaacgactccgggctccactgtcgctcgctctcgctcccttccctcccacgcaatggtggccgatcgcctccgcctcgcgctgctgctctccgcgtgcctctgctccgcgtgggcgcgcccacgcctcgagccgaccatccgcctgccgtccgagcgcgcggcggccgacgacgccgtcgggacccggtgggccgtgctcatcgccggctccaacggctactacaactaccgccaccaggcggacatctgccatgcataccagatcatgaagaagggcggacttaaggacgagaacatcgttgtcttcatgtacgatgacatcgcgcatagcccggaaaatccgaggcctggtgtcatcataaatcatccccagggtggcgacgtctatgctggggtgccaaaggattacactgggcgagaggtcaacgtcgacaatttcttcgctgttctgcttggcaacaaaactgctctcaggggtgggagcggcaaggttgtggacagtggccccaatgaccatatatttgttttctacagtgaccatgggggtcctggcgtccttggaatgcctacgtatccatatctctatggtgatgacctcgtagatgtcctgaagaagaagcatgctgccgggacctacaaaagcctggtcttttatcttgaagcatgcgaatctgggagcatctttgagggcctcctgccgaatgacataaatgtgtatgcgaccaccgcgtcaaatgcagaggagagtagctgggggacgtactgccctggcgagttcccgagccctccaccggagtatgacacttgcttgggagacctgtatagtgttgcttggatggaagacagtgatttccacaatctgcgaactgaatctctcaagcagcaatacaacttggtcaaggataggacagcggttcaggatacattcagctatggctcccatgtgatgcaatatggttcattggagttgaatgttaagcatctgttttcgtacattggcacaaaccctgctaacgatgacaacacgtttatagaagacaactcgttgccatcgttctcaaaggctgttaatcagcgcgacgctgaccttgtctacttctggcagaagtaccggaaattggcagacagctcacctgagaaaaatgaagctcggaaggagttgcttgaagtgatggcccacaggtctcatgttgacagcagtgttgagctcattggaagccttctctttggctctgaggacggtccaagggttctgaaagccgtccgtgcagctggtgagcctctggtcgatgattggagctgtctcaagtccacggttcgtacttttgaggcgcaatgtgggtcgttggcgcagtatgggatgaagcacatgcggtccttcgcaaacatctgcaacgctggcatccttcctgaagcagtgtcgaaggtcgctgctcaggcttgcaccagcattccttccaacccctggagttctatccacaagggttttagcgcctaagaatcataaggtgaggcgaaatatttcagccgctccaccgcaacgaactggtttacattaccagtcctcaggggggtcctagttcttgaaccataggtgaagcagacttataccactattatagctgttccaccgtcgttccagattacatagctatgcccaatttccggtgtacatatatagtcggaaagttatttggcaattgtattggtcgttgctgtatatattccctatagtttgttagcagatgtgtagtttgtaattccataaaaatgaa

SEQ ID NO: 35368 - DNA, 1562 bp, Zea mays
  Clone ID: UC-ZMROB73014F07_FLI
gcaaaatccgcactgatcccaatcactggattgtattacagacctatgtgattctgatgatatttggtcacctagtaccaaaacaggcggaaatggttgttttcctcgagaagctaattattattttttacattttaggcttgttcatttcgccgttaatccatgtggattgggtggtattgagtcggtttaaatccataataggttaaaattcatctcaatccatcccaatacactctaatccacatggaattggaataaccgaacaaggctttagtgagaataatacacgtgtatgcttacatgtgtgttgttataaatcctctttattgattctactctctgtccgagattgagatctaagctttagtgacatttctagttataatggtcttatcaccagtggttttgaaatgtagtcagaagcttgcaacactcaaatataatctactacttattgtggtcaacagttgttaataggtttatcgccttataggggatagacttgtgaagccatgctacctcactctggcaaaggactgtaacttagtcctttgcaatggaatgagcaaagaaaagatccaaagaatattgcgtttatggaagcaacttgatagttctgttacatgctaggctgctagctaatccatttgtaccagacaacagacatctgtaatcgctccatatttttttgtatttcctagatttgtctagaatcttacatttatcattgcatgaacgttcattttgtgttatatagtattcatttatcatatatatcaatcaaaatggtcctgtgatatcgagcttcagttgatgcagaggtggtgaaaacatcttgtcttctccaaagactgctgactgcaagttgcaaaagtttgtctttagcttgctgtgttgtttcttcctgcggagtacacgagaagtttgtagatagagtttctggtgtgccttttcctgtaccaatgtgtataaatcttacattgctggcctcttattatgcagcaaggattatggatccgaaagagaagccaaatgtatcgagcagtccaccaacaccacggctggactgcataaaatgctttgatatgctctggttctgttactcaccattccaccagatgcagaattattaccggtatggggagttcgacacctgcttcggcaagtggggcgatcttatgggctgcctcgctctcaagacaaagcggaaggcagaggtggaggagatcctcatcgcgcgggagaaggccaaaccacatatctggacctaccggacggtcgatgaggcatcggagaattggtggcggatgtacaagcatgctgtgatgatgtcaccactgccaggttctgctcagcttcctcccaggtccgatgaatcttgatagtcgaggggatttgtgcaagtgttttgtttgcgcttatgtcacattatggcattagcgatcatttctgttcaaaatcttactgtaaactacaataccaagagatggaaccattgaggtaggcagaacatgtactgctgaagattgagaatttgaaatcgccttggattcagaagc

SEQ ID NO: 35369 - DNA, 952 bp, Zea mays
  Clone ID: UC-ZMROB73014G06_FLI
gtacgcctacctcttcaagtacatcatcatcggcgacacaggcgtggggaagtcgtgcctgctgctgcagttcacggacaagcgcttccagcccgtgcacgacctcaccatcggcgtcgaattcggcgcccgcatgatcaccattgaaaataagcccatcaagctccagatttgggacacggctggccaagaatcattcagatctattactagatcatactacagaggtgctgctggtgcccttttggtttatgatattactaggagggagaccttcaatcatctcgcaagttggttagaagatgcaaggcagcatgcaaatgctaacatgactgtgatgctgattggaaacaagtgtgatctttctcatagacgtgctgtcagctatgaggaaggtgaacagtttgccaaggagcatggtctggtctttatggaggcatctgctaaaactgcacaaaacgttgaggaggcattcattaagaccgctggtacaatatacaagaaaatccaagatggcatatttgatgtatcaaatgagtccaacgggatcaaagttggctacgctgttcccaactcatctggaggtggtgctggctcgtcctctcaggctggtggctgctgcagttgagtggtggcagcaagtcatacaaatgcacaaggttctccctgcagtatcttgatgtttgcctatagctggacccggatgatttgttctttcagccatcatgtttcaatccataagcaaatcatcttcagtgtttaactgtccttttgcaattcacgattactgctccctatgtgtcttctgtaaccaaattgaaatcagttttatggtattcatttgttcaacatgtatatatgcttctctggctagtcatgttttctgcaaccctatctcaagttgaaaattggcagtgctggacaatctctccttgactgcattacttgattc

SEQ ID NO: 35370 - DNA, 1500 bp, Zea mays
  Clone ID: UC-ZMROB73015C04_FLI
accgcgcccgaggagaccacaccacaccgcctcctccgcccgccgattcgtcgagctcgccctcccgctcgcctagctcccctgccttttcccttcctccccacctcctgccccgcgaacgtgctcccgcatgccaccgcgctgacgcgcgcggcggacgacggggtcgggatcatggacaagtacgaggctgttcgggacatcgggtcgggcaacttcggggtagcgcggttgatgcgcaaccgcgagacccgagaactcgtcgccgtcaagctcatcgaacgaggccaccggatcgacgagaatgtgtaccgcgagatcgtcaaccaccggtcgctgcggcaccctaacatcatccagttcatagaggtgatcctaactccaactcatcttgcaattgtgatggagtatgcggctggtggtgaactatttgatcgaatcgtagatcgtgggcgatttagcgaggatgagaccaggtatttcttccagcagttgatctgtggagtgagctattgccatcacatgcaaatatgtcatagagatttgaagctggagaatgttctcttggatggcagcccagctccacggcttaagatatgtgattttggctactccaagtcatcagtactacattcaaggccaaagtcagcagtggggacaccagcatatattgcaccagaggtgctttctcggcgggagtatgatgggaagcttgcagatgtatggtcatgtggagttactctttttgtcatgcttgtgggagcctacccgtttgaagatcaggatgatcctaaaaatattagaaagaccattcagcgaattgcagcaattcaatataatatcccagacaacattcgcatatctgatgattgcagacaactcatttcacgtatctttgtcagcaatccattaaggagaatcaccatgagggaaataaaaagccatccatggttcctaaagaacttgccgagggagctcacagaggcggtgcagttatcctacttcaggagggacaacagtgtctctgcattttcagaccaaacaaccgaagaaatcatgaagattgtcaaggaggcaagaaccttgccaaaatcgtcgagatcaggctatggttacagtgaagaatgctcagatgaggaggaaaaggaagtggagagcgaacccaaagaggaggaagaagaagctgagtgtgataagacagttagggaggttcgcgagagcggggagctggatatgacctcactgcacatctaaatgctgcctgtgaggctgtgacgtgtctgtagataattggctttattgtctgctgaatttggtagaacttatgcaattctggcgtcagatatagtggtctatataagccttttccatcctgtaatatatttgttttgttgaactgtatgtgtggtactccgtatatgggtttgttctaagggagcaaggctttgtacaggcacacctgattgtgtttttggataggaagttttaccgtctgtttgc

SEQ ID NO: 35371 - DNA, 924 bp, Zea mays
  Clone ID: UC-ZMROB73015C07_FLI
ctcccgggccaggagatcgacctggccaaggtcgtggccaaggccgcgggcccgcgcgccggaggcgggctcggcctgccgctgccgctgctcgtgcgcttccccgacgtcctgcgccaccgcgtcgagacgctcaacgccgccttcggctacgccgtccgctccaccggctacggctcaaggtaccagggcgtgtacccggtcaagtgcaaccaggacaggtacgtcgtcgaggacattgtggagttcggcgcgccctttgggttcggcctcgaggccggctccaagcccgagctgctgctcgccatgagctgcctcgccgcgcgcggcggcctggacgccctgctcatctgcaacgggtacaaggacgacggctacgtctcgctcgcgctcatggcgcgctccatgggcctcaacaccgtcatcgtgctcgagcaggaggaggagctcgacattgtcgtcgaggccagccgccgcctcggcgtgcgccccgtcgtcggcatgcgcgccaagctgcgcaccaagcacgccggccacttcggctccacgtccggggagaagggcaagttcggcctcagcgccgcgcagatactgtccgtggtcaccaagctcaaggccatcggtatgctcgactgcctccagctgctgcacttccacatcggctcccagatcccgaccaccgccctgctctccgacggcgtcggcgaggccgcgcagatctactgcgagctcgcccgcctcggcgcggacatgcgcgtcatcgacgtcggcggcggcctcggcattgactacgacgggacccactcggcgcagaccgacatgtcggtggcgtacagcctggaggagtacgcgggcgccgtggtggccgccgtgggccgcgtgtgtgaccgcaagggggtgcagcaccccatcatctgcagcgag

SEQ ID NO: 35372 - DNA, 676 bp, Zea mays
  Clone ID: UC-ZMROB73015C11_FLI
ccctccacaacgccttcagcacctacggcgaggtcctcgagtccaagatcatcctcgatcgggagacgcagaggtcccgcggcttcggcttcgtcaccttctccacggaggaggcgatgcggaacgccatcgagggcatgaacggcaaggagctggacggccgcaacatcaccgtcaacgaggcccagtcccgcggcggccgtggaggcggcggcggtgggtacggtggtggccgtggaggcggcggctacggcggtggcgggcgccgtgatggcggtggcggctacggcggtggcggcggctacggtggcggcggcggctacggtggtggtggcggcggctacggcggtggcaaccgtggcggcggctacggcaactccgacgggaactggaggaactgagcggtggggcccgcgcggccaagttatcctgttcgctaccgtgatgtttaccctagtccagagggtttatcttcgttcgtgtcgtgtttgttgttgcccatctgtgtttttgattgcaaggtcgctctgtgtcagttgttagtgctgtgttcatcctcggtttcagcagacccatgcatcaaacagcatggactgcggatcgatggatgctgttacccccgtcaggctttattctaagttaatcttaaggaaaaaatggtgcttcttggtgctgc

SEQ ID NO: 35373 - DNA, 1009 bp, Zea mays
  Clone ID: UC-ZMROB73015D05_FLI
gcgcggatcacagacagcctgtgcccgccttccagtccacaatctccctgcctctcctctcccaccctccctccgaaaagcaagctccggcccggaccgccccaccgcgcgcgcgcatacacagagagagagagagagaccgcacggtcgttcggggttcctttggccaggcgcacgacacgagcatggcgcagcgcgacaagaaggaggagcccacggagctgcgggcgccggagatcgcgctctgcgccaacaactgcggcttcccgggcaacccggccacgcagaacctgtgccagagctgcttctcggcgtcgaggtcgtcgtcgtcgtcttcgcagccgtcccctacctcctctccctcagcttccgcgccggccgccgcggtgccgcagccgaggccggcgctcctggacgcggcgctgcagctggcgcctccggccgcggccgcgggccagcctgtggaggcctcggccaggacttctgccaaccggtgctccagctgccggaagcgcgtggggctgacggggttccggtgccgctgcggcgacctgttctgcggcgcgcaccggtactcggaccgccacggctgccgctacgactacaggggcgccgcccgggacgccatcgcccgggagaacccggtggtgcgcgcggccaagatcgttaggttctgattcgaccggcgggcggaggaaggaattgcagagagggaaaacgaagattccaagggcggaaggggggaaaggcatgcgaaatcagagaggtcttcggtgttactactatgctgttcttggacgtgtttgatttttaatctccttttatatatatatatatatataattttcctacggaggtgggaggagaggaggtggacgaagaatagtgtaatgataatggtggtggtgcagcggcggtggttgagggcccaaaacgatgaacacatggggttgggttgggtgtatgtatctatctgtcacacgcagcttttgtgcaagactattatact

SEQ ID NO: 35374 - DNA, 1927 bp, Zea mays
  Clone ID: UC-ZMROB73015D06_FLI
ccggcgacgggacgcctccgtcgccgcgcgagctctacaccatcccggcatcatccggttggttccggtgggacgggatccacgagacggagcggcgggcgctgccggagttcttcggaggggcaggcggcgctgggttcgggacggcgacgcggaacccgcggatctaccgcgagtaccgcgacttcatcatcgccaaataccgggaggacccggcgcgccgcctcactttcaccgaggtccgcagggcgcttgtcggggacgtcacgctcctccggaagctctttgccttcctcgactcctccggcctcatcaacttctcggcctcctcgtcctcggtccccgcgtcgcggcagcaggaggtgggggtcgtcgtggaggcgcccgtgggtctgcaggtgacgccgcgtcctccagcgtcctacttcgccgaagagaagcgtgtagcggcgggcggggagaaggagaacgaattccggttgccgccgctgacctcctacagtgatgtgttcggggaatgggcacctgggaaggcgcctatatgcggtttttgcggtgaggagtgcaatggtgcggatgttgagacgctgcaggatggttttaaagtatgttcaaaatgttccaaaagcaataatgataatatcaaggaagaggcgaataaatgtcctggtgacaaaaaagagaatatggaaaatcatgcttccagtgcatggacagacactgagacgttactccttttagaaggagtcctaaaacatggagatgattgggatcttatcgctcagcatgtccgcacaaagaataaatcagaatgcatagcaatgcttattcaattaccttttggcgaacatatgctgggcacaataaatggtaaattcgttagcaggctccacataaaccagacagatgatggaaaaacgaaccagcacattatggagtcttcaagtcactcaaccgaaatggctgatggcatgcagattgatggaagtgaagatagtgctgataaatcagttgaagaatatcctacaaaacgcagacgattgtttttttcaatggatgctaccacttcattgatggagcagttagctatcctgaccacagcagctagcccagatgttgctgctgctgctgctgatgccgcaattaaagcatttggcaatgaaaacccgcaagcaaggaaagcctttcgcctcaacgagcaagaatataagactaaggcttttgcttctaatcatgtccaacagattgaccacaaagttagcaataaggatacggcgatgcatggccagagtggttctgataagcaggaaaagaagttcattgctagcgcatatcaattgagggcagctgttgctactgctgttggtgtagctgctgcccgtgctaaaatgcttgcagaccaggaggagcgagaaatggagctcctaatggcgtctgtaattgaaactcagctaagaaagatgcaatacaagatcaaacactttgaggagctagattcactcatggatcaagagtacaccgctatacagcaaatgaagggatccctcatgaatgaatggataaaggtccttgagcatgcattccgggctggagtgtctctaccgagagatgaattgctcaccaaactgttgctgaactagccgcccatcccatgaggacctggctgtagtcgagtagttctctgatatgcgtcacccccttgactgttgctggtagatagcttcctgcgtgggtgcgtctgtaaaggtgccgattgtgctttcgatttctcagaattttggggatcagaacaacccttcgtaactctttgccctgttgtaccaaactaggttagatggcaaaattgctgaaattttcttgtagctgttgacatgtatggtttcgttcgtatggatgtgaaaatggtacctcagttttggagtttcag

SEQ ID NO: 35375 - DNA, 1071 bp, Zea mays
  Clone ID: UC-ZMROB73015E02_FLI
gccttacacccagtgccaaccgccgtgccctcaccctctctatctgcgccgtctctcactctctaccgccgccgccgccgccctacgccacgcaaaaagcgccacaagattcgcccctgctgaaaacgcactcgatggcgtccgcgacgggggtttcctcctcggagatggcggtggaccacgcgacggggccgggcgccgtggacaagccgcggttcgatgctctgacgccgaatgagatgagcggcgggaggccccagttccggaaagtgcccgtcccgcagcaccggttcgcgccgctcaagcgatgctggatggaaatctacacacccgtatacgagcatatgaagatcgatatacgcatgaatctcaaggcaaggagggtggagctaaagacaaggcaagacacaccggacgtgagcaaccttcagaaatgtgcggactttgtgcatgcttttatgcttgggttcgacattgctgatgccgtcgccttgctgcgtcttgatgacctgtatgtggactccttcgaaatcaaggacgtgaagaccctgcgaggggagcatctgtcgcgtgctattggccgcctatcagggaaaggaggcaagaccaagtacgccattgagaactctaccaggacccgcatcgttatcgctgatacaaagatccatatacttggatcctttgttaacatcaaggtcgcgcgggattcgctttgcagtctcatcttgggttcacctgctggcaaagtgtattctaagctaagggctgtatcagctaggttggcggaaaggtattaaattagattggttttgcttgtaccatgtaacggttgcagttttgctgacagtatgttttactagcggatttgtgtgctcggggatgctgggagatttaaattggtgtgtacatgtgctcttgtgccaccacaatctatgtggtggggttgattttgatgaaaattagttattttcttatcctaacccactataaatcgataatatatgtattgaggtgggtatgagtgtagccaaacaaggcttgagatgtgtttctacttgtttcatagagtgc

SEQ ID NO: 35376 - DNA, 1165 bp, Zea mays
  Clone ID: UC-ZMROB73015F05_FLI
gggggtctctccctgtgcccagcgtgcaggccatggtggccgctggtcgtcatgcaccagtgccaccaaggtatctccgtccagatctggccgcggatgtcgtcgttgccgacgacgcgacgaccatccccatcatcgacttccagcgactgctgctggtcgacccagaggaatctgcgcgcctccatgcggcctgccaggactggggcttcttccagctgataaaccacggtgttccggacgatgtgatggaggcgatgaaggccagcatccagtcattcttcgcgcttcctgcggaggccaagcagcagtaccgtcagcaggcaggccagctggaggggtacggccagctgttcgtcgtctccgaggaccagaagctggactgggccgacgtcctctacctcaacacgcagccgcccgagcaccggaacctcagcttctggcctgctggtgagagcttcaggcagacgctggacacctactccgccgccgtcaagcacgtcgccgaccgcctgctgggagccatgtacatgaacctgggcctccagctgagcatcatggacatggacccggagcggggtgccgggatacagtcggtgaggatgaactactaccctccctgcgctgaagcggcggacaaggtcctgggcttctctccgcactccgactcggaccttctcaccctcgtcctccaggtcaaccagctccagggcctgcagatcaagaggccgcccgacggcggcggtgcctgggcctggcttcccgtcacgccgctgcagggcgccttcgtcgtcaacgtcggggacgtcctcgagatcttcaccaacgggaggtacaggagcgtcgagcaccgggctctagtcaacgcccacacggagcgcttgtccatcgcggcgttccactctcccagcatccatgccaccatagggccgctgccggagctcctcggggaccaggaggtgcccaagtataagacgctggaccaccaaagcttcattacgctcttcttctccgccaagctccagggcaagagcttcttggaacggatgaagaagctttcgtagagccaatcggacggaccggaaagttaagcaggccgacgtaaagtcggattacatgttatcggttcggccatagcaatatagcacgcatgtatgtccggatt

SEQ ID NO: 35377 - DNA, 957 bp, Zea mays
  Clone ID: UC-ZMROB73015F10_FLI
ctggcctcaagcccctcaggcctcagctcaccaccacgaaccaaccgacagaaagagggacgaatggcgagctctcagtgctgcgataacccgccggccctgaacccggcctgcggggagggcaaggtcgtcgacagcttcggcgggctcaaggcctacgtcgtcggccccgaggactccaaggccgccgtcgtcctcgtcgccgacgtcttcggattcgaagcgccgattatgaggaagatagccgacaaggttgcttcgtcagggtactttgttgtggtaccagatttgtttcatggggatccttatgcacctgagaatgttgagaagccctttcctgtgtggataaagtcacatactccggaaaaagggtttgaagagacaaaacaagttattggggctctaaaggagaagggagtgtctgctgttggagctgcagggtattgctggggtgcaaaggttgttgtggagttggcaaaagctcatgagatccaggctgctgtgctgttgcacccttcttttgttaccgttgacgatatcaaagaggtcaagtgcgcaatttctatcctcggagctgagattgacaaaatgtccccaccggagctaatcaagcagttcgagcaggtcctttctttgaactcaggggttggccacttcgtcaagatcttccctggtgtggcgcatggatggagcgtgagatacaaccacgacgacgcagctgccgtgaagagtgctgaggaagcctttgcggacatgctcgactggttcaacaagaatctgaaataaactctgcaattgcatcctgccttgtaataatgcgtgttccagtgccctgggatcgaatctgctgtgtttgggcttttgcatggtcaggctattcagagttgtcatggacttagggttgtgttagtagattggttgcgctgaatctataataaaaacgaggtaaactaggac

SEQ ID NO: 35378 - DNA, 1942 bp, Zea mays
  Clone ID: UC-ZMROB73015G08_FLI
gtaagggggccggcaccgagcggcggcgggtcgccgcgggacgacgtgggccacggcacgcacacgtcgtccacggccgccgggagcgcggtgaccggcgcctcgtactacggcctcgccccggggaccgccaaggggggctccgcggcctccagggtcgccatgtaccgggtctgctcccaggcgggctgcgcggggtcggccatcctcgccggcttcgacgacgccatcgccgacggcgtcgacgtcatctccgtctcgctgggcgcgtcgccctacttccgcccggacttctccgcggaccccatcgccatcggctccttccacgccgtcgccaagggggtcacggtcgtgtgctcggcggggaactccggcccgggcgccgccaccgtcgtcaacgcggcgccctggatactcaccgtcgccgccaccaccatcgaccgcgacttcgagtccgacgtcttgctcggtggaaataacagcgccgtcaagggtgtagctataaacttctcgaacctggacagatcccccaagtatccattgatcaccggcgcagcggcgaagtccagctcagtttctgacaccgactcagcaagccactgtgagcccggcacgctggacagcagcaagatacgagggaagatcgtgctgtgccaccactcgcagagcgacacgtcgaagctggtgaaggcggacgagctccagagcgccggggcggcggggtgcatcttggtgatgaacgacaacgagagctcggtggccaccgcctacctcgacttcccggtcaccgaggtcacctccgccgccgccgcggcgatccacaagtacatcgccgccgccagcgaaccggtggcgacgatcacggcggcggccaccgtgacggagtgcaagccggcgcccgtggtggcctacttctcgtcgagggggccgtcggggcagaccgggaacgtgttaaagccggacatcgcagctccgggggtgaacatcctggcgtcgtggatcccggcgtcgtcgctcccgccggggcagaagcagccctcgcagttcaacctcgtgtccgggacgtccatggcctgcccgcacgtcgccggggccgccgctaccgtcaaggcgtggaaccccacgtggagccccgcggcggtccggtcggccatcatgaccacggcgaccacgctgaacaacgagcgcgagcccatgacgacggactccgggtcgccggcgacgccgtacgactacggcgccgggcaggtgcacccggcgggcgcgctggaccccgggctggtgtacgacgccggggaggacgactacctccgcttcctctgcaactacggctacaacgcgtccactgtgaggctcgtcgcctccaccctccccagcgggttcagctgcgcggccaacgttagcaaggacctcatctccgacctcaactacccgtcgatcgccgtgacggggctcctcggcaataaatcggctgcggcgggccgaagccggaccgtgacccgcaccgtcaccaacgtgggggcgcaagaggcggcctcctacacggtcgccgtcagcgcgccgcccggcctggacgtgaaggtcacgcccagtaagctcgagttcaccagaggcgtcaagaagctggccttccaggtgagcttctcccgtagcgggaacgacgacgacgcggcggcggccaagggcgccctttcgggctccataacatggtcagacggaaagcacatggtccgcagcccgtttgtggtcaccagctgaaacatcatggcaatacctgacgcgcaggcacgtcaagaaatgctgtgatctcagatataaagtataggatacgatgttgaaagccactgctagtggcaaactcagaatcatcgaagattctgaaactgggccttccaaaacgccttggtcagaaatgacggttaaacattctaatataatgtcg

SEQ ID NO: 35379 - DNA, 901 bp, Zea mays
  Clone ID: UC-ZMROB73015H02_FLI
ggccggctgacgcgggaggaggcagacgcgcggacgaagcggaaggtggaggccgtgatcaaacgcgagagagccctcgcctacgcctactcccatcagctgctgaaggcgacaccgatggcggcccacgcgatcctggcggacctgcagtcggggcggagcccctggtggtggacgcccatcgagcgccgccacgagccgggggcctaccgccctgcggatcccgccattagaaagcccctgccggcgctcgccatcgcccaccgcgacatgacgacgacgcctgtggcgatgacggcggcgacgacaccggcccggtcggtggtctcggcctactctaagacaagggccacgaggcctgtgatcagggtgggagccccgccgccttcgaaccatagccacgtggggagcatccgcgacgacgagagcctgacgagctgcccggcattcggcggcgtgcccaactacatgacgcctacgatgtcggcgtccgccaaggcacgggcacgggcgcacctgcaggagcagcagaagaacaaggcggcccaggagaagcccaggttctcgttcgggctgggccagagcatcgggagctgggccaagagcccgttctggaaggccgctgtgccgtcgtcgagggtggccacgccggcggcgtcgatggccggcgggcgacaccgatcgacgcggtcgatcagcgggcttagcacggactccaccgtgtccatgccagccaggctcggcacgaggtcctttaagtagatacacatgtcggactcatcgttgcttacattgcattgcattcttcttatatctcttctcgacgcatttgtgcttggaagtggtacacatgtgattgatggtgtggcttgttgtgggataccatcgtgtttgctgattt

SEQ ID NO: 35380 - DNA, 474 bp, Zea mays
  Clone ID: UC-ZMROB73016E03_FLI
gaacggttcattcggccaactggtctgcgtttcaccaaagctcatgtgactcacccagagctgaagtgcactttcaaccttgacataatttctgtgaagaaaaacccaaatggtccaatgtacacttctcttggtgttatgacaaggggaacgatcattgaggtaaatgtcagtgagcttggtctggtaactcccgctggaaaagttgtttgggggaaatatgctcaagttacaaacaacccggagaacgatggctgtatcaatgctgttttgctagtgtagagccatagtgagattttgttgatggtggtgaatcgtcccatttgtatctgttccgatatgctatttttgaccatgtcatgactaatcccagtagtttgttgtgcaccatgggcataatgagcattctgtattctcgctgtgtgctacagatatatatggagtaatataaattagcagcatttttttcgagct

SEQ ID NO: 35381 - DNA, 664 bp, Zea mays
  Clone ID: UC-ZMROB73017B03_FLI
tccatttggaggtgttctgtctgaactgaagaaccaaggaacagtccccaaatctatagttcatgctacagctcttgcttgtggtgctcgtgctgttcctcttgaagatgcagcttcgcttattagtgccattgaatccaaaatcagatctggaggggccataatagcgaaacttccttcaaacaacctagcacctctagttcctccagccattgctatgtcatcttctagtgaagatgacgaggagcatgaccacagtgagccctcgcaatgatcgatgtcgatcgcaacgttaatcatcagagctccaacgcgatgaagcttcagagggagctatcggagttcgaaactgaagctggcaactgacctggtctgaagacgaaagaaaatgatcatactgattgctaacatacgcgaagtgaaggactgaagttgttctaaagatcaaagcttccctgaaaggtggcagatctattctatgatttgagacattttttaaaagattggattaggattgtagtcacttgtttctgttgagtttatattgtaatcagattaactcaagttaatacctccagtggagaattgtagaaaggagtaaccatgctatgtacatgtcttctgcataaaagaaaggcgatagagtttaaaatccagctgtgct

SEQ ID NO: 35382 - DNA, 1037 bp, Zea mays
  Clone ID: UC-ZMROB73017C10_FLI
tatgagccaaccagggactgctcccagggcctgtgcagcatgtactgcccgcagtggtgctacttcgtcttcccgcccccgcccccggccttcgacatcgccggccccggcggcggcggcggcgacgacgactcctccggccccaccttctcgcccctcgtcatcgccatcatcggcctgctcgccagcgccttcctcctcgtcagctactacaccgtcatctccaagtactgtggcaccttcagctccctgcggaacatggtcttcggttcccgcaggggccgcggccgcggccgtggcggcggcggcggcggcggcggcggcggcgattcaggggctcaggtgccgtggggcgccatgccgccggacgggctggacgagaccctgatcaacaagatcacgatctgcaagtacaagcgcggcgacgggttcgtggacagcaccgactgctccgtctgcctcggcgagttccgagacggcgagagcctccggctgctgcccaagtgcagccacgcgttccacctgccgtgcatcgacacgtggctcaagtcgcactccagctgcccgctctgccgctgcaacatcgccttcgtcaccgtcggcgtcggggcggtgtcgccggagccggagccggagcgccgcgccccgcgggaggaccgcgactggaggagagacaaccccgagctggtcctgacggtgggcggcccctcctcggacccagtgcgtggcgcaccgcagagccagagccagaatgcggtcagcggcagcggcggtgacgacggccaggatgcactggcgcggaaggattgcccggagagatcggaggagggcagcggcaatgcggagataaaggaagactgcgcgctgccggcggtgagggcggcgtcgtcgctgtccgacacgcaccgcgagggccgcatgtccatcgccgacgtgctgcaggcgagcctggaggacgagctgacgatggcccgggagagcggcctcctggcgggttcgtcgggacggtgcccgtgccacggggagcacagcaagga

SEQ ID NO: 35383 - DNA, 2287 bp, Zea mays
  Clone ID: UC-ZMROB73017D06_FLI
atccgatcttctcggttcctcctccaaatccaccggcatctccaagccctagccccaaccccgaccgcccatgtccgccatcgcggcctcctcggccgccgccgccgcggcgtcgaactccgatgaggaagaaaactatgaggagtacatcccagtcgccaagcgccgggccatggaggccgagcgcctccgccagctccgcctctccaagtcggcgccggcctctgccgtctcatcactcccgatgccacctcccccgcctcttttgccagcgcagacctccgttcccgacgccgccgcgaagcccagccttctcgtcaaggccacgcagcttaagcgcgcggccccggaggtgaccgccacggagcagcgcatccagcaggagaaggaagtgattgaaaatctctcagacaacaaatcgctcaggtcagtccgcgagatcgccaagggcatcatctacacggaaccgatccagaccgggtggaagccgcccctccgcctccgccgcatgccgctcgccaaagccaacgagttccggcgcaagtggcacatcatcgtcgacggtgacgatataccgccgcctgcgcgtgatttccgggatctccgcctcccggagcccatgctccggaagctgcgcgagaggggtatcgttcagcccacgccgattcaggtgcaggggctgcccgttgtgctctctgggcgtgacatgataggcatcgctttcacggggtcggggaagactctggtgttcgtgctgccgcttatcatggtggcgctgcaggaggaatcattgatgccgatcgtgcctggcgagggcccgtttgggatgatcatatgcccgtcgcgggaactggccaagcagacatatgatgtgattgagcagtttctcattccacttaaggaggccggttatccggagataaggcatttgctttgtattgggggtgtggatatgaggacacagctcgatgtgttgaagaagggcgtgcacattgtggtggcaacgcctggtcggctcaaggatttgcttgccaagaagaagatgaaccttgacaactgcaggtacttaaccttagatgaagcggataggctggttgacctaggatttgaagatgacatcaaggaggttttcgaccatttcaaggatcaaaggcaaactcttctcttttctgctactatgcctcagaagattcaaaattttgcgaagaacgcccttgtgaaaccagttactgtcaatgtgggaagagctggagcagcaaatctagacgtcattcaagaagtcgaatatgtaaaggaagatgctagaattatatacctccttgaatgcctccaaaagactccacctcctgttctcattttctgtgaaaacaaggctgatgtcgactacatccatgagtaccttcttctaaagggagtggaggctgttgctatccatggaggaaaagatcaagaggagagacagaacgcaattgactccttcaagactggtaggaaggatgttctggtggctactgatgttgcatcgaagggtcttgattttcctgacattcagcatgtcattaactatgacatgcccgccgaaatagagaactatgtccaccgaatcggtcgaactggtcgatgtgggaagactggcatagcaactaccttcatcaacaagaaccaaactgagaccacgcttctcgatctcaagcacctgctgaaggaggcaaagcagaggattccaccggtgttggcggagctcaacgatccattggatgatgaggaaataattgccaaggagagtggtgtcaaaggttgtgcgtattgtggtgggcttggccatcgtgtcagtgactgtccgaagttggagcatcaaaagtccatggcaattgctggctcgagaaaagactactttggcggcgggggttaccgaggagaaatatgattgctctaggttgatgcttgcgtgtggttatcagaagctaagatgctgcaatttcaggtcatacatgtcacatgtatcagccaccagaacatccttcctcccccatcgttgaagggagacggtctgcgttaacgaacttgtgatatgctgctgggtatgacactgcttgctactgacctaccatatatcttgtttgaaggacgcaagttgattatcctgccctgttgtaaaatgtaaccagaacaattgctggcgtatttcttaagcaccagttttagcccctttctgtaagcagtcgacatttcagttcaactcatgtatgtatattttgatcttgtatacagtactatatttccatct

SEQ ID NO: 35384 - DNA, 812 bp, Zea mays
  Clone ID: UC-ZMROB73017D08_FLI
gcttcctctctgtccgactcctttccttcattttcctcttctgacctccggcagcaccatggagaacgtcgccgcgaatccttccgctgcggccgccgccgcagggaatggcgtccaagcatcgggggccggaggggagcgcccggaggacgcgtcgaagcagaacctggcgcaggtgacgagctcgatccagaagacgctgggcctgctccaccagctcaacctcaccgtctcctccttcaactctgcctcccagcttcccctcctccagcgcctgaacgcgctcgtggcggagctcgacacgatgcagaaactagccgagggttgtaacatccaggtgccaatggaggtcgtcaatttgatcgacgatgggaagaaccccgacgagtttactagggatgtgctcaacagctgcattgccaagaaccagatcaccaagggcaagactgacgctttcaagagcctacggaagcatctccttgaggagcttgaacaagctttccctgaggacgtagaagcatacagggagatccgtgctacttctgctgctgaggcaaagcggttggctcagtcccatggcaatttgcttaatggagatgtcaaagtgaaagctgagcattgactgaagggtacgactacagagggcaagtttactatctctgtttagtttggggatggctttgttaacgtgaaacgtgcatatctttctagcgcactttcccttcatgtgattgatccgtgaatctgtacatattaatatattatcataacatgtgtggcaattttaattcaacttaaccaataacttctag

SEQ ID NO: 35385 - DNA, 773 bp, Zea mays
  Clone ID: UC-ZMROB73017E02_FLI
cactgtagccgctccttcaacggcgtcctcctcctcctcctctcccttcctgattctttctctctcccgctaaatcgatgggcacgctacgccgtattccttccccgcagccccgcagccgcttcttcgcccgcgcgctcggaatactccgcaccaatcctagctgcgggcaggggttccagccgcttcttcgcccacacgcccgctcgctcggaatactccgcaccaatccgtgtcggaccggtacgtgtgcgagatctgcgggcaggggttccagcgcgaccagaacctgcagatgcaccggcggcggcacaaggtgccgtggaagctgctgaagcgggaggccggggaggcggcgcggaagcgcgtgttcctgtgcccggagccgagctgcctgcaccacgacccctcgcacgcgctgggcgacctcgtcggcatcaagaagcacttccgccgcaagcacagcggccaccgccagtgggcctgcgtcttctcccgcattgtgtggggatcaattgcttggcttatctagatggttccatatttagtacaagtgatcatcttttttgcgggagccgtgatggtaccttgaaaagatgggaattaaataatggggatgcaagcttctcaggaacttttgagtctcatgttgattgggtatgcttttttctgtttttaattaagtaggcttactgtttcatcaatcagtgctttaaatagacattatgtttataaattagttatgtttatgtttaacatggtgtctgtggtct

SEQ ID NO: 35386 - DNA, 1623 bp, Zea mays
  Clone ID: UC-ZMROB73017E03_FLI
cctaaaaccccctcggcccctccgtccagagccccctcggtccagaccgcgacgtccgtgaccgacgacgtcgacgaccccgcgcccgccgtggccgaccaccaccacagccaagcggccgccgaggctccggcgccggccacgccaccacagcacaaggtctgcgtcgggttcgggcggccggagaccagcgacctgacggtggtgctgtacgggaaggagggcgtcgcggtcagcatgagcgtgcacagggacgtgctcgcccagagcagcgccttcttcgcgcggcgcctcgccgccgacggccagccctgcgtggagatccacgactgcgaggacgcggagatctacgtggagacggtcggcctcatgtactgcgacgacggggccaacaagcaccggctgctcaagcagagcgtcccgcgcgtgctccgcgtcatgaaggccgccgacgcgctcggcttccccgcctgcgtcaggtcctgcctcgactacctggaggccgtcccgtgggccggggaggaggaggagcgccgcgtcgtgtcctcggtccgccgtctccagtgcacggacggcgccggagtcagcccgctgctgaggagggtcgcctcctccgactccggctgtctgagaccgcccgccgacacgttcgcgcacataacggagatggtgctggcgagcaccgacgagcggggccggcgcgagacgaaagccctggtcttgagcctcctgaaagacagcactcgcggccacgtcggcggcggcgccgacggatcaccaccaacaccgggcatctcctcttccgagacgttgtacggctcgtgccggggctgcctggaccggctccggcggctgctcgcggaagcttcgtccgagccggcgtactccgccgccgtcgcgcggcggatcgcgctggaggccgacaacctcgtgtggctggtggagatgctggtggcgagccagcgcgcctgcgacggcttcgtggcgctgtggtcgggccaggccgagctggccgcgtcgcacgccggagcgccggcggcgtcccgccacgctgtgagccgcgtcacggcgcgcctgttcgtcggcgtcgggagaggggagatgctcccgcctagggacgcccgcctgcggctcctccaggtctggctgcagccgctcatcgacgactacgcgtggctgcagcgcgccggcggatcccggccggcggcgttcgacaggaggctcgtggaggacggcatcgggcagacgatcctgacgctgccgctggaggaccagaggtccttgctgctggcgtggttcggcaggttcttgaagctcggcgacgattgcccgaatttgcagagggcgttcgaggtgtggtggaggaggactttcgtcaggctgattctgacgcgggtgatattttgacatcagatcagatagaagctcagcctgaaatgctagcggcactagcttagctgttgatcatagattgtttgggagaaaccctttctgaatgttgagtgtattgtcttcgttagtccatctgacatgaaagttggcaagaatttggctgtgtgtttttgttctcagcagcattaacattaggtgggtctactcggatagtaatgaattcttgaatgg

SEQ ID NO: 35387 - DNA, 1918 bp, Zea mays
  Clone ID: UC-ZMROB73017E08_FLI
gccttgcggaaccgcatcacgcacgccagcagcgctagccaagagcagccagcagatggaaaccacggcccacgccgccgcctccggcacgatccagaacgcccggcaccggacgagcgccctcaagctgtgctaccacctggcagtctccaacgcgatgtacctcctcctagcccccgcggccgcggcggcggcgcactggctctcccgccacagcgcggccgagctcgcgggctcggcccggtccgcggccgccgccaacccgcccctcgccgtggcgctcctggtcctgggcgcggtgctcgcgacggcgtacctgatgcagcgcccgcgcggcgtgtaccttgtggacttcgcgtgctacaagcccggcggcgagcacgtggtgacgcgggagacgttcatgcggcagtcggaggcggcgggggtgttcacgggcgacaacctggcgttccagcgcaagatcctggagcggtccgggctcgggcagggcacctacttccccaaggccgtgctcaactcgccgcccaacccgtgcatggcggaggcccgcgccgaggccgaggccgtcatgttcggcgccatcgaccaggtgctggcgaagacgggcgtccgcgccagggacatcggggtcgtcgtcgtcaactgcagcctcttcaacccgacgccgtcgctctccgccatgatcgtcaaccactacaagctccgcgggaacgtcgccagctacaacctcggcggcatggggtgcagcgcggggctcatctccatcgacctcgccaagcagctgctccaggtgcaccgggacacgtacgccctggtggtgagcatggagaacatcacgctcaactggtactggggcaacaaccgctccatgctcatgtccaactgcctcttccggatgggcggcgcggcggtgctcctcacgaaccggcgctcggagcggcgccgcgccaagtaccagctggtgcacacggtgcggacgcaccacggcgcggacgaccgcgcgtaccggtgcgtgttccaggaggaggacgagacgggccgcgtgggcgtcgcgctgtccaaggacctgatggcggtggccggcgaggcgctgcgcaccaacatcacgacgctgggcccgctggcgctgcccatgtcggagcagatcctgttcctggcgtcgctggtggcgcgcagggtgttcggcgcccgcggcgtgcggccctacatcccggacttcaagatggcgttcgagcacttctgcatccacgccggcgggagggcggtgctggacaccatcgagaagaacctggggctcagcgcctggcacatggagccgtcccgcatgacgctctaccgctgggggaacacctccagcagctcgctctggtacgagctcgcctacacggaggcgcagggccgcgtgcgccgcggccaccgcgcgtggcagatcgccttcggctcagggttcaagtgcaacagcgccgtgtggcgggcgctgcgcaccatcgaccctgccaaggagaagcccgccggtgggaacccgtgggtggacgagatccacaacttccccgttgaggtgcccaaggtggagagcgtcgtcatgtcctcctgacagtgacacccacggagggcaactactatatgctggtgatggagggcgtgcgccggcagagcgaacaatgatggtggacgtacgaggttatgcctaaaatactacagtattgttaatgaaagcattgcaaaaggttttttcttacactccaaataggttgctttggctatcaaattggcaagagcactaatatgagtcggttggtgggatatttagaatatgattggttcggttgtgaaccgtgaaaaaactattgtgaaatgtatgctattaaaagtatgttgtgagttatctgctgtaaaaaaaagttgaaagtcgttt

SEQ ID NO: 35388 - DNA, 1241 bp, Zea mays
  Clone ID: UC-ZMROB73017F08_FLI
ctttatcctcgctgcaaaaagactataaacttgggagttcctatgatatccatttcttgtgaggatttgatcttgattctgttggttcttggtgaggtggttgagatgaaaggagtactatgctaactcatcgaggaaagaacagcacagtcagtactgttctaaggaaaagctgacatttctgtgcttttctttggaggactgcggtctgttcctgcaagaatttgtgtaaaaagggtggtaattctagatttctacaatttttgcacaggagaagctcgattccaccttgcagatccaatggcgcaacctgaaattcctgcatttggggattgggaaaccactggaaacacaccttacacacaaaagttcgaggatgcacggaagaacaagaaaacaggaattcttgcacaaccaaatgatccaaggagggatctggaacctcctcgcaagtcgcctttgcacccaacggtctacaaaactaatcctcaagaccaaggtccaaggaacccaccacatcgaccaagacctgaacttgacaaccaacgacactctgaccggcctactcaccgtgagtctgcaccacgaagacattcaaatcttcagagagaacaagggagtaatgctgggacaccaagaagcccctacagaacagctgctgggtctgcttcaccaatgcagccaaacaaccaatcaaagccaaagcacaggtcaactggaatgcagactccagagaggagggcatcttcagaggggcttggccagcatacacctggaaggagcaggatgaagccgggtggctatgagcctgaagaagtggctgtaccaccctttggcgaatgggatgatgcaaatgcagcatcaggtgaaaagtacactggtatcttcaacagggtgagggatgataggttgtcacctacctcttctgctaggcaaccgtctactactcgtagtgaagagaataaggtgcaacagaaatgttcttgctgcatactttgagaaaataaggacaggatctcgaagagttctagacaacttcctatgctgctcctgtgatgagatccctatcttgtaactcttcctgtgctagttgtcatgtttgttattgttggtgtgattatgtatctgtagatggattgtttcatttgagctcttcaattattacaaggaacatatatatgatacctagaattgtaaagtatggagtgagcaatttctttgcaacaataaaaggtttatcg

SEQ ID NO: 35389 - DNA, 1780 bp, Zea mays
  Clone ID: UC-ZMROB73017F10_FLI
ctcaagcttctctccccgctaccgctccgagtcccaagtcccacccggccagcctccatcgctagtaccactcctagtcccaagtcccagccttccatcgacggcgagggagggagaggcgacctccatccgggctggttagattcatcgcttttcttgtcgctgtccctcggcctttccccctactgtgctccgagtctgggagaagcgactcgcgcacgcgctcggccaaaccaattaagcacagagcggggctctcgggcgagaacgcgctgaggcagtgctgggtttgcagttcgtgccgtagcgtttttttttgtgtgtgtgccgaagcggagaggcgatggctgcgccgaggaaggggacggcgacgccgctgggcaccgtgttctcgccggaggagacgaagagggccgtggcgagggtggccgagtccgtcgctgggcgccgcgccgagctcgcccgcctccagggtttcgccgccgacaacgccgccctcgtctccctcgtcaacaggctccccgacgaactctctcacgatatcatggttccctttggtggcgccgcctttttcccagggcgtttaatacacacaaatgaactcttggtgcttctgggtgaggggtactatgcagagaggtcggctaagcagacgactaatatattgcacaggagggggcaggaattggaagctcaagtcgaagcaatgaaggcaactatcgctgaccttgaagctgaggccaaattctttgaattcacggccaccgaggcttcagagggtcttgttgaaatcagggaagagtatgatgaggacttagagacgaattcatcaagatcagaggcttcagttgctactgtggttatgtccgataaagacagggaacatgctcgaatcatggcaaggttagatgaacttgaaagggaagaaaaggatgctggaagtgcctgtgaagatgataatgatggcgacgatgatgatggagatgctggaacaagtgatgatggcgaggaaaataaggaatctggaaatgctttaagtgatgtcaatgaagactacagttctggttttggcgcttcattttctggaagtggcggcaatgataggagtcatgggaatattaagagtgcactgaagaagcctggaggagatgaaatgctgataggcatttctcataagccatcatcccatacatctcatctagcatttcctggccaaacctctgcaacaaattctgatgtccgagttcacactaaagctgttacttttgaagacgacaaatatgtagttagttcgtcaaagtctcctcccttgctactggattctatacagtctgatcctgtgctcaagaattcttcagaccccgctctatctcgtgacagaaagataatatcaagtggacgaaaggcctttacaggatctatcattgagcacgacgacaatgtttccaccattgaaccttctgtggctagttcgttggcaaaacctggtacttgtgcttcttcaaggcccgtgtcaaggttcaagatgcagaaaggagggcggtgagtctggacactcgggtggacctttggtgtctgatagattgcatcttgaacacgttcaaattgtctgtgctgtctgaactcctggacgctagacatgttgtggatcctggacgctagacatgttgtggatcctggacgctagacatgttctggagtgattgtcttctgccgactgtagagtgaaaccgggacgtccaagcgaagaagggaattaaaaacgaggttttttttggtc

SEQ ID NO: 35390 - DNA, 874 bp, Zea mays
  Clone ID: UC-ZMROB73019A05_FLI
ctctgcccttttgaagctgtgaaggtacgtgtgcagacacaacctggatttgctcgtggattgagtgatgggctccccaaatttgtccgatctgagggtgttcttgggctctacaagggaattgttcctctctggggtcgtcagattccttataccatgatgaagtttgcttcctttgagaccatcgttgagcttatctacaagcatgctgtgcctgttccgaagtctgagtgcagcaagactacccagttgggtattagctttgctggtggttacgttgccggtgtcttctgtgctattgtttctcacccggctgacaaccttgtgtctttcctgaacaatgccaagggagctacagtgggagatgctgttaagaagcttggtctctggggtctcttcactagaggacttcctcttcgtatcgtcatgattggtacccttactggtgctcagtggggaatttacgatgcattcaaagtgatggttggactcccaacaacgggaggtgttacacctgccccagcagcagaggctgaattgaaagccagtgcttgattttttttttctgtgttccctgagatcatatttggtagagtggaattgtatcagccagtcgagagcttagttcccgaatctttttttaatcgtaacggaaaatttgtccgtcatccttctgatgagaggaactcattaaacaggcgaaataggtcttttttgcgctgggaaaagtttgcgcttgatgcataataatttttaggacggcaacgctcttagagcgcaggttttgttcacctcctgtaccgaggaatgcttactaagtcccatttcacattatggtctttatgaaatagtgcacctcggttaatgttctttt

SEQ ID NO: 35391 - DNA, 1463 bp, Zea mays
  Clone ID: UC-ZMROB73019A10_FLI
gttgttaaactgacttggtcctgataatcctccgcgttctaatgatgtgctgtcgctgcaccatgcgcgtgttgtcgtcagagcctagggctggtgaagcccctggaggagatgctgatggcggccagcgcgggggctgcaaatccgagccaaggctcgaatccgaacccgccgccgctggcggcgcccctgacggacgcgggtagcaccgagcggcgcgcgcggccgcagaaggagaaggcgctcaactgcccgcggtgcaactccaccaacaccaaattctgctactacaacaactacagcctccagcagccacgctacttctgcaagacgtgccgccgctactggacggagggcggatccctccgcagcgtccccgtgggcggtggctcccgcaagaacaagcgctcctcgtcctcgtcctcgtcctcgtcctcgtcggcggcggcggcgtccgcctccacctcctcctcggccacgagctcgtccatggccagcacaccgggggcggcgtccaagagtccggagctggcgcacgagggcgcgcacgacgacctcaacctagcgttcccgcaccacggtggcctgcacgccgccgagttcgcggcgttcccgagcctggagagcagcaacgacatgtgcgaccagggtggcgggatgacgagcaatggccggggcggcggcgcggggcccgcggtcggcgcgctctcggcaacggagctgttgcggagctccggctgctacatgccgctgcagatgccaggaggagattacacggcggcagggttcgcgctcggggagttccgcacgccgctgctgccgccaccatcgtcacagagcccgctcgggttctctctggacgcgcacgggccggggtcgtccggtgctgccgcagcggcggggtacggttccagcgcggggctgccgcagggcgtgccgggcaacgcgggcaggttgttgttccctttcgaggacttgaagccgccggttagccctggaggtggtggtgtgggcggaggtggtgcaagtgcaaccggtggcgccggcgacggaaatagcagccacgatcagtttgaccacaacaaggagcgaggcggaggcggcggccgcggtgccggtgccgggcacgacacgccggggttctggagcagcatgatcggcggcagtggcgcttcttggtaatggagaatgacgcacacgggggcggcgccatgcatggtttcatgcatgcaaagtgttggtgacttgttctcaaatgctatgagttaagaacaaggcaacatagaaaagtgttaatcgttaaggtccttcgtcctccaaagcattatttcccttaggatataatggtttacggacgaaggttatgaaggacgtaccttcataaatttattaaacaatgacgaaggatggaatataaaggatataaaagacaacattaacaattatatattattattaagtat

SEQ ID NO: 35392 - DNA, 1458 bp, Zea mays
  Clone ID: UC-ZMROB73019B06_FLI
tctctctctctctctcttctcttctttcctcacctccgacggctgaacaagcgaaactgcgaaaagcagcaacagcaggtaggtatagtgatcctcctcctccatggggaacgccctcaagtgcttcacgggagaagaagaaggccaccacttccacgggcgcagagaccgctacccctactaccagccgcagtcctacagtggtggcgatccacatccaccggccgctgctcatcagcagggtctagcagccccccatggcttcgtaaccttcgtccccgtcacgcaggctgctggtccaaacgccgggcaccagcagaggagcagtggggttcatgacagaagaccggtggcttctaagtatgaatccaacaccgaggacatcgacgaatcgtctgccgagggcctgtgcagcgccaagagctacgccaaggcgaacccgctgctgatccaggtgccggtgctgggaaccaccaggaagttctggcggctatccgacaaggccacaaggatcacgcgaaagctcgcgctgatcttgaggagccaccacgccgtcggcaagcacctcgccacgcccctgcaggtgtctaatgtctggatcgggagcaccggtggcagcgtcaagctaagaggcgtcagcttcaccgccaagggcttcggcatcgagcgcgtgagagacgactacaggcagctgtccaggctcctgcacgcgatcatcagaatctccggtgggggtgataccgccatcgccaggctgcctcccgactaccgcgagttcctcgcgctcctggggagggacaccctcgccatggaagacgagttcttgatcgtcaacaacgccgcgctgctgccgatgaaaaaccgcacggaggccttcctgatgctgcacgacaggatcgtgaagtacctcggccgcacggaccgacagaagaagaggaggatcctctccgggctcccctaccagagcgactggctggatacggccagggcgaacaagcggatcaaccagtgggtcatgaacgtccagcacgagtacaagggaacgcaccagtccgacatgctgcggctcaacaggaatgtgaggagccacctgcatgagcacaaggacgacgacggcatcgaggaggccctgtactgcgagtggcccgagctgctcatggccatggtgaagctgttgcaccaggaaggcgagctcgaggccactgacattgagaacaagttcggctagtccatcgtcctgccgaagaacagatgtgctaggtagctctgcactgcggtttctgaatctactgttggtgttggcacgctttcagtgagaaagtttatggtgatggcctgatcgcgggtgatatgctacctggtttatgtaatgtaatataggctccgtactttcttgaattctctggacttgaaggcaaaaggttggggtcagctttatataatgttgccttgaaactc

SEQ ID NO: 35393 - DNA, 1619 bp, Zea mays
  Clone ID: UC-ZMROB73019D02_FLI
agctgctcaagcactccgacaaggacagcctcaccaggaagaacaagtccggattcgatgctctgcacgtcgctgcaaaggagggccacagagatatcgtgaaggtacttctggaccatgatccatcccttgggaaaacgtttggccaatcgaatgtgactcctctcataactgcggcgatcagaggccacatcgaggtggtgaacctactgctggagcgagtttctgggttggtcgagttatcaaaagcgaacggaaagaatgccctgcacttcgctgcccggcaggggcatgtggaaatcgtggaggctttgctacatgccgatacccagcttgctcggaggactgacaagaaaggccagaccgctctacacatggcagtaaaaggaactagccctgaagtcgttcaagcgcttgtgaacgccgatccggccatagtcatgctgcctgacagaaacggcaacctagctttgcacgttgcaaccagaaagaaaagatcagagattgtaaatgtgcttctgctccttccggatatgaacgtgaatgcgttgaccagggatcggaagaccgcgttcgacatagccgagggccttcccctgtcagaggagtctcaagaaatcaaggagtgcctgtcccgtgccggtgcggtcagagcaaacgatctgaaccagcctcgggacgagctgaggaaaacagtgacagagataaagaaggacgtgcatacccagctggagcaggcgaggaaaaccaacaagaacgtgtacggcatcgccaaggagctgaggaagctccacagggaaggcatcaacaacgcgacgaactcggtgaccgtcgtggcggtgctgttcgcgacggtggcgttcgcggcgatcttcacggtgcccggcggcaacgccaacgacggcgtggcggtggccgtgcacgcgacggccttcaaggtgttcttcatcttcaacgccgtcgcgctgttcacgtcgctggcggtggtggtggtccagataacgctggtccggggcgagaccaaggcggagcggcgggtggtggagatcatcaacaagctcatgtggctggcgtcggtgtgcacgacggtcgcgttcatctcgtcgtcctacatcgtggtggggcgccacttcaggtgggcggcgctcctggtgaccctgatcggcggggtgatcatggccggcgtgctcggcaccatgacgtactacgtggtgaagtccaagcgcacgcgcaagatcaggaagaaggtgaagtcgacgaggaggagcggctccagctcgtggcagcacaactcggagttctcggactcggagatcgaccgtatctacgccatatgaagccggcgcagtgcagctggttcctccagacagacagacccttttggcagcggcacgaaaaggtagacatggatcacgacccttgagatgctagtgggggctggttgactttgtacattccaataagctgggtgtaaaaactgccattccctttgttcgtgaatcggcgggaggcgacggttgtatactgctacagatagatttctcatcagattatatagtatggagtatactattattgtcgttgttatatatatgcagcatgtgctgtgctccttgtgc

SEQ ID NO: 35394 - DNA, 1232 bp, Zea mays
  Clone ID: UC-ZMROB73019D12_FLI
gcgttcacgagccagaagagaagagaggctaaccaccgcagcggctgcgacctgcgagtgcgacaacctccgcggaggagttggagccggcggcggggatatttgcttgcccggctggggttgcggcggaaggagggagagacaatcggcgatggcggcgtccgcgaggcccggggagagggcgaccagcttcgccgtcgcgtgcagcctcctcagccgcttcgtccgccagaacggcgtcgcggctgccgacctaggcctcaggatcaaaggcgaggtcgagcagcagaggacgccggcgacaactaactcgctccccggagcggagggcgaggaggtcgaaaggaggaaggagaccatggagctgttcccgcagagcgtcgggttcagcatcaaggatgctgctgcccctagggaggagcaaggagataaagagaagcctaagcagctcacaatcttctatggcgggaaggtgctggtatttgacgatttccccgccgacaaggcaaaggatctgatgcagctggccagcaagggcagcccagtggtacagaacgttgctttgcctcaaccctctgcagcagctgctgtcactactgacaaggccgtgctggacccggtcatcagcttggccgctgctaagaagcctgctcgcacaaatgcttctgatatgcctattatgaggaaggcttctcttcaccgcttccttgagaagagaaaagatcgcctcaatgcaaagacaccatatcaaactgctccttcagatgccgcaccagtcaagaaggagcctgagagccagccatggctcggattaggaccgaatgccgtggattccagcctgaacctcagctagtacacaacaacacagccataataagacggcacagcaacggcacccaccatgacctggaatttgctttgccactagatcgagttcagaaaccataaatattcttagttatcgtgttttagtgttcgcttatgtcgtggttctacgccctcttgtcgcatagttctggatgtaaagaaaagtagccagtcatgaccatcaccgggagtcggggagaagtttttggagggtgttaacacacggcgactctgaattggccatgctaaggaaaaggatagtgcaatgtgaggtatatgtattttctgaaagccagatcgtttgggtctagccctgatgtatgcagaacaagtgattattgtaatggatcctgattatcctcatc

SEQ ID NO: 35395 - DNA, 933 bp, Zea mays
  Clone ID: UC-ZMROB73019E10_FLI
cgagctcagatccctcgcctcgtgtcgtgtctccggtcgacgacgaccaacagccagtgtgggccagacggacaccgccgagctatagcgcttggtgatagcaagggacgaccggcggccggaccggagcacgtacgtacgtaccgcagcgatggctcggcagcaaagcgtgcaggccttgtgtgtgctggcggcgcttctcttcgccgcctccctgccgtcgccggccgccgcgggggtgcacctctcctcgctgcccaaagcgctcgacgtcaccacctccgccaaacccggccaagtcctgcacgccggcgtggactcgctgacggtgacgtggagcctgaacgccacggagccggccggcgccgacgccgggtacaagggcgtgaaggtgaagctgtgctacgcgccggcgagccagaaggaccgcgggtggcgcaagtccgaggacgacatcagcaaggacaaggcgtgccagttcaaggtcaccgagcaggcgtacgcggcggcggcgcccggcagcttccagtacgccgtcgcccgcgacgtcccctcgggctcctactacctgcgcgccttcgccacggacgcgtcgggcgccgaggtggcctacggccagacggcgcccaccgccgccttcgacgtcgccggcatcaccggcatccacgcctctctcaagatcgccgccggcgtcttctcggccttctccgtcgtcgcgctcgccttcttcttcgtcatcgagacccgcaagaagaacaagtagaacgagttgcggctgcgcgccatacatgcatacatgtaaatcgtcggcggcgatgagtggctgtcgttgctgattcattggtgcgcgcgactattttggtgtatcatgtaagttacttttctgcagtgtgtgcgtcaaaattaccaaataataacttaagtttctctgct

SEQ ID NO: 35396 - DNA, 2010 bp, Zea mays
  Clone ID: UC-ZMROB73019F11_FLI
ggttcagcgttgatttatgatgactcagcacaatcctttagatggttgtttgagaccttcaaatctgctatgagtggaaaacaaccaaaaacagttttgactgaccagtctgctgcacttagcgatgcagtttcttcttggcctggaaccatccaccgcttctcactactgcatttgtatctgaatgctactaagataagcagggataccttacaaggcttggagacttttgcatcagattttagtaggtggctgtatgaatatgaggaggacaacttctattcaagctgggaaatcctttcagagaaatacaatataaaggataatgagtggttctgtaaattgtatgaggatagagaaagatgggctttgccttatgggcgtgacacattctgtgctgatattgcaaccacactaagaagggataacacaaatacaatcctcacagatctaattaaaccagaaatagatcttcagaacttcttcaacaattatgataagtttttggaggagaaacgcctagctgagcaacaagctgactaccttggggctcaaataacgcaaagggtagcaccactgcatctgctttggcaagctgccaatttatatactccaacactttttgagatgttcagaatggaatatgaacagatctcaaagtgtgtggtctatagttgtggtgagattggaccaatatctgagtaccaggtcactgtcaaagacaggcctcagggtcaatttgttagatttgattcaacagaatgtatggttgtttgtagttgtaagaagtttgaattcatgggtcttctttgttgccatgtattgaaaattcttgatctcagaaatattaaagaacttccacgacactatatcctgaaaagatggagaaaagacgctcagagtgaatctccagagaactatggttttgctgccatagatgaagatcctaagttttcattgtcaaaacggtacaacgcattataccggaatttgtataaaattgcagcaaaagcttcagaaagcgttgaagcttatgcattcctggagaaccaatatgaacagcttgttgaacaagtggaagtacttttgcaagcaaagttgcatgataaatcttccttaagtaccgtcctgaaaggcaatcagccaaatatgcttaatagtgaggtcaacagcagtgaacatcgcagagcaactggtaagaaaattaaaaatgtagaggtgcgccgtcagcaacaaagtcttgatccaaacaaaaagaagaagggtagacaagttctgctggaacctgagattgaaattccactcagggttgaacctcccacggtatcaaatgatatccaaaatcatttaagaacaacaaatcagtttcttgcaccaagccatatgatgcaggcaccttatgttgcacagcagtttggtcttggttctttacaaggattcccaggcatgtcaccatttgggcagattcaagaaccaacacctcttcagcagccccatttacaaccaccatcgtttcatagtggtcctcaaattacacaggctccacctccagacattcaatcactacagtttcttagcagcaatcctcagcttggccaccagaccacggatcaaggccagtacaccattccagtctgggatttcctgtgacatacagtatcctcctgtttggttgctagcagcttggtgcctgactcgcccagcatcagttgaaactaacgattcttacttcctcacgcatctccacgcatgcaagtcaacgagggtaaaaaagcctagcttgcacctgcgcgcacatgcgtccactatatttttacttccccaagcacgtgcctgggcgcggtcaacgcatgcacggggccaggcgcgggagcagagccaaccaatcatgcagtatgtgatgtatggcgaagtagcaatgtagttgtaaattatgtaatgacactgcccctccccgaagggttaatgtcaatgaaatcctttagcatggtgcattggattagattttgg

SEQ ID NO: 35397 - DNA, 1554 bp, Zea mays
  Clone ID: UC-ZMROB73019G04_FLI
ttctcatcatgcagtgcgaaccaaccaacagcatcgtctgcattgtgcaggttactaagcatgggatagaagcatctctcatggacgatgtgatggccgcgtcacgcgattttttctaccagccgctcgaagcgaagcaggaatacagtaacctgataggcggcaagcggttccagatggagggttatggtaatgacatggtgaaatccaaagatcagatactggactggcaagatcggctgcagctcagggtggaaccccaagatgagaggaacctcgcttattggcccaaacaccctgattctttcaggtttatctctactcgcttactcgaaatttcttccctgtttgttattgaagtctcaaatctgctccatgataaaccttgtgctccaaatataatttaagacagctatgactccccaaacagggccacgcattagctgcatttaatttggcgccgtgtcattcgtagtttaagttcttggaattcgtagcccagatgcttatgggttaattaaatggatgatctcgacaaccaaaaattagcctaaaatatttggtcaccgtagtgttcacatgatgatttgagccaatagtttttttcccgaaaagaacctatagtaactaatacagttagcaaaaaaattctcttgaatcaactattctatggacttgtttgcagggatcttctggagaagtatgcatcaaaaaccaagatagttaggaacaaagtcttacgggcgatgggcaaaacattggagcttggcgaagactatttcatcagccagattggtgacagggcctcagcaattgctaggttcaactactaccctccctgtccaaggcctgatcttgtctttggcattaagcctcactctgacggtggcgcggtgacgatacttctcgtcgacaaggatgttgggggcctgcaagttcagaaagatggcgtttggtacactgttccgtccatgcctcacacgctgcttgtcaacttgggtgactccatggaggtaggttgggtatctccatgtcccaaagcgctttctctcacttgaatcttcatagattcagttaacagaaacaaagcgagtcagtgctgaatttttagtgtgaaattctggcgcagataatgaacaatgggatcttcaaaagtccggtgcacagggttgtgacgaatgcagagaaagagagactctcactcgccatgttctacggcgtggaaggccagagagtgcttgagccagcgcttggtttgctgggtgaggagcgaccagcacggtacaggaaaattatggcctcagactacattattgggctccgtcaaggaattgcggaaggacagagatttatcgagactttgaagatatagtcaatcgtgaatgctcaagaataataaagagttgcttcgcccattgctaaatcagatcagagtccaatgtccattctgtaatgcattaccacattgttatacatgctcggaagacttcagagaagatgtaatcctgctcgttttactaaatttggggcattaataaatgattaaataaaaac

SEQ ID NO: 35398 - DNA, 1858 bp, Zea mays
  Clone ID: UC-ZMROB73019H07_FLI
agaaaaccctctacaagcccttttttttttgttatccggtccgcccaggctcttcccattctccggcgcttccctctgtcccttggctcgctctggcgtggttctcccgtcccctggtgcgtgcgcgcttctcgctctctcgtggcggcgactgggcgactatcgcctccgccctacaacagttgctcaggtcttctttgggcccttcgccggggacaagcacccaccggagaaaatcaataaatacatcggcctgaaagaatgggttatggcatgagtaggctagacgatgaatactatgaggctgaagggcagaatactggtggatctggctcagttcaagtgaacgatgagtttgcaacactacataatgatatttttcatatgacccgaatgagatcaggacttactgaaagctacaagtccatgggtaccaacagaggcataatatcaactgccaagttattatctcgaagggaaattgattgttctggaaaggggatgttctcttctggtgaccgtgcatttgttctaggtcgtcatgttccgatgaacaatcctgaattattggataggatggattctcgtgcttacgtttcacagttttctgctgatggtactctttttgttgctggttttcagggaagtcacataagaatatacgatgttgatagaggctggagcatacacaaagacattcatgctaggtgtttaagatggacaatcagtgatgtatccttatcacctgatcagcggtatcttgcctactctagtctggcacctattatccatattgtcaatgttgggaatgcggcaagagaatcctatgctaacgtcactgacatccatgatggattggatttttcacagcatgaagatgttcaatattcatttggaatattttctgtaaaattttcctctgatggacgggaacttgttgctggcagcaatgatgactcaatatatgtctatgatcttcatgcaaacaaattgacattacgtttatctgctcatacatctgatgtcaatacagtagcatttgctgatgaaaccggccatctcatatattctggaagtgacgacactttatgcaaggtctgggacaggcggtgtttgtccgcaggacaggctgccggagttttgactggacatttgcatgggataacacatattgatagtcgtggagatggccgaagtttcatatccaatggaaaagatcaagcaatcaaactgtgggatatcaggaaaatgatgtccaatgctgatagttgtgcagatggagccccagcctgggactacagatattcaaggtatccgcatcaacataaacagttaaagcatccgcatgatcagtcaatagcgacgtaccgtggacatacagtcctccggacattgatccgttgctacttttctccttcgtatagcactgggcaaaagtacatatatacagggtcgtatgattccaatgtttgcatctatgatgtggtaagtggatcccaggttgcgaagctgaaatggcatcaaatggcgattcgggactgcagttggcacccatttgagcccacgcttgtgagctcatcctgggacggccgggtagtgaaatggaccagcgcacgtgatgaaggggcttctgatgtcgattgagttgagtcgaccgtgcaggtgcagcgcgagtgatctttactgttcgtggttgtgggctaaaaaaaaacatacccaatcttgcactaaaaaaaaggagagtaagcacagctcgtaataaagaaagaagatcatgtgttgcagtggtaatttgtaaatgtaaatactgaactgaaaccatgtgggcaggaccgagtgcataagcacctttgtgaat

SEQ ID NO: 35399 - DNA, 1967 bp, Zea mays
  Clone ID: UC-ZMROB73019H08_FLI
gtccaataccaatcgtgaagaatgtgtttatccctcctgattctgatggtgccttacaagtcgaccttgaagatatcatgcccctttgctcatttttggcttctattgatagctgcaaagaccgcattactgaagcacttgaaacaattaaaccaatgtcttcctgggaagtagcagcaaatgcgcacgatggacaggatcatgtattgcatcacatacgtggttttggtgtagcgttggatgttcttatcaactacctaagttcagaatatggaaatgcatttgagcttgctaggatatttgcgtttttatctggtccacccaattatggggctgggcagctggatataaatgaggaccaaaattctggtaaagcaaggggtgctgatcatatattgcttcaagagcagacaagtttctacagaaatctggctactagtgctgttcaagcaggtgtatgcgtggacctttttgcaattacaaatgaatacactgatcttacttctctgaaagttctgagtgttgagagtggtggatcactgtttctatattccagtacagatgaatcaacacttccacaagatatatacaagatgttgagtcgtccttatgcttttggatgtgtaatgcgattgagaacatcgtcgcagttcaagattgttgattcttatggccatttcttcccagacccccagtacatgcatgttcagcacataaattgttgcgactcttttgctacatacagttatgactttgagtttgaaaaggattcccaattttccaggaagtcaagccctcccattattcaaattgcatttaagtacactgtgcttgtgcacaatggtgatatatcagatcttccaaattctgggtgcagatttaaatacttgttagaaaggaggctaagagtgcggactatccagtacaacacaactgctaatatctgggacctttacgattttgttgatccagatgttgttttgacaatattggtacaccaggttattttggcttctttaagtgatgcactggaaacaaggctgtggctccaagattggttggtggttgtcatcgctcagtacaacaaagcatacaagaatgtcacatctggaggtggtactgagatttataatattgatgtcaatttctcacactgctcgcaactgcagcctttgtcacggtttgtgtttgctattctgttgagccccctgcttcaagtcagcagtgaaggcattcatccagattatgtgacatatttgcaatgcctcttgagtgcactggagccagcttcgcttcggcaggctatttggcctacgttgatttcatactcctcccccgatgtagaagcagaagtacatcaatcactaagccggactgtgttcaccagtgagaggccaatatatattcttgatgcatacaaagaccttctggtgtattactcacctacagctagtagcgaaatcccttttcctcctccacgaaactgtctactgagatcaacagtcgatagactaaaacaagaaaggaatataacacccaaactggttttcattcacggagcacatgatgacactacagaatttgagaaataccttgttgaggatcagaccttggatgggtccccgttatctagctccacaggtttcagctcattccttgatgaggttagaagtaaagtggctgagcatggcatttgaggaccagtgtcacctgtctcccgattgctggactgtgatgttaaacgggtgatgactgatgacccatgcaacccagaaatactgtcatgaatagaaagagtaagtgctttgctggtttaccggcaaacgtttttgtatgtgtgccgtgtgtttgatggatgctgttcgccatttttttaccgacagctagatgaattttaaagctttcctttacaagaccgcgctatatgtttttgtaatatccatgcgctactatgtttttttgggtac

SEQ ID NO: 35400 - DNA, 1166 bp, Zea mays
  Clone ID: UC-ZMROB73020A03_FLI
gctcatcacatccatctcattctactactgcctcagagaccaagctgctgcaaccggagaaggagatctattctacaaagtgaagtacttagcttgggacatggaaaccgtcgtgggagacctcatggcgaccgagctgaggcttggcctgccgggcaccgtggacgactgcagccagcaccagcagcagacccagctgaaggtggccgcgccgccgtccaaccctactaggggcaagaagcgccccgccgccgaggaggaggaggcaaacaagcgcgacgcggaggcagcacccccggcggccaaggcgcccgtggtcggatggccaccggtgaggtcgtaccggaagagctgcttccagcaggcaaagcagcaggccgtcagcagcagcagcaaggcggccgacaaagaggatgctgcggcgccggcgcccagctgcacggcgtccgcagccgcctcaaacgccaccgccagcgccggggccggctcattcgtcaaggtgagcatggacggcgccccgtacctgcggaagctcgacctgaggatgtacaaggggtaccgggagctccgggaggccctggaggccatgttcgtctcctccggcagcgccaacaacaacaacaacctgtcggagttcgccgtcacctaccaggacaaggacggcgacctcatgctcgtcggagacgtgccgttcgagatgttcgctagcacctgcaggaagctgaggatcatgaagagatctgaagccacaggcctgggatcggcgagacaatgaagaaggtctgacgacgaccgagggcccgacaacgttcatgtcgatctcttctttttttttctttttgccccattattttattttgttcttcttgtccgagagaccccaagccaaaaggatgagcttggtgggtggcgcatcaatctacaaagcgcatgcatatacgcggatgtgtgtgcggctttggttctgtaagacgacgactagtagctaggtcttttttagcagcagcacagaagctaaggagatgcatgctgatgacgagcggttgtttcggcttagctctccgtatgctgtgtttgtacaaaccaaacaatacagttatcttcaccgtcgttgatcccttactaattgcttgtggagatcgaggcgatggtcctcttgagctttc

SEQ ID NO: 35401 - DNA, 624 bp, Zea mays
  Clone ID: UC-ZMROB73020B07_FLI
tctctctctattcgttccccgcctcaccccgagccagccgtctcgctagggtttcgccgccgccgccgccatgcctcgccgcagctcaggaaggtctgccccacgcccagctccccgtgctgctccagtgaggaacccgccacagccagcacgccaggctcctcctccagctcctgttcgagatggtggtggctccatgtttggaggaattgggtccaccattgctcaaggtatggcgtttggcacgggtagtgccatggcacacagggctgttgatgctgtattaggtccccggaccattcagcatgagactgttgcctcagaagctgctgctgctgcccctgcccctccagtgatgaatgctgatgcttgcagcatccattctaaggctttccaagattgtctcaacaactatggcagcgagatcagcaagtgccagttctacctagacatgctgaacgagtgccgccgtggtggtgtgtctgcctaagctgcctctggggttattcatggattttctttcggtgatgctatctcattaataagataccgtgaaacttttgtctccacagcttgaagctaaacttcctgggattaatacattttgttatcctatgctgttgg

SEQ ID NO: 35402 - DNA, 2237 bp, Zea mays
  Clone ID: UC-ZMROB73020D04_FLI
gccgagtccggatcgtcgcctccaatgcccccacccccgtgagggacgggggcgctgccgcggtggtgtggtttaagcatgatctccgcatcgacgaccacccgggcctcgccgccgccgtctcggagccgcggcgccccgtcgtgccgctttacgtcttcgaccgacgcatcctcgccggctattcagataaaatgctggaactgctgctatttgctctgaaagatcttaagatgacgttgaaatctcaagattctgatttgctcataggcctgggaaacgctgaagatgttgtgctgaagcttgtgaatgaggtacaagcaggtctcgtttttacagaagaagaagttgaatatagagtgcgtgatgttcttgccaatgttgaatcatctttatctaatgggtcattctcatggggaagccctcccaagatagtggcttggagtgccccattgtatgactataagaatctgggagcagtaccgacatcacatgacgattttttaaagaaaaaattaccattggccacacctcttgctgcggcgaccttgcctgctctaaatttggagttagacacaggttctctacccactctggaagaattaaaatgtttcctgaaagaaataacaccagaggacaattgggctcctctcaagagaatgcccgcaagatctatccttaaaaggacaatcagtcaaaggaagatcaaaagtaatgctacattaagcaccatcaatgaagaaaacatagatgatgctgccaccatggattctgttgcatcaggaaagaggattataaactcgaagtttgcatcagagaactcactggaagttagtggtggaacagaaattactttggatgctttggctgcttacctaaaatatcttgaaggcacaggaaatgctagttggcaagagttgcatgataaagtgcgtttagctgaaaccagatatggtgcttcattctacatcttgtttggtcctgcaattcaacttggagtcatatctaggaggaaagcttacactgagactatccaatatgaaaaagatcgcaatgcaggttttctatcaccatttgggtactcaacacctacagtaacatcagcagtagatgctatatgttcaatggagtggtattggctcttggcatcaaaatcccaagtatgcatcgaggggaaatattctataagaatttggagatggaagggttatcttgtacagtacacctttcttggcaacgaaggtccacctgttcttcttgtgcatggttttggagctttcctggagcattttcgtgacaatatagacaagattgctgctacgggccaccgagtttgggcaattactcttgttggctttgggaaatcagagaaaccaaatgtcaactattcagaacttttctggtctgaactactgagggattttattgttgaaattgtgagggagcctgttcatcttcttggcaactctattggaggttatctctgtgctattgctgctggtttatggccttctcttgcaaagtctctggttcttttaaactcagctggttcagttgttccaaattactccttcatcccactgagtgaagaaagacgaacatcatggatttccaggttgcaggcacagctccttttgctcttcttgaggtcaagggcagaaggcattcttaaagaatattatcctacaagaactgaacgggtggacaagccacttctggaccagattgtaagagcttcatatgatcctggtgctgcaaaagtccttgagagtgtattcaacttcaatctttcaattcctcttaacttcttatttgattcttttggagggaagatattagttatccagggtatgaaagacccccttacaaaatctgaggcatttgtcaccatgctccgagaacattgcagcaaggttcaaatcagagttaaatgcaggtcatgctccacatgatgaagttccagatgaagtaaataccatactatgtaaatgggtggagcagattgaagttaagccagccctggagaagaccaaggcaatataggtaacatttagaattatggacaccctatccattggttgattgtttaacatgatcttcaggagcaccttggtacattttcagtgacctaccaaaacttgtgtgattaaagcattgtgaattgttagccctatacaaattgtgattaaagtattgtgaattgttagctatatacaaaacttggtacattttctttc

SEQ ID NO: 35403 - DNA, 922 bp, Zea mays
  Clone ID: UC-ZMROB73020D05_FLI
tgacggctgcgaccttccccgcttcaacccatggcgcttcctccacatgatgaggggcaagacccttgccttcgttggcgactccctcggcaggaaccacaaggactcgctcatctgcctcttgaccacggtcgcggagcctacgacgagctggccgagcagcaagcacaccgtgtactactacgccgactacaacttcaccgtggcccacttctgggcgccgtaccttgtccggcacgagcagatcgacgaggacggcccagcgcacacgggcgtctggaacctctacctggacgagccagacggcgtgtgggcggcgcacgtcgcggagttcgactacgccgtcgtgtccgcgtccagctggttctaccgcccctccatgctgtacgaggccggccggctcgtcggctgccactactgccggctgcccaacgtcaccgacctcacgctgcgctacgcgctgcgcatggccacgcgggccgcgctgcgggcgctgtccggcgccgacggccgcttccgcggcacggccctgctgcgcaccgtggacccgtcgcagtacgagggcggtgagtggaacaaggacggcaactgcgtccggacggcgccgttccgtcgcggccagaacgcggtccagggcctcgagcgtgagttccgcacgctgcagctggaggagttcgcgtcggcggagaaggcggcgacggacggtggcggtaaggtgaggatgctgctgatggacaccacggaagccatgatactgcgtgcggacgcgcacccgagcaagtaccgggggtggacgccggagaagcacttcaccctgcacaacgactgcgtgcactggtgcctgcccggggccattgatacgtggaacgacatgctgcttcatatgttgaaatgatcatcagtaatttgaattaataatgcc

SEQ ID NO: 35404 - DNA, 2032 bp, Zea mays
  Clone ID: UC-ZMROB73020D12_FLI
ctgaaactgaacgcgccggagtggccctacaccatactgggcgctgtcgggtccgtcctgtccgggttcatcggccccacgttcgccatcgtgatgagcaacatgatcgaggtgttctactaccggaaccccagcaagatggagagcaagaccagggagtacgtgttcatctacatcggcaccgggctgtacgccgtcgtcgcctacctcgtccagcactacttcttcagcatcatgggcgaaaacctcacaaccagggtgcggaggatgatgctcgccgtgattttgaggaacgatgttgggtggttcgatcaggaggagaacaactcgaaccttgtcgccgctcgcctctccacagacgccgccgatgtgaagtcggccattgccgagcggatatcggtgatcctgcagaacatgacgtccctgctcgtgtccttcgtggtgggcttcatcattgaatggcgggtcgccctcctcatcctcgtcaccttccctctcctcgtgctcgccaactttgcccagcaactgtcgatgaagggcttcgcgggcgacacggccaaggcccacgccaagacgagcatgatcgccggggagggcgtgagcaacatccggacggtggcggcgttcaacgcgcaggacaagatcctgtccctcttctgcagcgagctgcgcgtgccgcagatgcacagcctgcgccgcagccagatctccggcgcgctcttcggcctctcccagctctccctgtacgcgtccgaggcgctcatcctgtggttcggcgcgcacctggtccgcacccacgtgtccaccttctccaaggtcatcaaggtgttcgtggtcctggtgatcacagccaactccgtggccgagaccgtcagcctggcgccggagatcgtgcgcggcggcgagtccatccgctccgtgttctccgtgctcaacagccggacccgcatcgacccggacgacccggacgcggagcaggtggagtcggtgcgcggcgagatcgacttccggcacgtggacttcgcgtacccgacgcggcccgacgtgatggtgttcaaggacctgagcctgaggatccgggccgggcagagccaggcgctggttggggcgagcgggtccggcaagagcaccgtcatcgccctcgtcgagcgcttctacgacccgctcgccgggaaggtgatgatcgacggcaaggacatccggcgcctgaacctcaagtccctgcgcctcaggatcgggctggtgcagcaggagcccgtgctgttcgccaccagcatcctggagaacatcgcctacggcagggacggcgcgacggaggaggaggtcgtggaggcggccaaggtggccaacgtgcacggcttcgtcagcgcgctccccgacgggtacaggacgcccgtgggcgagcgcggggtgcagctgtccggcggccagaagcagcgcatcgccatcgcgcgcgcggtgctcaaggaccccgccgtgctgctgctggacgaggccaccagcgcgctggacgccgagtccgagtgcgtgctgcaggaggcgctggagcgcatcatgaagggccgcaccgccgtgctggtggcgcaccgcctgtccaccatccgcggcgtcgactccatcgccgtggtgcaggacggccgcgtggtggagcagggcagccacggggacctcgtgtcccgccccgacggcgcatactcgcggctgctgcagctgcagctacaccatggctgatcctgcgcctggaatagatactggagggcgcacggccggtgtagatactggagggcggtgttagcgtggcgtggctcaaccgtggccggagaagacgtgttttgatgtgaacgatcaggattgtgccgacaaacaagtgatgccgtattcttcttgcactcctgccggctctgccaatgtttagatcatcccctcctagtaattctcacacctttttttttcttcctttgagaagatcctagtaattctcagatggacccaattgtttgatgtgtaacggtcagaagccagggttcgtctt

SEQ ID NO: 35405 - DNA, 1372 bp, Zea mays
  Clone ID: UC-ZMROB73020E05_FLI
caaatccagcgggtccgtactcatctgcttcacctccgggctccggctacggcggcactcttctctggcaaccggtcggaagatgttggatcttccgcttcaaatcgacgcataaaggatgcagattagttttgttcgcgtcaaatttattttgctcggtgtagttctgtccattaattaattatttgtactggatttaaggtgctgctattttgaaggttttttctcccggaaattttcacatcccgaaacgactggaaattgaagaccacagaaacctctaggcgacgaatcgagcaggtagaggagtaatcaggcatccatggctgagcatcttgcgtccatctttggcacggagaaggaccgcgtgaactgccccttctacttcaagatcggcgcatgccgccacggcgaccggtgctcccgcctgcacaacaagccttccatctccccgacgctgctgctctgcaacatgtaccagcggccggacatgatcaccccgggcgtggacgcgcagggcaaccccatcgacccggagcggatccaggaggacttcgaggacttctacgaggacatcttcgtggagctgagcaagcacggcgagatcgagagcctccacgtctgcgacaacctcgcggaccacatgatcgggaacgtgtacgtggagttccgcgaggaggagcaggcggcccgcgccctgcaggcgctgcagggccgctactactcgggccgacccatcatcgccgagttctcgccggtgacggacttccgggaggccacctgccgccagttcgaggagcacagctgcaaccgcggcggatactgcaactttatgcacgtcaagcaggtcggccgggacctgcggcggaagctgtttggccacctgcatcgctccctccggagccacagccgaggcagccgcagcccgagcccataccgccgccgcggtagctcgtccaggtccagggaccgcgacgattaccacgactactactaccactactaccgtagtggcagtggcagccgcaggagcagcgagagacaccgcagccacgacagcgacgggagccgccgtcgacgcgggcggtcgaggagccggagccggagcccggtgagggaaggcagcgaggagcggagggcaaagattgagcagtggaaccgcgagcgggaggcagctcaggtgtaagcaagttccccttccctagttgccatgttggttgctgcagtgttattggccttgctagttgccatgttgctgttgctgaagcctgttatcatgtattgtggtgtggttcaggcagggtaaggccataaattgagcctgaaattggactgtgatctcttttgctgtggacgggttaccattaaactt

SEQ ID NO: 35406 - DNA, 1388 bp, Zea mays
  Clone ID: UC-ZMROB73020E06_FLI
aacagcagcatgggccagctctgcatgtccggcagcctgatcccggagaaggtggccggcaagatcgtcctttgcgaccgcggcaccaatgccagggtccagaagggcttcgtcgtcaaagacgccggcggcgccggcatggttctcgccaacaccgccgccaacggcgaggagctcgtcgccgacgcgcacgttctcccgggctccggcgtgggggagaaagccggcaacgccatgagggactacgccatgtcggatccgaaagcgacggccaccatcgtgttcgccgggacgaaggtcggcgtcaagccgtctcccgtcgtcgcggcattctcctcccggggccccaacactgtgacgtcgagcgtcctgaagccggacatcatcgcgcccggcgtgaacatcctggcggcgtggtcggggtccgtcggcccgtcggggctccccggcgacggccgccgcgtcggcttcaacatcatctccggcacgtccatgtcgtgcccgcacgtgagcgggctcgccgcgctgctccgcgcggcgcacccggagtggagcccggcagccatccggtcggcgctgatgacgacggcgtacaacgagtaccccggcggcggcaacggcatcctggacgtggccacggggcggccggccacgccgctggacgtgggcgccggccacgtcgaccccgcgaaggccgtcgacccggggctggtgtacgacatcgcggcggcggactacgtggacttcctctgcgccaacaactacgaggcggcgcagatcgcggcgctcaccaggcagcacgcgtccgaggggtgcagcgccaaccgcacctacgcggtgaccgcgctcaactacccgtccttctccgtggcgttcccggccgccggcggcacggcgaagcacacccgcacggtaaccaacgtcgggcagcccgggacgtacaaggtggccgcgagcgccgccgccggcggcaccccggtgacggtgaccgtggagccgtcgacgctgagcttcagcagggccggcgagaagcagagctacacggtgagcttcacggcgggcgggatgccgtcgggcaccaacgggttcgggcggctcgtctggtccagcgaccaccacgtggtcgccagcccgatcgcggcgacgtggacctaatggctagcggcggccgtaccgtagcaatagcgagataaaatcccgattgggggacggcaatggcgagcgcgcgccattctcgaatgcgagagagatggcggatatcgtcgaggatgtgctgttgtattgtgtgcatgagtccgctccggtgtgtaagctgccggtgtagtgtaatctatctgtagctgacccgattgtagcgatgcagcaattaaatctcaaaagggttgcag

SEQ ID NO: 35407 - DNA, 1356 bp, Zea mays
  Clone ID: UC-ZMROB73020F12_FLI
aaggtgagcggttgcctccgaaagcaagccatcactggcggctaccaaatgcaggcatgcatatagcgaacaggacaagaagcagcagaggaggaggaagaaggacaagtaggggcagagagctcaaggacgtcaagaaacggtcgctcgctgccacccaccatgtcctatgatcaggtgctcttcggtgccgggcgatcggcgtggagagcggctcagcacggcggcggcgacgcggtgacgaggcagatactcaagtgcatgcggtggcagctggaggagaccaccgacttcgtcacctgcccctaccactactactgcgacagctcctacccgggcgactactccgcggccgtcggcgtcctcgtcgctgccttcgccgcgtactgcttcctctccaccctcgcgttcaccgtcctcgacctcgtccgggggagcaacagcgcgccggcgccggcgccgggcgtccgaggcgtcaggaggaagtacctggtcccgtcgggcccgttcctgctcccgctggtgctgcttgcgctcgccagggggcagcgggtgaacgccgtgttcccgctggcgcagctcgggccggcattgctgctgctgctgcaggcgtcggcgctggcgttccggaacgaggccgacggcgacgtccggtacgcggtgctggaggcgtccacggtgtccggcgtgctgcacgccagcctgtacctggacgccgtcgtgctgccctactacacggggctggaggcgctccggtggtcccgcttctccggggagtgcgcgtcgtgcctgtgccggatggagccgctgctcgtgggcggctcggcggtgcggtaccgcggcctctccaagacggcgctggcggtcatcttcgcgctctgctcgcggatggtgtgccgcatctacggcgaggagcgcctcagcgcgtggacgcggtccgcgctggaggccgcgggctgggtgctcgtggccgccgacgccgtgtacctcgtcggctgggtcgccgcggagggcggcggcgtcggcgtcgcggcctacagcctggtcgccgggctcgtgttcctcagcgtcttcggcaaggcgtaccggttcctggcgtgggtggaggccaggcaatcgcagtggaagtccagcctctgccatagcgccgtttgatcgacgacactcgtcgtcacagctaattctcgcagggaaaaaaaatctgtaaaaagaaagaaaggaatcgtcgcttattagttcatcttcttcttggttcttgctgtacaatctacacgatggggggcaaaaaaggtgcgattttttttgttcatgttacttagcttaatttggctgaagccattcaggtttttgttgatg

SEQ ID NO: 35408 - DNA, 1935 bp, Zea mays
  Clone ID: UC-ZMROB73020G11_FLI
gggcggagggagagttcgagccagcaatggcgaggccacggccggcggcggccaccctcctcctggtcaccttcctcctggccgcggccgccgccgagaccacggacgtcatcagcggcggcggcggcatggtgggcgtggacggcacgcggttcgtggtgggcggcgccgccggaggcaggcccgtctacttcagcgggttcaacgcgtactggctcatgctggtggcgtcggagccggcgcggagggacaaggtggtggcggcgttccgccaggcggccgaccacgggctcaacctcgcgcggacctgggccttcagcgacggcggggacacgccgctgcaggcggcgccgggcgtctacgacgaggccatgttccagggtctggacttcgtggtcgccgaggccaggcggcacggcatctacctcctcctctgcctcgccaacaacttccacgacttcggcggcaagcggcagtacgtgcagtgggccagggacgccggccaccgcctcgccaccgacgacgacttcttcaacagcaccgtcgtcaagggatactacaagaaccacgtcaagacggtgctgacgcgggtgaacaccctcaccggcgtggcgtacaaggacgaccccgccatcctcggctgggagctcatgaacgagccccgctgcgacgccgagcccaccggcgccatggtgcaggcgtgggtggaggagatggcgccgtacgtgaagtccgtggacggcgggcacctggtgacggcggggctggagggcttctacggcgcgggcgcgcacgagagcaaggacctcaacccctggcgcatctactacggcaccaacttcgtggagacgcaccgcgcgcgcggggtggacttcgccaccatccacctgtacccggacgcctggctctggggctgcgccgccgacgcgcagcgcgccttcctccgcaactggacgcgcgcccacgcccgcgacgccgcgctctacctgcgcaagccgctgctcgtcaccgagtacggcaagttcctgtgggagggcgtcgccggcgccaaccgcacccagcgggacgccttcctccgcctcgtgctcgactccatctacgcctccgccgcgcggggaggcccgctcgtcggcggcgccttctggcagctgctcgacgacggcatggacacgctcagggacggctacgagatcatactccccgacgaccagctcgccgccaccatcatcgccacccactcccgccagctggccgacctcagcctcgtcaccgccgaggacgtccgggaagaggaggcggcgccgcttcgccggaggaggaggaagagcgcgcatggcaagatacaccacgtactcagcgtgggtggtggtactagtagtgatgatagttattatacgcaacggttgctgcacatattcttgcttcgtctcatctctttgttcgaatcaatctcttcattgtttcagtagtgtataggttacgtgtagaatttttttttctctatcgccaccaggaaaaaaaaacctggttaggtgtgtgtgcgcgtgtgcaggttgttctagaaagttaggcatagccagtgtgtgtagagtatacagtttctcttttttttttgtttttttttttttctttgagggcaaaaaagacaggtgctctgatcctttcattcaaaaggaagcaacagagtttacaagaagattacaagaggccaggccaagagccggtggtcaaaatgaaagagaacagggacaggcagagccaaacactttacaccaaaagttttgcataatggtgtgttaagccttcgaatacattaagatagaagttaccgtgtcttacatatcaaagtgtattgtatcttgtttagattagataacatagtgtataactcatagcttgtttttcctaaacttttaattcatgagatctttgatc

SEQ ID NO: 35409 - DNA, 1313 bp, Zea mays
  Clone ID: UC-ZMROB73020G12_FLI
ctttccgctgccggtgaacttcctccacctgaagcccctaccacgataagccctaatcccagcgccacctcgatggcgaccacctctttctttcatccgctcgccgccccgatggaccgcggtagcgtttgttttcgtcgctgcccgttcagcctaaccatccccgcccgtacagcgccccggcgaccggcgccgcttctcgtcgtccgcgctaagcgcgccggcagccagccccctgctgccgccgcctcgcgtcagcccgcgaatcccagcgcggtcccgaagcgggacgtggaagaagaggaggaggaggtcgaggaggagatgccctggatccaggacaaggcgctggacctcgtggagttcactggcaccgtcacacaggccatcccagggccccgtgttggctctagccctgttccatggcttctcgcggttcccctcgcctacgtcggggtctcctttgtgctcgcggtcgtccgcaccgtgcgcaagttcacctcgccgcacactaagaagaagcgaagggtgagtaagaatatattcttgttgaagtcactagatgatctgtttcagaagggcagggaggcaataaattatcctgctcttcaggacctaatgcaaaagacaggatttgacatggatgatgtagtaaggaagtacatccgttacacactgaatgaaaaacagttcagtcctgatgtggttgtggatctcatacatcttaggaaggcatcaatgctggaagatgcagaagttgctgaaattttaaatgagatttcaagacgaattgtccgggaaaaagggccagtagttatggacttatctggttttacagagcaaggttttaagcggaagcttgctgtacaagcactgtttggaaaaatcctatacttatcagaacttccggagttctgttcacgggacagctcacttgtagtcaaagaaatctttggagttacagatgaggatgcagacagcctgcggattcacaccctatcagcaacaggtgatatcgaatctatacagaagatggtggacgatctagacctagaacaaggtcccccatcatcgtcttgagttatggtggtggaataatgctaaacatcttcgttgatagtgttgcaattttagattgatgtgagtttctcgaatcttttcgtttagttttttcagctgctgaagtaggacttgggcctgtgaacacaggatactttcggctggagcctggaggttttgtaaattgcctctcgattaggataacgtatgtcagacctgcccatgatttgagtaaacgagaatactattattat

SEQ ID NO: 35410 - DNA, 925 bp, Zea mays
  Clone ID: UC-ZMROB73020H04_FLI
gagagagggggaggcagagaacattcggcagtgtgagaatcggaatcggagatggcttggaatggccgcttcggcgacgacgaggaggggagcggccttgagctcagccttagcctcccgggctacttctccggatcgccaacccaagctgcagcaggtttcgaggacaaagcagacggcggctctgctgctgctgctgctgctgggcgagcaaagggaagcaatggcttcaaggccaggccggcggcagctgctccggtcgtgggatggccgccagtgcgcgcgttccggcggaacctcgcctcggcgtcctccaagccgtcccgcgatccgccaccaagccacagaggaaacgagtccgcgagcgtcggcgccggcggcaaggccgtcgagggcggcaacaagggcctgttcgtcaaggtcaacatggacggcgtgcccatcggccggaagctcgacctgggcggccacgccggctacgacacgctaaccgccgccgtcgaccacctcttccgcggcctcctctccgctcaaacgtcgggaccaggcggcgagcggcaggcggtcgcggggatcctgaacggtggcggcgagtacacgctggtgtacgaggacgacgagggagaccagatgctggtcggggacgtgccgtggcagatgttcgccgccaccgccaggcgtctgcgcgtgctgcggagctccgatctcaacccctcgtcgctaagggcagcgaccaggaagagagctgcagcttagtgctgcgctggcgtaccctggagtctcaactctgaacattttgcggccttttcggagggccaccaatgtaaaattgaagcggtttttcgtggatttttgttaccattaccatcatgtatgtgatcaagtagggaagcaggaatctagaggagatgagtggtgttgttag

SEQ ID NO: 35411 - DNA, 1778 bp, Zea mays
  Clone ID: UC-ZMROB73020H10_FLI
gataaagttggctggtagttggctgcccacaccgtctggttcccgttcccatgtcagagggccacgtttcccatgctcctcggtttgtgcctgcaatcgcttgctgcttagcctccgtgctgctgctttgatccagaggctgggaactccaaagaggaacagcgtccatggaggctggaggcgcaggaagtggtttgaatggggcggtgcaggcaaaggggactggggctgatgatggctctgccaagcggctgccgccttgctgcgtcaaggccagagccgccgcgccggagtccgaggccaggtgccacgccaccgtcgtttcaggatggttcactgaaccgcgatcgcgctgtggtaggcctcgattgtcttgcttggtaacgtagatgatgatacagcagcacaatttattactgtttgacccctgattgttgcctctgcaggcaaagccagcaaagttcagtattacaataacccgatgtggccaggagaggccaattctttgaaagtggagaagatcttataccaggggaaatcgctataccaagaagtcttagtcttcgagtcgtcgacctatggtaaagtccttgtgcttgatggtattgttcagttgactgacaaggatgaatgtgcataccaggaaatgattactcacctgccactttgctcaattccatcccctaaaaaagttttggttattggtggtggtgatggaggtgtacttcgagaggtatccaggcatagttcagtggagtccattgacatatgtgtgcaaagatttcttcccacacttgtctgttggatttcaagatcctcgtgttcaacttcatgtcggcgatgctgtggagttcttgagaaatgctcctgaagggacatatgatgctatcattgttgattcgtcagatccaatagggcctgctcaggaacttgtagagaagcccttttttgatacaattgctagagctttgaggcctggaggcgttctttgtaatcaagctgagagtatgtggttacatacacatttgattcaggatatgctttcaatttgccgtgaaactttcaagggttctgtacgctatgcatggacaagtgtcccaacatacccgagtggggtgattggatttttactatgtgccaaagaaggtccattggtgaactttctgactcctataaatccaattgaaaagctggaaggagctacaaaagctggaagggagatcagattttataactcagagatgcatagggcagcatttgttctcccgacctttgcaaggagagagctagaagcatattgcgtttccactgaaacagagcaagcggaggaaacaccggcggcaccactgaagttgactcttgcatccaggagtgaaattttcgctacatcctagctagaccaggactcgcgatgtaccacaagatatcaagaaaccattccttccttcctggtgccgtacctccagtatcgccattggttcatagtcttactatcacatgctatgagacgcataatgaggcatcatgtcagtaattcagtatccaaacaatgagatgagattggcatgctaagaaaggacgagctgatattacaatgtactcccttcaccatgtcagtaatttattgtccaaacaattagatacattgcgttatatgaaggagtttcttaggtgtatctagtgctcggagaaccgaaacgtagtatctaggttgtacatgttcacccttgtacttctacttattaagtgatgtaataaatgcagagatagtcttgctc

SEQ ID NO: 35412 - DNA, 1086 bp, Zea mays
  Clone ID: UC-ZMROB73020H11_FLI
gtccaagaaggacttcgagcaccacatggccgtgctcggccgcctccggcaccccaacatcgtgcccctcaacgcctactactacgcccgcgacgagaagctgctggtgtacgagtacatgcccaacggcagcctcttctccgtcctccacggtaaccggggccccgggcgcacgccgctggagtgggcggcgcggcttcgcatcgcagccggcgccgcgcgcgggctggcctacatccaccactctgggcggcggggcagcggcacgccgaagctggcgcacggcaacatcaagagcaccaacatcctgctggacagattcggcgtggcgcgtctcgcggactgcgggctggcgcagctggggtcgtccccggccgcggcggcggctcggtcggcggggtaccgcgcgcccgaggcgcccccgccgcccaggccctgggcgtcgcacaggggcgacgtgtacgcgttcggcgtggtgctgctggagctcctgacggggcggttcccgggcagcgagctgccgaacggcggcgtcgtggtggagctgccccggtgggtgcagtccgtggtgcgggaggagtggacgtcggaggtgttcgacctggagctgatgaaggacaagggcatcgaggaggagatggtggcgatgctgcagctggcgctgagctgcacggccgcggcgcccgagcagcggcccaaggtcgggtacgtggtgaagatggtcgacgaggtccgcgcgtgcggggagacggcgtcgccgtcgcacgagtccatggacgagtcctccggcgtctcggactcgcccgccgtgtcggagggcggcgcgctcagccagtgagggcgcggcctggcgctgctggtccttcttcggaattgccttgtgatgcgtgcctatttgtttggtttaatctgctcttgttttttttgggggtgggctggattagcgagggccgttggatctggtgatcggcgtgtgcgtgtgtgtacattgttcacgttggctgcttggctctggattcttgttcctgtttttaactgactctagatccctagagtagctgcggctgcggcggcggcgggggttgg

SEQ ID NO: 35413 - DNA, 699 bp, Zea mays
  Clone ID: UC-ZMROB73022B12_FLI
ctcgccaacggtcctgaggtaacaaagtcactgcttgagacatcaaggagaggataccttgctgcaatttcagcatctagttattcttatgtttctttacttcaacacttccttcccataatgaatccaggaggtgctagtatctctttgacctacatagcttctgaaaggataattcctggctacggtggtggtatgagttcagcaaaagcagctcttgagagtgatacaagagttcttgcatatgaagcaggtcgaaaaggcaaaatcagagtgaacaccatatcagcaggtccattgggaagccgagcagcaaaagccattggatttatcgagaagatgatagagtattcttatgttaatgcaccactgcaaaaggaattattggcagatgaagtggggaacacggcagcattcctggtgtctcctttggcatcagcaatcactggttcaactatttacgttgacaatgggctcaacacaatgggacttgcacttgacagccccactttatccacatgagcacatttcagcagaatgcggcgcagttaggtttgaattacgtgcaggcctgagcacggcagtctggttttttgaattaatctgtacgatgctagattttgcaggagatttcgttttttgttttcaataacttggactatcagttgcctgttagaaataagaactgtgataggctgc

SEQ ID NO: 35414 - DNA, 1212 bp, Zea mays
  Clone ID: UC-ZMROB73022C10_FLI
gagtgctcgtatgggtggatagagtgtgtgggtattgctgatagatctgcatatgatttgaaagctcacactgacaaaagcggtgtcccacttgttgctcatgaaaaattctccaagcctagagaggttgagaaacttgtcatagttccctcgaagaaagacctggggctggcttttaagggcaaccaaaagatggtcctggaagcattggaggctattagtgagaaggaagcatttgagatgaaagctgaactagagaccaagggggagacaaattttaaagtctgcacacttggaaaagacgtggtgattacaaagaagatggtatcaatcagcatggagaagaagctggaacaccagcgagtcttcaccccttcggtcgtcgagccgtcattcggcataggacggatcatctactgcttgtttgagcactcgttttacacaaggcctagcaaatcagaagaggaacagctgaatgtcttccggttccctcctcttgtggcccctatcaagtgcaccgtgttcccccttgttaagaatcaagagtttgacgatgctgccaaagtaatcgccaaggcattaacaactgctggtatctcccacattattgacactactgcaatttctattgggaggaggtacgccaggacggatgagatcggtgttccatttgctgtaacagtggattcggcaacgaacgtgacgatccgagagagggacagcaaggagcaggtccgcgtggacatcgacgaggtggcgcctgtggtgaagcagctgacggaaggccaaagcacatggacggatgtttctgcaaagtatcccgcccatgtcggcccccaaagtgagcaggagtgaagaatcgccgccctgatgtctagtctagccatcgaccgagaaggcgtcgggatgagccgtcttcgttctccaattgctgagaagattgtgtggcctaaacataactgcttttggtattgacattatccagaaaggcagtttttttccctcatacatacatgacacttgctatagcagttggatgttatgaagtctgcagatgtcaccgatttttttgtttcttttaaatgcccctttcttgatgtattctcacccatacaaaacataccatttgaggtatttctgaactagctgtccttttgtaaggtcagactgggaattgttcagctatctacagtggaattggaaatttcagtt

SEQ ID NO: 35415 - DNA, 759 bp, Zea mays
  Clone ID: UC-ZMROB73022E01_FLI
gtttccaatgctagctgcaccacaaactgccttgctccccttgctaaggtcattcatgacaacttcggcattgttgagggtttgatgacaactgttcatgccatcactgccacccagaaaactgttgacggaccctcagccaaggactggagaggtggcagggctgccagctttaacatcattcctagcagcaccggtgctgccaaggctgttggtaaagttcttcctgatctgaatggcaagctcactggtatgtccttccgtgttcctactgtggatgtctcggttgttgacctcaccgtcagaatcgagaagggggcctcctatgaggatatcaagaaagctattaaggctgcttccgagggtccactcaagggtatcatgggttatgcggaggaggatctggtttctaccgacttccttggtgacagcaggtcgagcatcttcgacgccaaggccgggatcgctctgaacgaccacttcgtcaagctcgtctcgtggtacgacaacgagtggggctacagcaaccgcgtcgtcgacctgatccgccacatgttcaagacccagtagaggggttttttccccctgcttctcatggatggttgctgcttgtgtatgccgagaataaatgtggatggcgcgtgcctctgggtcgccaggttcatgctgagtctggacatgttttgcacttttgcttcccttcctgctaccatctgtgacagaaccgctcgctaatatgggacctgagattagcttttt

SEQ ID NO: 35416 - DNA, 431 bp, Zea mays
  Clone ID: UC-ZMROB73022H02_FLI
caccaccggcgctcgccgcgctgtccgagccggcgaacgcgctctcgctgcccacctgggccgtccacgtctccagcgtcgccgagtgggtgacggcgatgtggctggtttgggactacggcgagaagacggggctcaagggttggaaaggcctctcgtgggggatggttccacttctaggtggagcaatgtgtgcttgcacgtggcatttcttctacaattcagagtctcttgaagttcttgtagcccttcaaggtgctctgacagtggttggtaacataacaatgtgcatagctgcataccgcatattcaaagcatcccaggaaggctcaaaaacttcgtaggctgcaagattggatcttacagccggtttggcaaggtgatgagatatggagcttgcgtttctctgacatggatgctttgaatatgcg

SEQ ID NO: 35417 - DNA, 2234 bp, Zea mays
  Clone ID: UC-ZMROB73022H08_FLI
actatatcagcgaatggagacagaacctggattgagcaagctcgttcacaatgaatctggattgaagaaggcaatagagccccttcttcagatggctgagaaattgatccctagacatgcacacaagcacactccactttttctatatgctactgctggtgttcgcaagctacctagtgcagattcagagtggctcctggataagtcctgggatatcctgaacaattcatcatttttatgtagtagagatagagttaagatcattagtggcatggatgaagcttattatggatggatagctcttaaccacaacatggatatgcttggcacctcatcatctaaaatgacatatggttcacttgatttagggggatcatcattacaggttacatttgagaatgataaatcagtgcaggatgagacaagcattcgtctgagtattggttcagttgaacatcacctcagtgcttattctcttactggttatgggttaaatgatgcatttgataaatctgtagcacatctagtgaaaagactgggaggagttgctagcaatggcaaggttcaagtcaaacatccctgtctacagactggattcaaggaagattatatttgttcttactgccatccattgaaacaagatggaagtcccagtgtcggcgagaagaacagtggcaaagagaagcagggaatagctgttgaactggtcggagcacctcagtggaatgaatgtagtgctcttgcaaaagtaacagtcaatctttctgagtggtccagtgcaagtccagggcttgattgtaacatccatccttgtgctcttgcctctaactttccccgaccatatgggcagtttttcgctatctctggcttctatgtggtttttaaattttttaatttgactgctgatgcgactctaggtgatgttcaaaaaagaggtcaggaattttgtgaaaaaccatggaaagttgcaaagagtagtgttccttcacagccttttgtagaacaatattgcttcagagctccttatatttcatcactactgagagagggattgcagattaaagatagtcaggtgataattggctctggcagtattacttggactcatggagttgctttgctggaggctggtcaagcattgtcttcacgactagatattcaaggataccgaatactgcacagggagataaatccaaatattctcatagtactgtttctgatttcaattgtgttggtcatatgtgccatactatgcgtcagcaattcgataccaagatcattccgcaagtcttatctgccaattcataggcataattctggaggcagttctgttcttggtatgggattgcctttcaaacatttattatggaatcccattagttcaggtgatggtagaacaaagacaccactgagccctactgttgctgggtcagatcctcatccatttgcaggactaggaggcagcagtgtcgagcttatggagtcctcgaggcaatccttgggtgcctatcacagctattctgttgggagcttaggtcagatgcagttttctagcggggtgaggaaccctagccgaggtcagactacacttcaaagtcggaggtcgcaatcaagagaggatctcagttcttcacttgctgatattcattttccaaaagtgtagcactgcatcaaggaatgactagaatgagatccttacatgccataacaaactctgtaaataatagctccagagttcgaactgcttgatttcttctctaatcagaagtcaattttgtctgtccgcttacacttcaatgaggtttaggattcatataaatgaacttatgacttgtgcctatcctggacatgatacatccattcatcccattgtatgtgctcaagaacataccatagcagtgaagttctggtagtgtactggaagatatatttatgccgttcaccagactggttgaccatggctacagcctacaactttatagatcgattgtgctgcaatcagggatgttatttttttgtatctgagacataataaaggtgcatgtggtctcatgtactgttgtaccctctaggctctagtggctctgtgaggttactcttctttcctggaataccttttgataggctactctgtggtatcaactgaaatcatgaaacactgacatcagttctactggattatctagttgcgtactgtgtatacacatctattgagttttttttgttggcatagt

SEQ ID NO: 35418 - DNA, 2161 bp, Zea mays
  Clone ID: UC-ZMROB73024E12_FLI
tcgaaacacgcctccccctcctcgtctggctccccgtgaccgatctcgtaatctcatccgcacccgcctggccgccttgcctagccttgcctgctctcctcatgccctggccgccgcctataaaagagcgaggcggaggggcaggcgccggccgttcttctctctccttcttcctcggtcctctcctctccgcatttcgggcggccacttgtggcggcgtagctagcgtactacagctccctgcatggtgatggaggggcgcacgggctcactctacggccgcctcaacaagagcagcacgcgggggttcctcgcctacaccgccgccggggctgcctgcgcggctgtcctcgcctgcttcgtgctctccgccgcggactcgccggcatctgcggcgcgcaacgatggcgagcgcctccgcctgtcctcgcgctcaccgcgcgtctggcccgacctcgcgttcaactggcgggtggtggtcgccaccgtcgtcgggttcctcggttccgcgtttggcaccgtcggcggcgtcggcggaggcgggatcttcgtgcccatgctcaacctcgtcgtcggcttcgacaccaaatccgccgccgcgctctccaaatgcatgatcatgggggcctcggcgtcatcagtttggtacaacctccaggtgtcgcacccgaccaaggaggcgcccgtcatcgactacaagctcgcgttgctcttccagcccatgcttatgctcggcataaccatcggcgtagagctcagcgtcatcttcccatactggctaatcactgtcctcattataatcctcttcgtaggcacctcgtcgagatccttctacaagggcattctgatgtggagggaggagtccaggattctgatggagacacgcgggcgagaagagcaatccaagtctacctgcgctgcaagtgatgtggtcattgatcccagttatggggagcccctcctgactcaacctcagcccaagaagtctgcatgggagactttcatgttcaatctgaggtggaagaatatccttgtgttaatgtctgtctggtcattgttcttggtgctgcaagttctcaagaataattcaaaatcatgcagctctttctactgggtgataaacgttctacaggttccagttgcggtaagtgtgttcttgtgggaggccatgcagttatgtagggagagtcatgcacgacgtatgaatgggaacctggaatgtgtgtgtgaggcctctattgagtggtcaccagcacaactgatcttttgtgccttttgtggccttctcggtgggactgttggtggccttcttggatctggtggtgggttcatccttggcccacttcttcttgagcttgggtgcataccgcaggtggcaagtgcaacagcaacattcgtgatgatgttctcctcctccctctctgtggtggagttttacttcctgcacagattccccctgccttttgctggctacctcatcttcatttccatattggctggattctggggccagtgtttggttaggaagatcgtgcatgtgctcaagagagcatcgcttattgtcttcatcctctcctctgttatcttcgtcagtgctcttacgatgggtgtcgttggaacccagaagagcatttcgatgatcaacaatcacgaatatatggggttcctcaacttctgcgagtaactcaaacaccatcagactgtcgatccgtccgggagaatccaggccaatgcctaattgacctcatctccctcaaaatctagaagaataaagtcgccgagtatgtgcacaagttagctcctcgccaacatgtgcgcatttagaccgacagagtcgctgtagtgaattcagctcgtgttagctcctggctaacgagctgaccatacggctttagttttgtgaagtgggcgcgatttcgtcatgtcatgcatgtgttagctcctggctaacctgcaaatgcgtgtgttggtgcaggtttttgtcacgtctgcgtcagctcctggctgaccagcagttgtttgtcgttcattctctgcgtcagctcctggctgaccagcagttatttgttgttcattcttgcgctagcaccaggctaggctgcaaaactgcaaatatttgttgcatggaacattgtaaatatcagtcaattcccattctgtt

SEQ ID NO: 35419 - DNA, 950 bp, Zea mays
  Clone ID: UC-ZMROB73024F01_FLI
caaccggcgacatcactctcactactgcagctcagctcagctcagctcagcaagcaaattgttcgatcgatcgtcgtcgactatggccgccgcctcctcctcgcagcaaccaccgcgcctgctagtactcgtggcggtctcgtgtctcctcctgcagagtgccatcaccagcagctcggcggagtcgtcgatgcagtgccacgaggaggaccaggaggcgctgctggccgtgaactccgcgctgggcagcccctaccacttcgcgtcgtggacgcccgacaccttttgctgcgactggtacgacgtggactgcgacaacgtcacgggccgcgtcgtcggcctcaccgtgttcggcgacggcaacctgacgggcgccatcccggacgccatcgccaacctgaccaacctccgcacgttggtcctgcgccacctcccgggcatctccggcggcatcccggtctcgctcgcgcagctcgccaacctcacccagctcaccatctcctccaccggcgtctccggcccggtgccgtcgttcctgtcgcagctaacggagctcaccctcctagacctctccttcaactccctcgacggcgccatcccggagacgctcgccgacctccccgccctctccagcatcgacctcagccgcaaccgcctctcgggccccgtcccgccgctgctcctaagcaagtacgtcgacgaccaggcggcgtacctcatgctgtcgcacaacaacctctccggcagcatccccgccgggttcgcctccgtcagcttcgcgtacctggacctgtcgcgcaacgccttcgccggcgacgcgtcgggcgtgttcggcaaggggaagccgctgcagcacttggacctctcccgcaacggcttcgccttcagcctcacggccgtggacctgccggagcagctggcgtacctggacctgagccacaacgccatcc

SEQ ID NO: 35420 - DNA, 1602 bp, Zea mays
  Clone ID: UC-ZMROB73024G01_FLI
cggacccaaaaatccgcaacccttctctttttcctgagtttctcgtttcccctccttgggctcggaggctacagttcctgccccacccgcaagactgcccccgcgcgcggccgcggccatgtccttcccgcggctcctcctggccgtcctcgccgccacggtggcggcggcgtacgcgcccgcgcgcgcggcgggcgccggcgccggtgcctgcgcggcggagaaattgtccagcaaccgcgtgttccagacgtgcgccgacctgccccgcctcggcgcgtcgctgcactggtcctacgacgccgcggcgtcgtccctgtcggtggcgttcctggcggccccgccgtccgccggcgggtgggtcgcctggggcctgaaccccaagggccagagcatggacggcacgcaggcgctggtggccgtccccagcggcggcggcggcggcggcggcgcgtacgaggtgcagacctacagcatctccggcacctcgctcggctccccgggggcccccctcgcctacccgacgtccgacctcgccgccgagctcggcggcgacggccgcgtccggatcttcggcacgctcaagctcccgaacggcacgggcggcgccgaggtcaaccaggtgtggcaggtggggccctactccggcgggatccagatacacgaaatgaaaggcgacaacatgaacgccaagggcacgctgaacctcctcaccggcgccaccgccgccgccagcggtgggggcagtatcctcaggaagaaaaatacgcacgggatcctgaacgccgtgagctggggcctcctgctgcccatgggcgccaccttcgctcggtacctcaagacgttcaggtccgccgacccggcctggttctacctccacgtggcgtgccagctggccgggtacggcgtcggggtgtccggctgggccaccggcatccacctcgggaacctgtccaaggggatcacctactcgctccaccggaacatcgggatcacggtcttcgccctcggcactctgcaggtctttgcgctgttcttgaggccgaagaaggagcacaagtaccgggtgtactggaacgcgtaccaccactcggtggggtacacggtgatcgtgctgggcgtcgtcaacgtcttcaagggcatggccatcctggacgtggagcggaggtggaggacgggctacgtcgccgccgtctccgtgctggccgccgtcgccgtggcgctggaggccgtcacgtggggcgtcgtgctgcggcgccggaagcaggaggaaaagacctccaacgccggccgcttgccgctgtctatgtaatatatatatatatacctcatcgtcgtcgtcgtcgggggcgtctcactatatatctatctgatctgatctgatcttcagagtagtaggccttacgatgggttgggttagctagctagtgtgtgtatcttcattgtatggtaggtgtctctgtgtgtgtgtgtatactgcacgttcgtatactggagatgagtgagtgtgataccggccggcggcattggtctttggctgttgcctttttgtttctgttcgttcgtgaatgctgatctgatcatgcacttgcgttctgggat

SEQ ID NO: 35421 - DNA, 1778 bp, Zea mays
  Clone ID: UC-ZMROB73024G06_FLI
agagactgtaccggggcaggggcggcgcagaaacagagccacacaccgacacaccccacctacgctacgcgcgtgctgggcgagtgatggacctcgccctcctggagaaggccctgctggggctgttcgctgcggcggtgctggccatcgccgtggcgaagctgacgggcaggcggtaccgccttccaccgggcccccggggcgcccccgtggtggggaactggctgcaggtgggggacgacctgaaccaccgcaacctgatggcgctggcgcggcggttcggcgacatattcctgctgcgcatgggcgtgcgcaacctggtggtggtgtcgaccccggagctggcgaaggaggtgctgcacacgcagggcgtggagttcgggtcgcgcacccgcaacgtggtgttcgacatcttcacgggggaggggcaggacatggtgttcacggtgtacggcgagcactggcgcaagatgcggcgcatcatgaccgtgcccttcttcacgggcaaggtggtggcgcggaaccgcgccgggtgggaggaggaggcccgcctggtggtggaggacgtggcgcgggaccccgccgccgccgccgcgggcgtcgtcctccgccgccgcctccagcggatgatgtacaacgacatgttccgcatcatgttcgaccgccgcttcgacagcgacgacgacccgctgttcaacaagctcaaggcgctcaacgcggagcgcagccgcctgtcgcagagcttcgactacaactacggcgacttcatccccgtgctccgacccttcctccgcgggtacctcaaccgctgccacgacctcaagacccgccgcatgaaggtcttcgaggatagcttcgtccaggagcgcaagaaggtgatggctgagacgggtgagatccggtgcgccatggaccacatcctcgaggcggagaggaagggcgagatcaaccacgacaacgtcctctacatcgtcgagaacatcaacgtcgcagcgatcgagacgacgctgtggtcgatcgagtggggcatcgcggagctggtgaaccacccggccatccagtccaagctccgggaggagctgggctcggtcctgggcggcgccggcgtgcccgtgacggagccggacctcgagcgcctcccctacctccaggccgtcgtcaaggagacgctgcgcctgcgcatggccatcccgctgctggtcccgcacatgaacctcaacgacggcaagctcgccggctacgacatccccgccgagtccaagatcctcgtcaacgcctggttcctcgccaacgaccccaagaggtgggtgcgccccgacgagttccgccccgagcgcttcctggaggaggacaagtccgtggaggcccacggcaacgacttccgcttcgtcccgttcggggtcggccgccggagctgccccgggatcatcctcgcgctgcccatcatcggcatcaccctcgccagcctcgtgcagaacttccagctgctgccgccgcccggcctcgacaagatcgataccacggagaagcctggccagttcagcaaccagatcgccaagcacgccaccatcgtctgcaagcccctcaaggcctagaaatcacctgcacgcgcctcccgccacatcaagcactattgtaattttgtgcgtcttctctgttatgtgttgtgtccttgaaaacttctccaaaagttatagtgtcataaacttcaatttaatcaactctgttgcacaaggctttgtttccggattgtgaatttagccaaggcccagacgatt

SEQ ID NO: 35422 - DNA, 1601 bp, Zea mays
  Clone ID: UC-ZMROB73024H12_FLI
catctctagccgagacatttgacttggacaatctgctcatctaccactccggcactcccacgccgggccgcgcggatcgcatcgagtttgagtggagtaggcggcgggcagcgaatcagcgatgaaggtgcagtgcgacgtgtgcgcggccgaggcggcctccgtcttctgctgtgccgacgaggccgcgctgtgcgacgcgtgcgacgaccgcgtccaccgcgccaacaagctcgcggggaagcaccgccgcttctccctcctccacccctgttcgtcctctgcgcagaagccgccgctctgcgacatctgccaggagcggagaggcttcttgttctgcaaggaggacagggcgatcctgtgccgggagtgcgacgcgccggtgcacagcgcgaacgacatgacgaggcggcacagccggttcctgctcaccggcgtgcgcctctcgtcggcgccggtggactctgctgacccatcagaaggggaggaggaggaggagcaggagaacagcagcaggcccggcaacggtgagtcctgcagcggcggcgccggcgctaccacggcgaccgctagcgacgggagcagcatctccgagtacctgaccaagaccctgcccgggtggcacgtcgaggatttcctcgttgacgacgcgtacgccagcgacgtcggcgcctgctcatcagacgggctttatcaggtcagttcagttcttccatgcgaatggaactgcaagctttcactgaggcgttcctgagaacgccaagaacattattaaacttgtgcattgcgccgccatttgcacacagagccacagcggccaatgcgccataccggtctcgccgccggcgccggccatctatcgcgtcgccattaatcacggggcaggctgttgccatgctcacacctgcaaggccgagttgctggaccagtctgtcaggataatatctcgtggagaccacctagatacgatacgatacgatctgatgcaagcgaacatcatgtgctaaaccaataaaacaatggaaaaggcaaaaattcattaatttcatgtgtggaaccatggtctcacttggcgtgtggtcatttaacttgcatttttagcagggacaacaagatggacagatcagcggggtgctgcaagaagcttacatgccgtggacggggcgggagctggtgcccgctgacgtcgcagacgagcgggccaactgggagcggtgggtgccgcagatgcacgcggagttcgccggcgacagcaagcggcccagagcgtcgccttcgcctccctgttcgtactggtgaaaagctcgccgttacccgttattagtagagttgatttactgggtaccgtaggaacgaagagaaatatgagccaaaaaaaatcatggaacggaccggtgtttctctgttggattattattgggtccatttcgatcgagctgctttaaggtgacgtttggttcataaaatgtaacgtaaataacaataataacgattgaccctcgagtgacagcggtaataagtttaaataggccgataccagtttttaatatgagatccgattacggttggaattaaacaaatatgatttaacgttatcagtt

SEQ ID NO: 35423 - DNA, 895 bp, Zea mays
  Clone ID: UC-ZMROB73028A10_FLI
ctcgcctcgggtcaaaccctaagcagggagttgatttatccgctgcagccatgagtaagttgcagtctgagtctgtcaaggatgccatctcccagattgttggggatgccaaggagaagaataggaagttcactgagactgtggaacttcagattggtctgaagaattatgatccacagaaggacaagcgtttcagtggctctgttaagttgccccatatccctcgtcccaagatgaaggtgtgcatgcttggtgatgcccagcatgttgaggaggccgagaagatgggacttgactacatggatgttgaggctctcaagaaaatgaacaagaacaagaagcttgttaagaggcttgccaagaagtaccatgctttcttggcatcagaggccatcatcaagcagattccccgtctccttggtcctggtctcaacaaggcaggcaagttcccgaccctggttactcaccaggaatccctcgagtccaaggtgaacgagactaaggcaaccgtcaagttccagctcaagaaggttctttgcatgggtgttgccgttggcaacttggcgatggaggagaagcagatccagcagaacatccagatgagcgtcaacttccttgtttcccttctgaagaagaactggcagaatgtgagatgcctctacgtcaagagcaccatggggaagccatacagggtgttctaagtatgctcttttgtgaagtctgctaggttctggcaccgaggttttattgaattaaacttttgttaagagtatgtttttggacgatcctatatttcgtcctggcgctactatgtttcagaatggtggtactactataagtatcctggcgctttaagtattgcttgaaaggatcaatataatttgcgtgtcatacc

SEQ ID NO: 35424 - DNA, 1554 bp, Zea mays
  Clone ID: UC-ZMROB73028B01_FLI
tcgaaaaaaaagaataagaagaaaggaatccctcctacgcggaagcgaagagattcgtcgcctcagccgcctctctgctcagatctgcggcggagcctcgccggcggcctgcgccccgcggcgccgccgatccaagatgccttcgtgcgtgcagggatgctgctgctgctcgtccctgcgccttctcccccgcgacgacgcgctctcgtccccctccgcctgcgcgcaccgcctgaagccttggtcttggcgtgcccaatcccccacctcgtcctcctaacgcttgtccccgcccgctccccaccctgatctacctgtctctacccttccctcctccatttctacatctccccgttgctgctctgctcctgctgccacaagagtattcgccttcaatcgttgctcgcgcctgtcatttcgtgccgcacgccgacttgtttgccgttttcgctgccgtcttctgttggatcggatttgtctggatcgattccaaggtcggatctacgctgctgcgggtcagcatcagtagcgcagcgtggttgtacgtttgcggtgttgctgtatcactctgcgtctctgcaagtgctaaaccagtcactttatggacggtggttcctgtggtctcgagggagcgtcggtagtgacatctactaccagcactggtattccgcttctgccagagaagcactgcgccttgtttgatgaagcttgtggagccatggcgggcagtaatggtcctgaaggagtgccagtagtgacttctgctgatgaccctccgacccgtgccgatattccatttgtctgcaattcagttgatgaaacctgtgaagccacagggggcggcagtgctcccttggagggtcagatatgtacgggtttctccaagttgatcagcttggaggtgaagaaaggcctccagaagtgtgcgacgttcccaccctcatctggtcagcctcagcaggaggattgttcatgctgccatgtaggtgacgagctcacgtgtgctcctgcctatgggcgatctgtgtccttacctccaactttgaagctggtctctgccatgaaaggaggtcgtgaaaagaacggagtggcatcatcaccaagtgaaaaccgccatgtcaagtgggctcctgatgtgtacgacccccctgtgacatcggtatgccattcagtgaccaacagctatcagcgccggtcaaagcaccgcaagaaggagaagaacaaacagaagaagaggcagaaggggaagtcgaagaagaaccaacaacagagttctgcccagaatccatctgcaccgcaggttcctggtatcgggccgaaaggcgttagcaccactggtggccagtctccagcagacgatctcagcgaacatgaggccgggatcatggactacagcatgggtagccaggaagccaactgtggaagcagcttcttgcgcgagtctgttgctaagatgcacttctcgaccgccgaagcttcctgagaggcgtgcctcagttctgtaaatatgatggacgggatgtgtataaataaacccagcatgctgtttttttt

SEQ ID NO: 35425 - DNA, 1226 bp, Zea mays
  Clone ID: UC-ZMROB73028B02_FLI
gccagtaataagatgatcatttttttttttgcaaaaattgaaacgtgggagttaattacaaatcacacgcagagttatataggtcactggcagtggcaggcacacacacacacatactgacatgagctccagcaggcaccgtggggtgtgtgatggcgaagcctcacaaactatacaagttggcatgcacgtatgtacacaaatacgcttgtcgtctcatgctctacgctatagtagctcacaccggatatgatatgacacagaaagcgagagactttcacgcacgtatggcactggactggcaagaacagggaccggccggcggcattaacaagcagcagcaaactggaggcatgggaatcgatcatatccttccttctccgcgtacgaacgtgtgaagcaatcaaatggcggaaccgcggaatctagtagctacgtacgataccggccgtcggagctgcgcgcggtcatcaggccgggttcaggcggaggcgtgcgcgacggcgcggtccatggccatgtcgaggtggcggagggagagggaggagggcagggagaaggcgttcaccatgccagccatggccgcggcggcggcgcccgccttgctgttgtggccgtcccagccgatgtgccccacgtgctgcacgtccgtggggtacccgatcaccatctcccgctcctcctcctcgtcgtcctcatcttcgccgccgtcctcccccgcgaacatctgcgacaggctccggatccccttcatcagcctcgacaccccggccgccacgagacccggcgccgtagccgtcgccgccgccgccgacgacgccacggccttctccttcgtcatggcctcgccggcgccttcttccgatgaacctgctcctgcccgagccaccgtggcggcggcagtggaggacgggtccccctgcgccttcttgtcgccggggtcggcgacggacacggcggactgcgacatgcagcccatggagaaggggaagacggcgaagcgctcgccgccgccgacggaggagctgccacggcggtccttcatgtacgaccgaccggatgggatgggatggtcacgggcgctgggcacggcagtccggcggcgtctctcctcgcctctcgtatcccctcgtagctagtagggagtagcttatatggctgctgctgggaggtgcggctggacagatggatggttgggcctcccttcccgtccggtccgggctttg

SEQ ID NO: 35426 - DNA, 1450 bp, Zea mays
  Clone ID: UC-ZMROB73028D04_FLI
tgtaaacattcaacactcaagagccaagagggagagacgatgaaggttgatgtggtggggacgacgcttgtggcgccgagcgaggacacgccgcacccggagctgtggctgtcgaacctggacctggcagtccccaagacgcacacgccgctcgtgtactactacccggcgccggcggccggaggcgacaccgacggagaagcggccttcttcgcgccggagcggctcgaggcggcgctggccaaggcgctggtgccgttctacccgctggcggggaggctgggcgtgggcgagggcgggcgcctgcagatcgactgcaccggcgagggcgcgctcttcgtcgtcgccagggccgacttcgccggcgaggacgtgttcagtgactacgagccgtcgccggaggtcaggcggctgttcgtgccgttcgcggcgtccggagacccgccctgcgtcatgtccatgttccaggtgacgttcctcaagtgcggcggcgtggtgctgggcacgggcatccaccacgtgaccatggacggcatgggcgcgttccacttcatccagacctggaccggcgtggcgcggggcctcgacacggccgaggcgtgcggcccgctgccgttccacgaccggacgctcctccgcgcgcgctctccgccggccccggccttcgaccacccggtctactcgccggctctgctcaacggcgtgccccggcccttcgtcacccgcgtctacgccgtctccccgaagcttctcgctggcatcaagtcccgctgcgcgccgggcgtgtccacctactgcgccgtcaccgcgcacctctggcgttgcatgtgcgtcgcgcgcgggctcgccccgggctcggacacgcggctccgcgtgccggccaacgtccgccaccgcctgcgcccgccgctcccgcggagctacttcggcaacgccatcgtgcgcgacctcgtgaccacccgggtggaggacgtcctggaacgcccgctcgggttcgtggcgcaggcgatcaaggacgcggtggaccgcgtcaatgacgcctacgtgcgctccgtggtcgactacctggaggtggagtcggagaagggcagccaggcggcgcgcgggcagctcatgccggagtccgacctgtgggtggtcagctggctcgggatgcccatgtacgacgccgacttcgggtggggcacgccgcggttcgtcgcgccggcgcagatgttcggcagcggcacggcctacgtcacgcagcgcgccaacagggacgacggcctcgccgtgctcttcgggctggagcccgagtatctgcagtgcttcgaaaaggtgttctatggagagtgagtcgtgagattactagtgtcatccgcgtttcgtcgtgagcaccgagtgcgattactgtagcttggaacctgatgctgtggatgtgggctttgcaaattactccggtttctgtgtt

SEQ ID NO: 35427 - DNA, 3091 bp, Zea mays
  Clone ID: UC-ZMROB73028D05_FLI
ggcggcgtgtgtattattcaaaatatccccgtcctcccgttccgtccccaaaaccctagggcgccgccgcctctggagcaagctcagggcaaagaccaagatgaaatcgatcctggtttacaccacctgaacaccgcccctcatacttgtcgacggtctacctgatggcagcaggttccggcggtggaggttttctgggcgacgtcaacgacccatggctgaagccgcggctgctccgcgcggtggtcaccgggcgccttccgcagcctggcgccgccgccgagctctcgccgacggaggtcgcctccatcctcgaggtggtacgcactcacggcctactcacggaggatctcccgggccgcggcgcgctggtgaacccgaagctcgccgaggcgtggcgcgccgccgtggacgcctgggttgagcgtgtcgtggcgctggtggagagcgactcgacatacagttgttggttgggtacttgctttctcggtgtgactttccaagagtgcagaaatgatcgatttgcagaatcacactccatttggtttgagaagattctgagtaatttgcagcaatcgtctagctttcaacttgttattgttatttcctgtacttccatgtctgatttatttgtaagattggctaagttttcgaacttaaagaaagagggatcatcctttgctggaagggttgttgaaccagtgctgcggcttttaaatcaaaatggtctagtagctgacgaagcaattgatttgctgaggacagttattaaattgtacccatcctctgtaaaccggcactacaataaagttgaatctgctattgcagcaaagattatgagcaatgtaaaaccatctgagaaatttgcgagaaccttagcattgttaccttctgtccgagtgtccgaggacagttggtcactgatgattcggaggatactgattgtggtaaacaatcttttgaatgatgctttcattgggcttgaagaagaaaagaaaggccatgatattatgctgctgctagttccacctggaactgatcctctaccaacattgggagatgaagtaatgcctggaggcaatgtgcatatcatgaagaaatttcgtgtctttactgttcctaccatttcagctcttacgctttgctgcagcgtgatgctgactagttattatccagttcaggttttgtcaaaatcagaacatttctgtatatcacctaatgctcataacttactagtgtaagctttgatgcgaagagtgctgttagttgatggatcattgcataacaagctgttcccttctacaacttcattgcatcaagagcttatttgttttgatcttccatcgttacattcaactttcttggatttgctgaatgcaactattaaaggcatgcgaagccaactcttacctcatggtgctagtatcatacggcttataacagagtacttcaaaatagcaaagctgcctactttgaggacaaaaacttatagcattttgcagctgttgctgacctccatgggtgttgggacgtctctgcacctgcttgaggcaacagtccgcaatgcagttgctgatctgaatgatgatggtgaaattaacatgactatgatcaacacaaattcatcgcaattgaccaatgaatcatcatcaaaagtttattcgaagaagaggaagcaagaaccacagatgcaaaactcaaccatctcaggttcagagaaagtagcaatcagcccaaggaaaagaaaaggttcttccataccaattacatcaaagggagtggcccctgaaagtacaggagatgttacactatcaactccacattctgtcaaaatagctgcgcttgaaacattggaagttcttctgaatgtgggaggttcattgcggatggatcgctggaggtcagaagtggacattctcttaattaacgtggctagaagtgcttgcggcatgggagggagttatgagcaaaagccatccacatttggggagccaaacatatcggacttccaacttgcttcgcttaagggcctgctggcatcttttctttcttctcatgcccgtcctccttatttagccaacggaattgaactcttcagaaaagggaagctagagataggcactaaggttgcagagttttgttcacatgctttgcttgctttggatgtccttgtccaccctcgagccctttctctggaaagaacagttcctgcaagctctgggttcaactacactgcacagaaaaaaacagtttttggtgctggtacacaccagatctcaccatttggggaccagcctcaagcaatggaggtcgaagacatgtacgatgactggctaatatccaacaacaatgaaccaccagaggttccagtgaacggtagtgatgctgtggtaagtaaaggtgtgctggtggaggatggaaagcagctcaatcccatagcagaagatccaaaagtcgacccacccagaatcacagacgcagcacaagatgcaccagcatccaccaagactgatgtcaaggtggtcgatgcagctgcagccacagctgccaagccaaacacagcggagaatccttcgagttccaatgctgtcccctctccagtgcgcacaacagattctgattcacgtaagcatgcgtcatttcccgagcaggatagtcctcatgagaacaaaagcgcagccgtccatccaggtgaagcttctgcgactccaggtgttggttcaagccaccaccgccatgaagcacctgaggcccgttcagccagcttcacggaattgtttggttctgagtctggcatcgaatcagagtccgaagacttgatgccagatatcgtcgacggggaccctgactctgactaggtttgccgtcgtcatttgtgacatggcaatggaaattttgtgatgttcctgttttgttttgagcaaattgtacgacattgccggctgacagatgatgcagtatttgattgatagatatagatggagctaaattttgtgatgttcctgttttgttttaccaccaaaaatttgctcaatctgattggatttagaggcacgccggtgaatagaataaagtgcaaacaaagtatttc

SEQ ID NO: 35428 - DNA, 1067 bp, Zea mays
  Clone ID: UC-ZMROB73028D07_FLI
gacgacaaggaggctgtcgtcgacgacctggaggcgttccgggaggccaaggactactacaccaaggtcggcaaggcgtggaagcgagggtacctgctctatggtcccccgggcaccggcaagtccaccatgatcgcggccatggctaacttgctcgactacgacgtctacgacctcgaactcacggcggtcaacaacaacaccgacctgcggaagctattcatcgagaccaccgggaaatccatcatcgtcgtcgaggacatcgactgctccgtcgacctcaccggcaagcgcaaggacaagaagcaggcggacaaaaaatccgaacgcgaggccgacgacaagcccaagctgccgatggagcctgaaaaggacgaaggcagcaagattacgctttcagggatgctcaacttcatcgacggcctgtggtcggcatgcggcggcgagcgcatcatcatcttcaccaccaaccataaggacaagctggaaccggcgctgatacggcgaggcaggatggacaggcacatcgagatgtcctactgccgcttcccggccttcaaggtgctcgccaagaactacctggacgtcgaggagcacgagctattcgaccagatagggcagctgctcgaggagaccgacatgtcgccggcagatgtggcagagaacctgatgtccatgtccaagaagaagaagagggacgccaacgcgtgcttggagagtcttgtgaaggctctgaagcaggccaaggaggaggcggccaaggcgaaggtggaagcagaggcaaagaagaaggtagaggcggcggccgaggcagcaaagtccaaagaggaagacgaggcaaaggaaggcagcggataagacgaagcaggcgacaaaacttcagaatcgatgagcaacgtacgaacacacatcaaaagagatgacgacaagtctaggctcgtgattctaataggagtcatcattaaaaaaaggcttaaattgtagaatcgttgaaattagggaacaatgtacactgtctctggaaatttgttgcaactcttccacttgcctatagattggtaatggct

SEQ ID NO: 35429 - DNA, 1846 bp, Zea mays
  Clone ID: UC-ZMROB73028D08_FLI
gcaattccccggccccttcgcaccgtttccctctgcgctcccaccccccgccccccgaaatcaccgccgcgccccgcgtctcgcccacgctcacaaggaaaggaggggaggagaccggggcccagacgccaacgcgcggacccctcgagtagggcgaggtccgggctccgctcccggtttccggggagagtgcggaggacccccatcgtgcgcgccattgaactctgctcccggctgctcgccggggagagggcggaggacccgatcgtgccgtctcaacccgctccgcacccgcgcggccgcgggcgtggtgctcccgcgccttccgggcgcctcctgcttctccgtgcgccctcggctccatggaggccggctactgcaaccgcaagaagaccgacggcatctgcgagtcagtctgcgacagcgagtttggctcgaagtcagtcctgagcatgtcaaggctgaagtgcgcactgcggggatttgatctgagggttctcttgatcctactgattggtgtgccaattttgatctttgccatatatgtgcatggccagaaggtgacttacttcctccgaccaatctgggagaagcccccaaagcccttcacaatactccctcactattaccatgaaaatgtctcgatgggtaacctatgcaagttgcatggatggaaagtcagggagactccacgccgtgtctttgatgccgtgctcttcagcaatgagcttgacatccttgatatccgctggcacgagcttagcccgtatgtgtcagaatttgtgctgcttgagtccaattcaacttttaccggcataaagaaggaccttcacttcaaggaaaaccgccaacggtttggctttgcagagtcacggttgacctatggcatgataggtggaaggtttgtgaagggagagaacccatttgtcgaggagtcgtatcaaagggttgctctcgaccagctcattaagattgcgggcatcacggatgacgacctgctgatcatgtctgatgttgatgagatcccaagtggacacaccatcgacctcttgagatggtgcgatgacgttccggagatactccatctccagctcaggaactacctctactcgttccaattcctacttgacgacaagagctggagggcttcagtgcacagatacagagctgggaagacgaggtatgcacatttccggcagacggacgacctcctggctgattcagggtggcactgcagcttctgcttccgctacataaacgacttcatcttcaagatgaaagcctacagccacgtcgaccggatcagattcaagtacttcctgaacccgaagaggattcagcatgtgatttgcgaaggggctgaccttttcgacatgcttcccgaagagtacacgttccaagagatcatcgccaagctggggcctatcccgagtacattctccgccgttcatctccctgcctatctgctggagcaattcgatcggtacaggtaccttctcccaggcaactgcgttagagagagtggctaggcagctggctgcccgccgtctgcatcatgaccctgaggcgcacggacgtcgctctctcgcggatgtctgtcttatggcggcgggggttgtgtccgatacgattggctgacttagttgagtgatcgcttggctgctggttgagttcatatgggatttttgtgtaccgtgtaacagaaaccatggaaggcctgacggctgcgtagcgcagcgcgtgcttgatcgctgctgcgttcttgtttggcagaggagagctgagagctttttgttcgttgcttccatgattgatatatgatgaactcagaacctgttgtagattt

SEQ ID NO: 35430 - DNA, 1196 bp, Zea mays
  Clone ID: UC-ZMROB73028E03_FLI
gagatgtttctgttaaaaactcacatctgaaagataatacagacttgaaacctctgaagcagccagcagtacttccagcggcgtcattgaaggagagggaagctgcttatcgagctgctcgtgaacgaatcttctctggggatggtgccaagggaaatgatagatcatatgtgaaatgtagacaggttcctgtcgttgcaaaacggatgattgcccatgcactcggtcaaaaggttcaaaataccacagagacagccgcctccaaagaaagcaaagggaaacaactgtcgaatgggaaaactattccgacacatagcaggaacaacttctgcccagttacaccagataacatagaagcagttctaatggggatgccaagctcagctggtagtaactcgtatcaaactccaccaagccaaaggtgccacgcaactaatactagagctgttactgctgaaagcttgaagaaagagcagactggagcagctaagagaatgtttgcgcatgcactggggctgtctgcagctcgaggaagttgtggtacgctgcccaaaccgaagtaaagatctggagtcgagaacgcggataagtgaagaaggttggctgttgccgatgcaaggtccgactgagcttcatgtcctatcatatgtgagccatgggaatggaatgagcctgcaatggttggtgccatctactgatctacctctgcgaaacacgttttttgtgatgtgctagtagatgaaagggtttgttggttggatgttaattgttgggacccagagaggatctggtagccctggttcgaaacgcaacctcagtcggtgagagagcttgctggaatgctggatacgcatggacatggcatgccaagccaagtggatgttcttcaccagagtggaagcaaaatgatccttcacatgctctaggttgctgcaatgctgcatatgtttactctagcatgttgttaggctgtctccagcaaaacttgtatacaggcgtttaaaacactttttatactgtagacatgaggctttccatgcttacgtaagcatgaggcttttaataagtgttaattagagctccagcctcacgaattttgtagctgtctgtctctagctatagaaacttaagctgcgggtaggttgaaggcatttaattgatcctttctttttcttattttggattggattaatttt

SEQ ID NO: 35431 - DNA, 1537 bp, Zea mays
  Clone ID: UC-ZMROB73028F06_FLI
tccttctttctcgtgaacagagcagggcaggctcaccagccagcacgcgcggccacgccacacccgcggagacgcggcacgcctccactcctcggccctcccccgactccgaggcgagcacgccgcacgctccgcctcgcagtcgcggccccgtgctctcttccttcttctccgtccaccgtcttctccttcttcgctcggagggttcgatctggtaactctggtgagaagtgaagacttagcacagtctgtgctcgtcaagtgccctggcactctggcaggatgcggtggctcggtctttcggtggcactctggtagttgtgtccatgggggacaaggttaatccctggtgccactgccattggcataatcctgcatggaaatccgacactgaaagttgtgccggcgatctccacccacctgacgctgggcatcttaccgccgattcggtcgcgttggctccaattttggaattccctccaccgtacccctcacgcaagagacctctcgttttgtaccagaaggagaagcgtgctcctgtactcccagctcctttgccgagcaagggcccgccgccgttagatcccgtgccggagctccaaggtagcaacgagactgacgtgactgatgctggagcaggagaagaaaccgaggagggtatgcacgagaacagggacgagatcaacgcgctcctggacaccgacaggcagtctggtggcgcagccttgagcgtggagtcggtggccagcgctggcgctggcgctggcgctgcgccgccgccggcagccaagaagagaaggctcagctcctgcaccgacaagtccgtcgttgacacggccagttcagcagcaaggcctcctgagcgttccatggagcaggagcagagggttgaacttgcgaacgaccgcgacgcgcagtcgtgctgcgttggggaggtggaaagcgggcgcaggtttgctctgggggaggcggaagcggaagcggcagagggcgacagccccgacgagcagaggcggaggagggagaggatccaggagactgttgccgcgctcaggaacatggtccccgggggcatcgcgaaagacgccgcggctgttctggacgaagcgatctgctacttgcagtacctgaagctgaaagtgaagacgctgggagctgtctccctctagctaagcctatctagccctctctcctcgtcgtggtggctttgttgtcgaaggccgaagccactggcttctggtgagaggagagctagcctatatcacccatctgttcagttcagtcccagaggagctcggatcttctcctacccgactcactgtcggtggctgcatcacccatcttcctcatcgtgggttggtatgcaaaagctagaaacatctttccgctgagcgtgatccaaagcgaagcccccattccatgcaaagcgctgggtcgtgccgtgcgtggggtggctcctgctttatatacgcgttgtgctcctgctttggctgatgtttgctttggtagttatatatagttctgtgtactacaaagt

SEQ ID NO: 35432 - DNA, 1931 bp, Zea mays
  Clone ID: UC-ZMROB73028F10_FLI
cggctagggtttcatcttcctttcccctcctctctttcatcgacgaccgctggccaccccctcgatctcttgacccggaggcgaggacgggggccagcagcggccgccagcgcctgcccgtcttgttatagggagcgttcgccatgtctgaaatggagtctgtcgcggctcttatggactcgacaagctccaagatacaacagcttcaggaggcattcgctgagcttgagagccagagcgctttctgcatgaacttcaagtggaagcagcttgaagaccactttcgtggtcttgaacaatccctcaagaaaaagtttgacgagctaaaagagcaggagaaggagttccaggagactgtcgcaaaatcagagcagatgctggagcagcgggaggcagctgttgtggccaaggaactgacctctttggagaggttgcaggagaagagggaagctgcattagctatgatctttagcaagtccaggctttccttacctgttccttccatcaacccaatgaacaaggcactggataatcttggtgtcaagtggcctaaaccggcttctgaggagagtgtgcacttgcaagttgataatgctgcagtgaggcctcgttctgagcttgttgcactctgtgaggaaatgaatgtgaacgggcttcataagttcatatccgacaacaggaagaacttggcagccatccgcgaggaaattcctagtgcactgaagaaaacatctcatccttatggcctggtgttggattccctggaagacttttattctggagataatcttgtattagatggaaaaaaggatggtgaccttctgggtgttagaaggacatgtttgatgttgatggagtcacttggacaactgcactctaatgatataacttgttcttctttggagaggcacatgcttacaactaatatcatagagcgagcaaagacgattgcatttaagtggaagtccaagttagataatcttgacattgatgctagcaatgggaactgtcttgaagctcatgcgtttcttcaactcctggcaacctttggtatttctgctgaattcaatgaagatgacttgtgcaaattgcttccatatgtcagtcgtcgtcgtcagacacctgaactttgtcgattgcttgggttgtcgcagaaaatgccaggtgtcattgaagttctggtggaaagtggaagacctattgatgcaattaatttggcttatgtgtttgagcttactgaacaatttgaaccagtacaccttcttaaagcatatctaagggatgttaagaaaatgtcacacgccaggaatgtcaaaacttctcctggagcacagaatgagatgaatgaacgtgagttatctgcgctgaaatctgtcattaagtgcattgaagagcacaaacttgagcagcagtaccctgtggatccacttcagaaaagggttttgcagctagagaaagcaaaggcagacaagaggatggctgttgaagcagcaaagccgcagtccaagaggcctcgtgccaatggatcggcctttgcaacccgtgctacaggctttgctgacaagagcttctactcagcaaccccagagaggcatccattcaatccttgcgagaggcagtttgtgtatggcgctgaggttcatcttcctcccatgatgacctcagcgtcttacacgatgcaacctgcccatggaccttattacggtaatggctacccagttcagtaccaggtctcgtatatccactaatggagacagccaggtgcaggtgctctttcctaacaatctagcttaacctgctgctctttgctgtagtcgtatcagttactctgcaagtttccctagctggaaatatttggaccactcaatgtgtgtgctctgagtggctgttgtggtaattttatgccctaatgacatgacataaattactcc

SEQ ID NO: 35433 - DNA, 1808 bp, Zea mays
  Clone ID: UC-ZMROB73028G06_FLI
gtccggagcacgcccgcccggatataaatttatatcgcacacatcccccgttcgccaatctcgcggcggccctgcaaagctgcgatcaggaggtgcagaacagcggtgaagggtggaaaccgagaacactaggcagaggcactagccgagccgagccgcgccaccacgaccacgagtcgaccggcgagtggttggcgcaagttgtcaggggcgttgccggagccgtgcggcggccggcggccgggagcggggccgatggggcgctacgagctcgtccgcagcgacgacgcgcctgccgtcgccgcggatctggaggccggcaccgccgcgccgtgcgacggctaccccaagcgccgcgtgttcacgccctctccgtctccgtctccggcgccggcgtcgacccggtaccggcagcgcctcgtctcgctcgacgtgttccgcgggatcaccgtcctgctgatgatcatcgtggatgacgccggggcattcattccggcgatgaaccactccccctgggatggcgtaacggtggccgactttgtcatgcctttcttcctcttcatcgtcggagtcgccctggcgctcgcgtacaagagagttccggacaagttggacgcttcgagaaaggcattgctccgtgcgctgaagctgttttgtcttggtcttgttctacaaggtggattctttcatggtgttcgcagtctaagtttcggggttgatcttcaagaaatacggctgatgggtgtactgcagagaattgcaatagcttatttgctgaccgccctctgtgagatttggatcagaggagatgaagatgtagactatggatacgatttgctcaagcgataccgctaccaactgttcgtaggtgcagtcgtggcaatcacatacatgtccctgttgtacggtacctatgttcctgactgggagtaccagacatcagctcctggttccacagagaagcatctctttgtgaaatgtggagtaagaggtgacaccagcccaggctgcaatgcggttggcatgatcgaccgtaaaatcctgggcatccagcatctctacggccgacctgtttatgcacgatccaagcaatgcagcatcgactcgccacaaaatgggccccttccttctgatgcaccctcttggtgccaggccccttttgaccctgaagggcttcttagttccgtgatggccatcgtcacatgcttgattggactccaatacggacacgtcatagtgcattttcagaaacacagggagaggatgatgaactggctaatcccttccttcagcatgctggtcctagccttcgccatggacttctttggactacacatgaacaagccactgtacaccctgagctacaccttaggcaccgccggcgcggcggggctcctcttctccggaatctacacgctggtcgacatctacgggtaccggcggccgaccgtcgccatggaatggatggggatgcacgcgctgatgatatacgtcctgatcgcttgcaacgtcctgcccatattcatccacggcttctactggaaggagcccaagaacaacctgctgaagttcatcgggattggagcgtgaggcgatggactgacgacggtacacgagtacggatattgtttaggagtctatttggacagagatagagaagcgcgtgcgttcagcaggccaagttttgctacacggccagtgctgcagctgcagcgcatcattgttgctgcacagagcgcctttctctgtgagctcttgtatatatgataaaaaagagtgttgcatataatgacgacacgatttgaaag

SEQ ID NO: 35434 - DNA, 1275 bp, Zea mays
  Clone ID: UC-ZMROB73028H01_FLI
ccgccaagcccttcttctccccccgcccggcggcccggatccccgccccttctcctcaccctcctcccccgcccgccggccgccgcctgccgaacacggcggccgctctcgcagccgcagcccgccggttccggtggccgtcggcggccgcgtcggcgcgggggctgtgcgcgccgccgcattccggcggcgaggggatgggatctgatgcgggggcgggggccaggaagaggcgggactcggccgtgaacgggctcgccaaggacgtgccgccggtgaacgggatgatgatgcccaaggaggagcccgcgaccgcgccgcccaggttgctcacgctgcccaccgtgctcaccattggccgcgtcgctgctgtgccgcttctgatcagcactttctacatggagggtccatgggcagctacggccacaacaggcatcttccttgctgctgcagtcactgattggctagatggttatatcgctagaaagatgcagctaggaacaccttttggtgcatttcttgatcctgtggctgacaagcttatggtagccgcgacattagttttactatgcaccaaacctttggaaacatcactgctcaatgatgggccatggcttctaacagtcccttccattgctatcattgggagagagattacaatgtcagctgtgagagaatgggccgcatctcagaatagtgaagctcttgaggctgttgcagttaacaacttagggaagtggaagacagcaacgcagatgacagcattgactctgcttctcgccagcagagacccaagtgtacctgcgcaaggtgctctagttgcccccggtgttgctctactttacatttccgctggactcgccatatggtccctagtggtgtacatgagaaagatatggcggacacttctaaaatagtattagcacaatatatatagtgtagtagaagaaacagaagcaaggcgaggttctattcgtgatcgtacgatttttggaaggctgcttagttgattggtggactgggacctatctagagctgcttgtgatcctcattcctcagtaacttgtgcgtcatctatttttgccgccaaatttgctgaagtatgccaggattctagacatgatgtgaccctgcgtgcttaaggagatataagtctgcaatgcagaagattgtaacccaatacaaacacaaaacccagaggtttgtgcatgtggagttctatcattgtaatctgcacataatatcatatgccaggagcatgcaattattcttttc

SEQ ID NO: 35435 - DNA, 634 bp, Zea mays
  Clone ID: UC-ZMROB73028H02_FLI
cgccgcctccgtctgatgatgacgaggatgaggatgaacatgaagaggccgtggcagcggcgaagcgtcggagggacggttataacggatcaaaatcttacagggaagcagatgatcaactattgcttcagttggaagagaaagatgtcatctcatctgctgctactatcttgtctgatctctgtggacctcaggaatggatttctataaacaagcttcatgaagtgatgtttgataagtacggcggtatgtggcaccacagcagggtgcgaaaatacctgacatccgaagactttgcggaggctgaaactgacggcaggctatggcatggacttgcgttgctgctgagaaagtaccctgagcatttcgtgatcaacattaggaaaggtgggggcttgatcactgagttcgtctctttggtctcgctacagtcttgagaatttctcaaaacacactgcagcaaggcggtggtgttgtatagctccgagtattcttttgctaccttttgtaaaaaaaagagttagggtaaaagggatttgtgcttaagtatttggctattagccaagttataagagtgaggctatacaacagtggtatcttattaatcttgagaagcttttttattgttattttt

SEQ ID NO: 35436 - DNA, 795 bp, Zea mays
  Clone ID: UC-ZMROB73028H03_FLI
gggttattgacttctgcaaggagctttgattcttcaccaccctatcagaagaaaaggtcaaaaagaatggccatcatcaaatcagttgagaaacagctagatttttcagcagatggactggatacttctggttctgagattatgaactctccttgccataattcccaaggtgcaaattctaacaggatgtagcaactgatttgattgcaatctaattccacaatgtgcaggaattgatctcaatcttatgaagccatacaggacttagaatcccgtcctaactaaccagcctcatgcaaatgtcctggttcatgccaaaatccaaatcaaacaccttcagtggggacaagaccttaccgacagttaccctgtcatctcatgtaatcaggggtgtacaaaatactgtctaaattgaaagcacattccatagaagattacattgtttgctgcattttgtgaacttatagctagaagttcagattatagaaacccacagctgtgtacaaagaagaaaaacatagctttagaaacatatagagcttcccagtggaatgtcaaattgttcttagtttcttttattgcgcgcgtcccacatgttgcgaaacagcaagggtctgctcattttgtaacaataaagcctgatttgtgggctaaattcttgctaggcattgtcaagaaactggttatcacaggcttggcttcatggttggctgaatcttttgtgcttctattgttactagtttaatacccgtgtgttgctacggcatataatcatatttaatggccgcttaatcc

SEQ ID NO: 35437 - DNA, 1458 bp, Zea mays
  Clone ID: UC-ZMROB73028H04_FLI
gcccgcgccgccgtccgcggcgtctttgccagcgagcgccgcctctgcttccacatcttccacgaccttcctatctccaccaccaccatctccgccgcctcagcgtccgccacgcacgacatccctttcgccgaagccgtcaagggcgccgcgctgcagctcttcggcttcaccgaggccatcagcatcggtcgccgctcccctgagaagctcttcaagatcatagacctccacgacgcgctctcggacctcctccccgacgtctccgacatcttcgccgcctccaaggtcgcggagtccatatacgtgcaggccgttgagatccggtctcgcctcgccgatgccgtgagagggatactctcggagttcgagaacgccgtgctccgcgacccgcccaagaccgcggtgcctggcggtaccatccacccgctcactcggtatgtgatgaactatagcagcctcatttgcgactacaaggtcacgctctccgagctgatcatatcacgtccatcagctagcgctcgtctttctgctgagggcaatgagctcgcgccgtccttggccgacctcgagctccctgagcttgagaaccagttaccgcttgcctctcacattgtctggatcattgttgttcttgaacacaacctggagggcaaggcggcactctacaaggatccagctctctcgcatctgttcatgatgaacaatgttcactacattgtccacaaggttaaagattcgccagatctctggagcatgatcggtgataattacttgaaacggcttactaccaagttcacaatggcggccacaaactaccagcgcacctcatggttgaagatcttgaattgtttgcgtgatgaggggctccatgtaagtggtggcttttcgtcggggatatccaagtcggcactgcgggagcggttcaagtccttcaatgctgcatttgaggatgcgcatagggtgcagtcagggtggtgtgtgccagacaaccagctgagggaggagctcaggatctcaattgctgagaagctgctgccagcataccggtcattccttggcagatttcgacatcatatagagaacgggaagcatccagagctctacattaagttctccgttgaggaccttgagatagctgtgagcgatttctttgaaggtgttcctccttccccacataacaggaggaaatcacatggatgagggacttttacctcaggtattcaactggctgatgttgctatttattcttttattcttcacaaagaagctggttctggtatttgggctcgatttcttctgtcctgatagatgtgagtataaatttggtggtcttcaatcagagatggcaaatatgaatacattttgggatctttctgaagctgtcaatcggcccagtgatccctactctgtaagagaaggtgttcatttggtacactataattatataaattttgc

SEQ ID NO: 35438 - DNA, 1452 bp, Zea mays
  Clone ID: UC-ZMROB73028H05_FLI
ggcggacactgattctccgacggttccccgccgccacacatcctatagttctacgccgagccggtcccagagggggcacacttccgacgacgagagcgatggtctgagctacgccgattccgtgtttggtgagatcgagtcgaacatcagttttggtgatgagggtggggaatctgacacttctcttgatcgccacaccatggttgggagggaaattggcatacagcttgacaatgagagctacatgaacacagatacagatattgatcctatgaatgctggagtataccagtgggactcagacgatcctgaagacgatgaagatgaggagtcagaggagtctggtttggatgaaggagatgacaccatgcaggagcgccggcagcagtggcatgatatcgtcccgagtggattgaatgagcaggaatctgaaggtgctgcatggacttggagaacagttggaagccaagacataaacaggactgatctgagagtcgacatggaaggacgggaaatcaggagactttttattgggaaccccggagattatgttgatgcaagacagtttgaaatgcttctcgagcaattcgctgatgaggataacaattccagaagaggagctccacctgcagcggcatcttccatcgaaaatctttcgtctgtggtcatctccaaaggctatgagataaacggtggtgtaacctgtccagtctgcaaagatgacatgcctatcaccactgtagcaaaacagctaccatgcatgcatctctatcattcatcttgcatcttgccatggcttaattctaggaacacatgcccagtttgtcgttacgagcttcctacagatgactcggaatatgagaggtccaagcatgccgcggtcaatgaaggaggtatccatggggtggagcgtacccatccgcaggaagttgttgaagaaacttatgaacctgaggttgatggaggttccaatacaggcggtgatacaatgaatgagactaatacacatgaacagcatactgcacagcagccaaatggagcacatgggcgtcatagatggctgtttattgcagcagctccagttgtaagtcttgtcagtttagctctagttttgtgcttcaccaatcctgctggcaatgttaggaggcaattgtgccgtaggtcccagactaccactacggcacatgtagacacaagaagaagttggtggtctatgttctaagtaaccagtgtttacttgctgatgctgaatttctgtgtgatggcgtgtgcttgttgccacttgccagtgttgtgtcaattatgtatgaaaaggttctagataaatttgaagtgcaaactgtgtgtgccaaccaaggtgttcttgtaaccaagttcagacagttcagcaaaacaaatactgatgattgctgctgttcattgatattttatatgtttggttgctcaggttgt

SEQ ID NO: 35439 - DNA, 1407 bp, Zea mays
  Clone ID: UC-ZMROB73028H11_FLI
ccgcgcaaaaaacacagcaaggctccatgaacaagttggcatcctgcttcctccagcacggagcaccacacacccaaatcttcaagtcctaccatgttcagagatccccttcgctgcagttgcttgagaaccgatccgtttccatgacccggcaccgcgccgcggaccgtgctgccagaggcaccatcgtcgacgtcgccgtcgacagtggcaccagcttcgacttcgagagctacctgtcggccaaggccagggccgtgcacgacgcgcttgaccttaccctgcagggtctgcggtgccccgaggtcctgagcgagtccatgcgctactccgttctcgcgggcggcaagcgcctccgccccgtgctggccatcgccgcgtgcgagctcgtgggcgggaccgcggccgcggccgtcccggtggcgtgcgccgtcgagatgatccacaccgcgtcgctcatccacgacgacatgccgtgcatggacgacgacgcgctccgccgcggccgcccctccaaccacgtcgcgttcggcgagcccacggcgctgctcgccggcgacgcgctgctggcgctcgctttcgagcacgtcgcccgcggcagcgcgggcgccggcgtccccgcggaccgcgcgctccgcgccgtcgtggagctcgggagcgtagctggcgtcggcggcatcgccgcggggcaggtcgtcgacatggcgagcgagggagccccctccggctccgtgagcctgggcgcgctggagtacatccatgtgcacaagactgcgcggctcgtggaggccgcggccgtgtcgggcgccgtcgtcgggggcgggggcgacggcgaggtcgagcgcgtccgtcggtacgcgcacttcttagggctcctgggccaggtggtggacgacgttctggacgtgacgggcacgtcggagcagctcgggaagacggcgggcaaggacgttgccgccggcaaggccacgtacccacggctgatgggcttaaagggagcgcgcgcatacatgggcgagctcctggcgaaggccgaggcggagctcgacgggttggacgccgcgcgcacggcgccgctgcggcacctcgcgcggttcatggcgcacagacagcattgagatggggtggaagtggaactatggaagtggatctggccggctcatccggaacacttgataaaagtgatgcgttgactattagtttctcagacctcaacatcgagtgattactttgccccggcccaaaaggatttatgggcttccgagttgagtgacactgcagtttgccagtggcatgtggcaacctacctaatgggccgttcacgccttcacggacaagtagcctttataagtgcggttcttacttcagcttcccttactcctatcgttaaataaatctctattatat

SEQ ID NO: 35440 - DNA, 1624 bp, Zea mays
  Clone ID: UC-ZMROB73030A09_FLI
cgcctctcccttgacatggcggctgcgacggcggcaggggccgccgccacggccgccgccgtatccctaatcgcctgctacatcctcctccacaagagtagagccaaactctcgtggttccctacggttgggttctcccgcgcgagcggccggcgggtgcgacggaggggtctcgtggaggccatcggcaacacacctctcattcgcatcaacagcctctccgacgctacaggatgcgagattctggggaaggctgagttcctgaacccgggtggcagcgtgaaggaccgcgtggcggttaagatcatcgaggaggctctagaatctggagatctcgtatatggtggtactgtaacagaggggagtgctggaagcacagcaattagcttggctactgttgctcctgcctatggttgtaggtgtcatgttgtaatacccgatgatgctgccattgaaaagtctcaaataattgaggcgcttggagctactgttgaacgagtgcgccctgtttcaataactcacagagaccattttgtcaacattgccagaagaagggctttagaagcaaacaagttagcagctgcacagagagaatcaagcgagaaacaaactaatggtttaacacatgtcgattctgagatgctggatgacaaattagcggttatgcagagggaatcaaacaagatgcaaaatggtggtccagcacatgtcaatactgaattttcacactgtgggaaatgcgatgtgaattctgattcaaagggaggtttttttgctgaccagtttgagaatttggcaaactatcgagcacattatgaatgtactggtcctgagatttggaaacagactaaaggtaacctgcatgccttcgttgcagcagctggtactggcggtacaattgccggagtctcacgatatcttaaggttaccagaggggtgatgtacacaaaagaggaggccgaggggaagcggcttaagaacccttttgatactattactgaaggaataggaatcaatagggtcactaaaaatttcatgatggcggaactggatggagcctatcgaggatcagatagggaagctgttgagatgtcaaggttcttgctgaaaaacgatggactatttgttggcagttcttcagccatgaattgcgttggcgctgtaagagttgctcaagatttgggtccagggcatacaatcgtgacaattctttgtgacagtgggatgagacatttaagcaagttcttcaatgagcagtatttggctgatcatggattgacaccaacagctactggtctggaatttcttgataaatgagcatttcacagggacttttcaatttcaggaagttggcatcctccctgtgactgcgatgataccttgacacaagggtgaacgctgaataggtcaaagcatgaatatatgccatacaaatggtgaacctgatgtgttttaagtactaattgtagtctagtataggcattgccattggataggattgggatagccagtgttttgatccttgttttgatatatatctattgaggctcaggctgttaccagttagaatgctgcactgagcatctttgctgtaaacaactgcaacatatgcattttttttgtt

SEQ ID NO: 35441 - DNA, 1116 bp, Zea mays
  Clone ID: UC-ZMROB73030B03_FLI
caacctctcctgatctcctcctctggtccgcatagaggagcagcttgccagccaaggacaccggagcacgggcacgggcgcacggccagcgcgaacctcctcccctcccctcttcttccgtttccaacagcgaggcatagtggagaaggcgaggagcatggcgcgcaaactagagatcccccagtggaagcacgacggccttccgtcgccgacgagcccgctggaccgcgcgtcgccccgtgggtggcgccaccgcgacgccgtcggaggcgtcgggctcgggatcctggcggcgctggaggccgagggcccgctgcccggcgccggcgccgccgccgcgccgcgggtgtccatcccgcggcgcgcggcgcggctggaggtatcggagctcgcgtgcagcgggcggtgcgccaccagtctgtgcggcggcccggtgtccggccgggccggcggcggcggtggagcggcgttccgcgtggcggagttcctctcgtgctgcgacatgtgccgccgggcgctggacgggaaggacgtcttcatgtaccgcggggagcgcgccttctgcagcatggagtgccggtaccacgccatcgtgagcgacgagttccgggaggcggaggaggagaaggagcggaagcgccgcgcggcggccgccgacgtgcccaggaagtcggccgctgagatggtggccggctcgccgtgcagcggcggcgggcagatcttcttcaccaccggcatcgtcgtcgcatgatgggcgcgcggtgcggatccgtcgttccgtctagtctagtgacgaaacaaaaaaaaaatccagctggaggaaccggcggacgctgtaagataaacatgacaaaactaaaaaaaaaggaagcacgagaaataagggtgggtgtgtttgtgtagagaaatgggtgggtgggggaaactttgttcctcctctcctcctctttggtagaggaggcatcatgaggatggtgggcgggatgagatgttttgtagcatagtagcaggagggaaggagagggatgatggcaagttttccaaggattgttgcttcccttttgttttctcatctgtctgctctggcaaaaaggaataacattcttgttcaaatcc

SEQ ID NO: 35442 - DNA, 761 bp, Zea mays
  Clone ID: UC-ZMROB73030C10_FLI
caaatgatcaatgtccagaacaagaactcgtcctacttcgtggagtggatccccaacaatgtgaagtccagtgtttgtgatatcccgccgcgcggcctctccatggcctccaccttcattggcaattccacctccatccaggagatgttccgccgtgtgagcgagcagttcactgctatgttcaggaggaaagctttcttgcattggtacactggcgagggcatggatgagatggagttcaccgaagctgagagcaacatgaacgatctggtgtctgagtaccagcagtaccaggatgccactgccgatgaggaggagtacgaggacgaggaggaggtccatgacgagtaaggtgatcttggaccctgctgcatattgtaccgtctctggacctggctttctttcaagctggagcttaggtttggttgttgtattcgaacatgctatgatgggtatgatgtagtagtactttcgtgggtagcatgctgtatgctaccacttgccctctttcacctagctgcttgatttgctacttgtccgacctcttgtgtggctggacctcaatcccatcgctcttgccagaaccacatttgccgttgtgccatttagtgaatccttgtatgattgcctgccatcgtagttctttctccaggatctagatgcagctgatatttcctaatttgtacttgcgcgttcagtctacatgaaagaaaaatcatcaggtttgcgaaggcaaaaggtgccgacgcgcccacaccagc

SEQ ID NO: 35443 - DNA, 1381 bp, Zea mays
  Clone ID: UC-ZMROB73030E04_FLI
cttttgttggaattgcactgaggaagctcatcgaccagtgaactgtgagactgtttctaagtggatattaaaaaacagtgcagaatctgaaaacatgaactggatactggctaattctaagccctgtccaaagtgcaaacggccaatagagaaaaaccagggatgcatgcatatgacatgcacccctccttgtaaattcgaattttgctggttatgtctgggtgcatggtcagatcacggagagagaacaggtggcttttatgcttgcaatcgttatgaatcagcaaagaaagagggagtttacgacgagactgatgcaaggagggaaagagctaaaaactctcttgagagatatatgcattactatgagcgctgggcatccaatcagacatcgaggcagaaggcccaagcagatctgctaaaagcggaaaaggaccagattgcaaatttaactgacattttcgggataccagagacccagcttaagttcataatcgaagcttggtcacagattatagaatgcaggcgagtgttgaaatggacatatgcttatggctactatctggatgataagatcaagagtgaattttttgagtatctgcaaggtgaggctgagtctggtttggaacgcctgcatcagtgcgctgagaaagacttgcaaatttttttgccgtctgtgaaatctgacagcactgaaacaacgacacctacagtggctgaatttggtgaattccgcgtgaagcttgctggacttacaagcgtgactcggaattactttgagaaccttgttcaagctttggaagctgggttggaggatgtccgtgccacaggccaggctgctggtacatccagcactgccaccagctccaagaaaggaggaactaaatccaagaagaagcagcacactgcaccatcatctgaccacactgatgatgggtggccctgcgagcgctgcacatttcttaaccctcctacagtggatgcatgcagcgtctgcgaaaagagtaggtactagatgatggaatagctcaaagggagccagggaggcatcccaagaaaacctcaaagctcgtgagaagcatgcatgcatcggatgctgagaagaagagcttccagctgccgcaatgttgtacagagagttattttagggcctcggttggaaacggtgtggaggctcaagtggtcacatgtttgtgggggtcatttggttttctagttcttttctgttgttccttgtaaatatatttgttgtgatgtggtgacctgtgtttatgtgatgagtttttgtttctgacaaactgtgaaattaaactttaacaaaactgatgagaggtagctctgtttattccctcctaattgcgggcagggtctttgtctattc

SEQ ID NO: 35444 - DNA, 947 bp, Zea mays
  Clone ID: UC-ZMROB73030F06_FLI
caccccaggaccgtgaagaacaaccccgacggcaccatggatatcgacaagatcgttgccgccatcaggcatcctgatctccattacccgacgaccagattgatctgcttggagaacacacatgggaatactggtggaaagtgtttatctgtagaatacactgacaaggttggtgaaattgccaagagccatggcttgaagcttcatatcgatggagctcgcatcttcaatgcgtctgtggcacttggagttcctgtagatagactcgtgaaagctgctgattcagtttcggtatgcctatcgaaagggttaggcgcacccgtcggatcagtgattgttggttcgaaggccttcattgacaaggccagaattctccggaagaccctaggcggtggaatgagacaggtgggagttctttgtgctgctgctcatgttgccgttcgtgacactgtgggaaagcttgcggatgaccacaggaaggctaaagctttggcagagggactgaagaaaatcgagcagattacagtggattcagcttcggtcgagaccaatatggtattctttgaggtcatggatccaagaatatcacctgacaaactgtgtcaagtcttggaacaggacaacgtgcttgcactgccagccaattcaaaaagtattaggttcgtcatccattaccagatttcagacgctgatgttgggtacgcattggcatgtgtcgagaaagcaatcaaagagctactggaaggcagtactgagttggggcattcgataaacggagctaccaaaagctcgtatgggcactagatcactcggattctgccaacctgatgcatcgacacatggtacccagctgcttgttagctgctctgcttgtctgtgaccaacgcctagctgttgtagtctcgcctttcccgaataattgttgctgttcagtctctgtttggatc

SEQ ID NO: 35445 - DNA, 864 bp, Zea mays
  Clone ID: UC-ZMROB73030H03_FLI
cgcttcctccctcccccactactccactagtcggattgctccgattccacgcgggcacgcacgtggtgcccacgcacgccgcgcgctggggggccgccgtgtcgccctcctctccccgctacttgatgttactgatatatacgcacgcgacgcggccaccactttccccacccatccaccgagctgccctgctacacggtcccctgccaagatccatcttcccggttacgccgcctgatcgaagtgaacaagcaaggaagagccatggcgagcgagcacgcggcggggggcgaggctaagcatgaccagaagcagagcctgatggacaaggcgaaggggttcgtcgcggagaagatcgcgcacatccccaagcccgaggcgacgctggacggcgtgacgttcaagggcctgagccgggagtgcatcacgctgcacagcagcgtgaacgtgtccaacccctacgaccaccgcctccccatctgcgaggtgacctacacgctccggtgcgccggcaaggaggtggcgtccggcaccatgccggaccccggctggatcgccgccagcggctccaccgcgctggagatccccgccaaggtgccctacgacttcctcgtctccctcgtcagggacgtcggccgggactgggacatcgactacgagctccaggtcgggctcaccgtcgacctccccatcgtcggcaacttcaccatcccgctctccacctctggcgagttcaagctccccaccctcaaggacttgttctgatctagtagtagctcgcttgccttgtgttctgtgcgggcgcgcaccagcgatctgtacgacgagcttttgcaaataaacgacgcagctcctctgttctat

SEQ ID NO: 35446 - DNA, 736 bp, Zea mays
  Clone ID: UC-ZMROB73030H08_FLI
gccccttaaccctcgttcctctagccgtctcgcgcagccacagcctccatttctcctccgacggcggtgcggctagctcaaccatggcggactccaaggccacctcggcggtcaccctccgcactcgcaagttcatgaccaaccgcctgctggcccgcaaacaatttgtgcttgaggttatccaccccggccgcgccaacgtctccaaggcggagttgaaggagaggcttgccaagatgtacgaggtgaaggaccccaacaccatcttcgtcttcaagttccgcacccacttcggtggaggcaagtccactggcttcggcctcatctacgataacctcgagtctgccaagaagttcgagcccaaataccgcctcatcaggaatggtcttgctactaaggttgagaagtcccgcaagcaaatgaaagagcggaagaacagggccaagaagatccgtggtgtcaagaagaccaaggctggtgacgccaagaagaagtaaacagtcatttatatttctgtattactgtcctgaactctgggtggtcgtctagttgcaatgtcataattatggtcgtgttaggttttgttccgcactcagcagtaagtgaagttttgtaattcctggatgtgaacctacccggattggctgtagcatgttgtgagatgagaaggctattttgtcatgcagttgtgtcatttgcaagccaatccattttgtcatgcagttgtcatttgctc

SEQ ID NO: 35447 - DNA, 1421 bp, Zea mays
  Clone ID: UC-ZMROB73030H10_FLI
gccagctgccacttcgccgtgagtcaaccactgatccaactcgtcgcgccatggccgcctcgaacgctggccccgaggccgcagccactgccgccggccaccgtttcaacttcgacgtcatcgtcgtgggcgccggcatcatgggcagctgcacggcgcacgcggccgcgtcccgcggcgcgcgggtcctgcttctggagcgcttcgacctgctacaccacctcggctcctcgcacggcgagtcccgcaccatccgcgacgcctaccccaaggcgcagtacccgccgatggtccgcctcgcgcgccgcctctgggccgaggccgaggccgagtcgggctacagcgtgctaaccccggcgccgcagctctccttgggcccgcgcagcaacgcctctctgctcgccgccgtcaggagcgccggcgcggaggaggcagacctgacgcggagatggggcggggcgttccgggtccccgacgggtgggtggccgcggtgagcgagcgcggcggcggcgtcctgaacgcgaccaaggcggtggccatgttccaggcgctcgccgtcaggaagggcgtcgtggtcagggacaagacggaggtccttggagtcaggaaggcgctggaggagggaggtgtcgtggtgacgacgagcaccggcgccgagttccgcggcgccaagtgcgtggtgacggtaggcgcgtgggcgagcaagatggtcaggtccatcgccggcctggaactccccatccagccgctgcacacgatggtcctgtactggcgcatcaagcccggccacgagcgggagctcgcggcggaatccggtttcccgaccttctccagctacggcgacccgcacgtgtacagcacgccgtcgctggagctgccgggcctgattaagatcaactacgacggtggcccgccgtgcgaccccgacgctcgcgactgggccgacggtggcggtggcgtggcagagcgggtcgcccggtggatcgaggagttcctgcccgatcacgtggacaccgccggcgggccggtctcccgactgtcgtgcatgtactccatgacaccagacaaagacttcgtcatcgacttccttggcggcgagttcgggaaagacgtcgtggtcggggctggattttcagggcatgggttcaagatggcgccggcggtggggaggatcctggccgagatggccatgtatggcaaggagagcacagcgacggaggccggtgtcgagctcggccacttcaggatcaaccgcttcgagggtaaccccttgggaaacgccgcgaattagcaactctgaggatccttcattaaacttgctcggctaaaagcacccgattgatcgtgcacatgtaaaagagttaccaataacttagggaaatttggatttataccattaaaagtttacaactttaaatat

SEQ ID NO: 35448 - DNA, 1325 bp, Zea mays
  Clone ID: UC-ZMROB73033A04_FLI
tgcgatcctcgaagcctccgccgagcatcgatcatgtcggcctactgcggcaagtacgcggatgagctcatcaagaatgctgcctacatcggcacccctggcaagggtatccttgctgctgatgagtcaactggcaccattggcaagcgcctttccagcatcaatgtcgagaacgtggaggagaaccggcgggctctccgtgagctcctgttctgctgccctggtgccctccagtacatcagcggtgtgatcctcttcgaggagaccctctaccagaagaccaaggatggcaagccttttgtcgatgtcctcaaggagggaggcgtcctccctggcatcaaggtcgacaagggcaccattgaggttgttggcaccgacaaggagaccaccacccagggccacgatgacctcggcaagcgctgcgctaagtactacgaggccggtgcccgctttgccaagtggcgtgctgttctcaagattggccccaacgagccgtcacagcttgccattgacctgaatgctcagggtctggctcgctacgccatcatctgccaggagaacggtctggtgccaattgttgagcctgagatccttgttgatggccctcatgacattgatcgctgcgcttacgtcactgagacagtccttgctgcctgctacaaggctctcaacgagcaccatgtcctcctggagggtaccctcctgaagcccaacatggtgactcctggctccgactctaagaaggtgacacctgaggtgatcgcccagtacaccgtccgtaccctccagaggaccgtccctgctgctgtgcctgctgttgtcttcctctccggtggacagagcgaggaggaggccaccctgaatctcaatgccatgaacaagctcagcaccaagaagccatgggccctgtccttctccttcggccgtgccctccaggcgagcaccctcaaggcctgggctggcaaggtggagaacgtggagaaggctagagcggccttcctcgccaggtgcaaggccaactccgaggctaccctcggcacctacaagggtgatgctgccgccgacaccgagagccttcacgtcaaggactacaagtactgagttgcttctctttgcgatcccgttgttttggaactcctgcctgcgagtaggttgctgagtgttgtttgcttgttagagcttttatattcggacatgaaaaaaacatgcttcctatgtggatgatggttatctttatattcgtatattaactactagtctctgttgttaatttccgtgtaatttgctcctcccagatgggagaatcgaacgccgcttttttgttc

SEQ ID NO: 35449 - DNA, 990 bp, Zea mays
  Clone ID: UC-ZMROB73033C04_FLI
cccagttcccgtttccatctccatcctcccccccgggagcaggagctgcagccaggagtcgagtcggcgtcgtcacgggagatatcagcttcgctatcaccggatccccctctgctccctccgcacctcccatctgcgctctctgttttcttccgcgcaccccggctgttggtgtcccgtccggcagcgttgctggtggctgaatccgagcctttgaggggtctgctgccgccgccgccgccgctgtcaccgctcttgagatctctttattgatctggagagattaaagagggattcttgccttcctactggagcaagagaaaggggagaacgtgtttcttcaggcgtggttgaacagtgaggaccggagaacaatgcgaggttcgggatttaagatgttctggctttaggggcagttcttctgaagcaggggacgggcgattcgaccaccggagctcagatctgattacaaaacgttcagaaaacacaaggcgttctcacaccgcctttcacttcttgcttactttggcaaccactcactgcgactggtctccacctccacctacaccaaagaacacatggcaagccgatctagcgcgatggaaggaggggcggcaatacaaaggaggaatgccgtgaagcggcatctgcagcagcgtcagcaggaggcggatttcctcgacaagaaggtcatcgcgtccacctacttcagcatcggggcgttcctcgtgctcgcctgcctcaccgtctcgctgctgatactgccgctggtgctgcctcccctgccgccgccgccgtcgctgctgttgtggctgccggtctgcctgctcgtcttgctggttgtactggccttcatgccgacagatgtgcgcagcatggcctcctcttacctgtaaatagataaataggtcttggccagattttctgtgttttgcagctgcaggattcgtcctaagacgagtcatgagtgtaatgtgaagcaacttctcc

SEQ ID NO: 35450 - DNA, 1814 bp, Zea mays
  Clone ID: UC-ZMROB73033D06_FLI
cgaagagtcatcacgccatacgacacggaggacaccgagccggaggcgaagtcggtgcgcagcgcgagagtagcggcgagtcggcaaccatcaagcaactgcatggccgcggtacccgccagcgcccccgccgccgccgaggcggcggagctcgtgccgacgctctcctcgctggagccggtctacggcgcgggcgcgcagctcgacgagtcgcgcctccgcttcgcccgcctcggggaccgcttccacgccgtctacggcgcccgccccgcgctcttcgcccgctccccagggagggtcaatctgatcggggagcacatcgactacgagggctactcggtgttgccgatggccatccgccaggacatgatcgtcgccatccgaagggccaacggcgcccaggtgagggtcgccaacgtcgacgacaagtaccccctctgcgtttaccccgccgacccagacaaggaaattgacgtaaaaaatcacaaatgggggcactatttcatgtgtggatacaagggagtttatgaatactgtagatcaaaagggatagatctgggcaaacctgttgcgcttgacgtcgttgttgatggcacagttcctcaaggctctggactgtcaagctcagcagcatttgtctgttcagcaacaattgctatcatgggaatccttgacaaaaactttccaaagaaagaagttgctcaattcacttgtctgtctgagcgccacattggaacgcaatctggcggcatggatcaggctatatctatcatggcgaaacctggattcgctgagttgatagattttaatccaatccatgcaactgacgtccaactaccttcaggtggtacatttgtgatcgcccattgtttggccgagtccaagaaagcagagacagctgcaacaaattataataaccgtgttgtggagtgtcgcttagcagcgattgttcttgccatcaaacttgggatggataggaaaaaggctatctcctccgttacaaccctctccgatgttgaggggctatgtgtttcttttgctgggagagaaggttcatctgatcctgcagtagctgtgaagaaacttctgcatgaggacccatatacagctggagaaatagagaaaattacaggagaaggcctgacatctgtcttccagggctctcagacgtcattggatgttataaaagcggcaaagcactacaagctatttcagcgtgcgacccatgtctactctgaagcaaggagggtttatgctttcagggatactgtctcttcaaaactcagtgaggaaggcaagcttaagaaacttggtgatcttatgaacgagagccattacagctgcagcgtgctatacgaatgcagttgccctgagctggaggagcttgtgaaggtctgcagagacaacggagcactgggagcacgtctgacaggagctgggtggggtggctgcgcggttgctctggtcaaggagcccatcgtccctcagttcattctgaaactaaaggaaatgtactacaaatcaaggattgacaggggagtaatcaagcagggcgatgtgggcctatacgtgttcgcatccaagccgtcgagcggcgcggccatactgaggttgtaggcaggcaggaaggcagaggcagccgctattcttttcacgagtgtggtggccctgtaaaacatggaataaagttgccatgaacaccgaacccttgtagtagcgttgaattatctcagacaacacgcgcattaaattgatatctatctacaggagtaacacacgagcgaaccatgctgttttaaatcctctttcttgct

SEQ ID NO: 35451 - DNA, 825 bp, Zea mays
  Clone ID: UC-ZMROB73033D09_FLI
cgtggttcttctggctgctcggcaagaaccccggcgtggaggccaagatcctggaggaggtggaggggatcgtcgcggcgcggaagggggctggggaggtcgtcgaggaggaggaggagctcgtgttcaggcccgaggaggtgaagcggatggagtacctccacgccgcgctctccgaggcgctccgcctctacccgtccgtccccgtcgaccacaaggaggtcgtggaggacgaggtgttcccggacgggacggtgctgaagaagggcaccaaggtgatctacgccatgtactccatggggcggatggagagcatctggggcgacgactgccgcgagtacaagccggagcggtggctccgggacggacgcttcgtgggcgagtccgcctacaagttcacggccttcaacggcggcccgcgcctgtgcctcggcaaggacttcgcctactaccagatgaagttcaccgccgcctccatcctccgccgctaccgcgtccgcgtcgtcgagggccaccccgtcgcgcccaagatggcgctcaccatgtacatgaagcacgggctcaaggtgacgctcaccaagagaggcaaggccaattaattaagctctgaaccgtgtggtgtgccgagatcgagcttgccaattgtaaggcgcagagacgactcgagaaacacatgaaacaagcactactttcgtcgtgccactttgtgactgggatggaagtgttgatgctgctgcggaacaagatctctgtgttttcatgcgttttatttctcactttctttgtactagtctatatatatatatatatatactgttgttttgt

SEQ ID NO: 35452 - DNA, 1697 bp, Zea mays
  Clone ID: UC-ZMROB73053D03_FLI
attgcccgccgccgcaccgtgtccggctaggactaggacccctgtttgggctcttgcgtttcgattcctgggtcgtctgcaaggagtgtggccgacggagggggccaaaatgtgggcggagagggtggtcggcgagcgccggatgcggcagatccagcgcttcgcgcggaacgccaagctcaccgtcgtctgcctcctcctcaccgtagttgtgctccgcggcaccgtcggcgccggccgcttcggcacgccgcagcaggacctcatcgagctccgccagcacttcgtctcccacccgcaccgggcgctcgcggagcaccacgacgccaggtccagggcctccaccaccaccacgtcgtcctcgtcctcgtcttcctccggccgccgcgacgagcccgacccaccgccgaggtcgctcagggacccgccctacacgctggggcccaagatctccgactgggacgagcagcgcgccgcctggcaccgccgccacccggagacgccgcctttcctcaacgacatcaagccacgggtgctgctcgtcacggggtcctcgcccaagccctgcgagaaccccgtcggggaccactacctcctcaagtccatcaagaacaagatggactactgccgcgtccacggcatcgaggtcttctacaacatggcgctgctcgacgccgagatggccggcttctgggccaaactcccgctcatgcgggcgctgctcctcgcgcacccggaggtcgagttcctctggtggatggactctgacgccatgttcaccgacatggcgttcgagctcccgtgggagcgctacgggccatacaacctgatcatgcacggctgggacgagatggtctacgacgacaagaactggattgggctcaacaccggcagcttcttgctgcgcaactgccagtggtcgcttgatatgctggatacctgggcgccaatggggccaaagggccctgtccgcatcgaggccggcaaggtgctgaccaagtccttgaaggatcggccagtattcgaggccgatgatcagtcggccatggtgtacatcctcgcgacacagcgcgagaaatggggtgataaggtttaccttgagaatgggtactacctccacggctactgggggatcttggtcgacaggtatgaggagatgcttgagaactacaagccagggctaggtgatcaccggtggccgctcgtcacacattttgtcgggtgcaagccatgcggcaaatttggagactaccctgtcgagcgatgcctcaagaacatggaccgtgcattcaattttggggataaccagatcttgcagatgtatgggttcacacacaagtcactagcaagcaggagagtgaagaggatcaggaacgagaccagcaacccgcttgagacgaaggatgagcttgggctgcttcatccagcattcaaggctgtgaagacttccacatgataattagagtacagttccacttgtttattttgttggctcgttctagatcctgttgggtctataatccaaagtgttcttttttgtagaatcgggtgacgacagaagtttgggttggggtcatgggatggatatctttgttgtaatgtgaggtgttaggagaattatgttatgtttatttattggcataagttatgtcttacacgtacaaatgagttaatggatgaactcaagttattggttc

SEQ ID NO: 35453 - DNA, 1770 bp, Zea mays
  Clone ID: UC-ZMROB73054B09_FLI
actgacacaccagtgagcgagcagagcgaggcctgatgcggcagcggcagcaaggcgaggagcaccgggagatattcgtccagtggagaccctgcgacaagaagaggtcttaggccctccgccgccacgcgcaccggcagacaaaatccgcgcaggccttcttccgacccgcaaaggcgccgcctttttcgccgattccacaggccggagcccggggagaaagacagacagacagaccggaagatgagcgcatccgtgggccggacccgcgtggggcggtacgagctcggccggaccctcggcgaaggcaccttcgccaaggtcaagttcgccaggaacgtcgagaccggagagaatgtcgccatcaagatcctcgacaaggagaaggtcctcaagcacaagatgatcgcccagatcaagcgagagatctcgaccatgaagctcatcaggcaccccaacgtcatccggatgtatgaggtgatggccagcaagacaaagatatacatcgtcatggagctcgtcaccggtggcgaactcttcgacaaaatcgcctcgcgtggaaggctgaaagaggatgacgcaaggaagtacttccagcagctgatcaacgctgtcgattactgccatagccgaggcgtctaccaccgcgatctcaagcctgaaaatctcctgcttgatgctagcggcacgctcaaggtttcggattttggactgagcgcactatctcaacaagtccgagaggatggtctgctgcacacaacctgtggaactcccaactatgttgctcccgaggttataaacaataagggctatgatggagctaaggctgatctgtggtcatgtggagtgattctctttgtcctcatggcggggtacctcccatttgaagattcgaacctgatgtcgctctacaagaagatcttcaaagcggatttcagttgcccgtcctggttctccacaagcgcaaagaagctcatcaagaagatacttgatcctaatgctaacaatagaataactattgcagagctcattaacaacgagtggttcaagaaggggtatcagcctcccagatttgaaacagcagatgttaatctggatgacgtgaactccatcttcgatgaatccggggagccagcacagcttgttgttgagaggagagaagaaagaccatcagtgatgaacgctttcgagttaatctctacgtctcagggcctcaatctcgggacgctcttcgagaagcaaacgggttctgttaagcgagaaacaaggtttgcgtcaaggcttcctgcaaatgagatactgtcgaagatcgaagcagcagcgggacccatgggcttcaacgttcagaagcgcaactataagctgaagctgcaaggggagaaccctggaaggaaaggtcagctggccattgcaacagaggttttcgaggtcacgccttccctgtacatggttgagctgcgcaagtccaacggcgacacccttgaattccacaagttctaccacaacatctcaaatggactgaaggacgtgatgtggaagccggagagcggcatcgtggaaggcgacgaggcgcggcaaaggaggtccccgtgatggggtctgcaaccaagttttagaagtagcgctgcagataactagtcatcagggagcctggcgggaactgagcctgtgactgcttcctgtttgtttggatgttttgtttttgtctaaggtgctttctgactaaagtatgctggataatgtgaatgaagaatgtgcagagttttcagc

SEQ ID NO: 35454 - DNA, 1404 bp, Zea mays
  Clone ID: UC-ZMROB73054E07_FLI
agcagcagccacgggacgggagtagaggcgcagagagagagaaagagagaaagagagagaggttgtgctcgctgcctgccgctgagagacggatgaagaagtgcccatcggagctggagctggaggctttcctccgcggccgggaggacgccacggcggcggcggcggcggcggtggccgagcagaagcctacgcacgacatcgctgcgctggcgccgttcggcgccggtggcgtgttcccctccagcgatctgtccgccttcagcttcgctgactcgaacaccctcaatggaactggaaacatccataatcacctttggtcccataaccacaacgtcaggcatcccgcagtctccacgacgatcgagtcgcagtcgtcgatctgtgctgcagcagcaagtccaacatcggctaccaacctgtacctgaaagagagccaggctctgggcggcacgagtggttccgactccgacagcgattcgctgctggacatcgagggtggcccgtgcgagcagagcacgaacccacaggacgtgaagaggatgcgacggatggtgtcgaaccgtgagtctgctcgacggtccaggaagaggaagcaagcccacctagctgaccttgagacacaggtcgaccagctgcgaggcgagaacgcgtcgctcttcaagcagctgacggacgccaaccagcagttcacgaccgcggtcacggacaacaggatcctcaagtcggacgtggaggccctcagagtcaaggtgaagctggcggaggacatggtggcgcgcggcgcgctgtcgtgcgggctgggcagcctggggctgtcgccggcgctgaacccgcggcaggcgtgccgcggccccgacgtgctgtccgtgtccggcctggacttccccggcgccgacgacgcctgcttcacggggctgtccccggcggagcagctgcagctccagagctcccccctgcagagcatcgccgccagcctcgagagcctggacaaccggatggccagcgaggtcaccagctgcggggggcccggcgtcgacgtctggccgtgggaccaccactccaacggcggcctgtccaagtgaagccggagacgccgggtgggagtggggtgagactcgcgccgctcgccgacggcacctatcctgtcctagtgtatgcgtatatcgatatgcatggcgggcgctagctatgaccatgagccgccgttatttctgtgttcgctggagtggtgaaagtgaacggacttgagtttttcagagtccctcgtctccgtcggtacatttactagttctgtaatagaactgactagcttaagctcgtgctactacatatatatatgtatgctgagagactgaactcgaagcataatcatgctaccatattatgtcatcattacatttc

SEQ ID NO: 35455 - DNA, 879 bp, Zea mays
  Clone ID: UC-ZMROB73054G08_FLI
tcttgctgctggtcccatcatccaagcaagaccgacatggcttcagctgttgctgctgtgaaggaggcctgcctgctcgccgccgtgtgcgtcgtgctgctccactcctcgtcctcgatgggacagcagccgttggcgcctgaatcgtcgtccgcttccccttactactacacgggccagcagccaccgccgccgcccgcatcaccggtcgactgcccttacactgggcagcagcccactccaccgccagtggtggtgccgccggcgcccacgccgaccccgaccccgaccccggcgccggcgccatcacccaccatcaactgcagctacagcgactgcggcgcgcagtgcactacgtcctgccaagccagctacaacgccaccgccaggaactgcacggcgttgggcgacggcgccttccaagggtgctatggcagctgcaccaacaacagctgccctggcaagtcctgtgtgcacagtgtgtgcgacagcagctgttcctgcgacaacccccacgcaagcagctgctgtcagtcttgccgtaccgctgttaacgcagccatgggtgtgggtggcgagtaccagcgatgcctgagctacaacgacaggtatatggggtactgcatgatgagctgcgtcgacagctgctacaagaactgtacccagggcgcgtaaagctagctagagagatggccggccgtcgtggacgagtgccgcgcgcttgaacagtctcgtcgcggacgggcggcaagctgcaagacacctagtagcgcgcggcccagaataatgttatctcatgtaatgttcaataatacgcatgtatactagctagcgctagctatatatgccaaactaagtgaataatgttactttacgttc

SEQ ID NO: 35456 - DNA, 2393 bp, Zea mays
  Clone ID: UC-ZMROB73055A04_FLI
ggcaaggttctaattttggaatatatggatgggattcgtttaaatgataatgattcattggaagcatatggtgttgacaagcaaaaactggtcgaagagataacccgtgcatacgctcatcaaatatacattgatggcttctttaacggcgaccctcatcctggcaattttcttgtgagcaaggaacctccacataaaccgattctccttgattttgggctcactaagcgcatatctgaatctatgaggcaggcactagcaaaaatgtttttgtcatgtgcagagggagatcacgtggcactgctgtcagcattttcagagatggggcttaaactgcgggttgacatgcctcagcaggctatggatattgccacagtattctttcgtcagtcaaccacagcaagtgaagcaaaggagaacataaaaacacttaatgaccaaagagagagaaatgtcaaagctcttcaagaaaagatgaaattgaacaagaaggaggttcaacgctttaatcctgttgatgctttccccggggatgccataatatttatgagggtcttgaatctcctcagaggtctttcagcttcactaaatgttaggatagtttatctggacatcatgaggccatttgctgaatcaactttgttagggagtttgacacacggacaaatacctaacagtcagtggatttttgactcacctgctaactctgatgtggagtctaaactgagaaattatctgcttgagttgggaagcgacaaaattttaggaatacaagtctgcgcatataaagatggaaaggtcataatagatactgctgctggtatgctggggaagtatgatccccgacctgttcaacctgattctctttttcctgttttctcagtgactaagggtatcactgctgggatggtacattggcttgtggacaaagggaagctgaagtacgaggaaacagttgccaacatatggccgaattttggaactaacggaaaggagttaataaaggtccatcatcttctaaatcacacatccggtttgcacaatgcactgggtgatgtggtaaagaatgatcctttgttggtatgtgactgggaggagacactaaaccagattacgaagagtacacctgagaccgaacctggttcagcacaaatttaccattacctctccttcggttggctgtgtgggggagtcatagagcatgcatctgggaagaagtttcaagagattctagaagaggctattgttcgtcctcttcacattgagggggagttgtatgttggcattccaccaggtgtcgagtctcggctggcagcgctgacagttgacaccgaggagctccagaagctatcaggaatcagggcaggtgcagatgtgccagcagctctgctgaacaacatcgcgcagatggcgtccggtgtgcccgctattttcaacacgctaaacgtccgtcgggccatcatccctgccgccaacggccactgctctgcccgcgcgctcgctcgatactacgcggcgctagcggccggcggttctgttcccccgccgcactcttcgggcgccatgccgcccctcggcagccacgtgcacacccccaagttcccgaccgcgccgctcaagaagaagaagaagggcgccggaaagaagaagggcgccggcggcggctccatgggagacctcaaggtccaggatataagcggcggcagcagcgacaggaacgggtactgccagctgcgcaccagcgacgccgacagcgaggcggggagcggcagcggcggaggcggcaggatgttcggcagcgacaggatcctcgacgcgttcatgggcgtcggcgagtacgagggcatggcgcaccgggacggcaagttcgggctcgggttcaggaggtacgacgacgccagcagcggcagcggcaggctgaggtgctttgggcactccgggatgggcggctcgaccgggttctgcgacgtggagaacggcttcgccatcgcggtgacggtgaacaagctgtctctgggcagcgtcacgcgcggcgtcgtccggctcgtcctcgaggagctgggcctgcccgtgccggacgagtactcggccaccggggagaaggggcctgacatgatgctcaacctgacgacaacgacgacgactacgccgccgcaactgagatgacgacggcgaaactgagattatcaggttgggttcgtaataatctgtggaacaagatatatagcgagcagaaggaaggttggggtacagggatttggtggacagtatatatacgcgtgccattttgattttgacgtggcatgtaaaactcggcaaattctggtatattacgaagctgggtgctgggaattgtggccagcagtacaagaaatggacatgctagtttgttg

SEQ ID NO: 35457 - DNA, 1180 bp, Zea mays
  Clone ID: UC-ZMROB73076B06_FLI
gtcgcgccgccgccgccgccgaaacagcacatcgctctctcgatctcagccatggcggaggtggagcagccccaggacgcggtgaagctcttcaaccgctggaccttcgacgatgtccaggtgaacgatatctcgctgaacgactacctggctgtgactgcggcgaagcacgcgacattcctgccgcactccgcggggcgctactccaagaagcggttccgcaaggcgcagtgcgccatcgtcgagcgcctcaccaactcgctcatgattcacgggcgcaacaacggcaagaaggtcatggccgtccgcatcatgaagcacaccctggagatcatccacctgctcactgacgccaatcccatccaggtggtcgtggacgccattatcaacagtggaccacgtgaggatgccacccgtattggttcagctggtgttgtgagaaggcaggctgtggatatctcacccctgagaagggtgaaccaggccatctacctcctcaccactggtgccagggagagcgctttcaggaacatcaaaaccattgctgagtgccttgcagatgagttgatcaacgctgccaagggctcttccaacagctacgccatcaagaagaaggacgagattgagcgtgttgccaaggccaaccgttgagtggagcttgtatcctggtgcacttgcactagaactacgtttctggcagtcgtatttttttcttgtgtttttacccatgtttagactttgagacctatatctaaggttttggttctcagtgaacaatgaaaattactgtgaaatgcagttgttttggtgcagaaatgcgcactgagatattctgcttgtgaatttgtgagtgctgttggcgtcgccgctggcttgccgatgtagtatttcttgtcactcagatgtcaccggttctatgttggcaatcttctgtaggttagacaattgatgatagcaggtgcaaatcaagctgctggtgcagattaggcaaaccaatacaagaatgggaagatcttttttttttaaaaaaaacatgtttcaaaccagcctttttcacccccaggatatttttagcttaccttgcttgcgttggtttgtaccaatagttttatctgcactgcacctctccgtgttattggttaggtgacacaattgtagctatggatctgtttgtttccat

SEQ ID NO: 35458 - DNA, 762 bp, Zea mays
  Clone ID: UC-ZMROB73076C02_FLI
ccgaatgacgggcacgtacgaggcctccgaccgtcctcctcctcccaactccgccggctaccggaccgacaaagtccggcgaaagcggctgacggcgcagaagaggaaagagatcaaggaggcgttcgacctcttcgacatcgacggctccggtcggtgacgtgctagtgatgtagcgtttatatatacaaacacatgcgcatgtgttcgcccatggcggccgctgtgactttcacctttcacctgcttgcatcctccaggcaccatcgatgcaagggagctgaacgtcgcgatgagagcccttggattcgagatgacaccggagcaaatcgggcagatgatcgcggaggtggacaaggacggcagcggcaccatcgacttcgacgagttcgtgcacatgatgacggacaagatgggcgagcgggacgcccgggacgagctccacaaggcgttccgcatcatcgaccaggacgccaacggaaagatctcggacatggacatccagcggctggccatcgagaccggcgagcacttcacgctggacgaggtccgggagatgatagaggccgccgacgaggacggcgacggcgagatcgacctggaggagttcatgaagatgatgaagcggacagactttggctctgggttctagtagtcacagacaagccaatcccaacatacattgatacataccatcggtgaaaaatacatatcacctagctactacgctacatatgactggagtattgggatttatttgag

SEQ ID NO: 35459 - DNA, 1572 bp, Zea mays
  Clone ID: UC-ZMROB73079G05_FLI
cctccacgtgcccacatcggactaggaacaaccgatctggaacccattcccaattcccctctccggccttcgccgccgccaaggcacgaagccagagcgcgacgacataaatcgtgggagcgcccgcctttgaatcggtttcccccacgccatgtcctccccctgcgtctcgcaccaacagcaggtccgtctccgtctccgcgctgccagccgccttcccgccccagacacggcctcgttcgcgccgcccgcgccccggcagcttcggatggcgcacgcggcgatgagcgccaaggcgcccctcggcgtggcgccgacggaggagggggccgggacgccggggcagcaggccgtgctggggtagatggtggaggatgccgccgtgtggtgcgccgtccacgggctcgtcatcggagatcgcgccaaccagagatcaggaacggtccctgcggttggcctggttcacgctccattctcgctgcttccagcgcgttttccggcatcgttcttcaatcaagcatgcgagctggctcctatcttcaatgagctcgtggatcgtgtcagcttggatggggagttcttgcaagctgctttgtctagaacaaagcaggttgatgaatttacttcaaggctgctagaaattcatgataagatgatgtctataaataagaaagaggatatacacttaggattgcaccggtctgactatatgctggattccgaaaccaattcactacttcaaattgagctcaacactatcccatcatcctttcctggccttggctcccttgtcagtgaacttcaaaggtcaatttactatccattctatggcagaattttcatgttttctttcaaactttctcttattttttcaattgtagtatgacctcattatgaaatgtttaaggttgtacaaaatgatattccaccagaaagcatggatgccatgcgcccggtgcagcagcacttgccaacacggacaagcactccaccctccaaaatgaataaccttccaaaggatgcacagaacatggaagtgtctacaccagtacccccaataaatccggaaggaaatgatgaggacgagactccaaagaacactgtctctagaaatggtggtttcctgcagaatgcagttgggcaagacctagtccatcttggcgttgcaagaacagcaagtggttgcccttcggctgtcgcttccggtgttagcaccagacaccagcacaacagaatggatcttgatccagcatccagcagcgtggataatttcaaaacaccagaacttacaaaagaaaacggtctcgaggaggatgggaaaggagagagtagtatgtatgatgagaggcaacctaagagaaggaagcgtacccttatgaataatgagcaaatagatgaattagagaaggctctagtagatgagcctgagatgcacaaaaaccctgttctattgcagagttggtcagagaagttaagtctgcaggtaattttttttcactttggggcattcaattcttaggtcttaattgttgaatgcattctcatttatggaaaatatggccgtgcttttgt

SEQ ID NO: 35460 - DNA, 618 bp, Zea mays
  Clone ID: UC-ZMROB73079G07_FLI
ggcagcaccaactttcctagctaatttgcaaatcgcgtggaagagggagaaagagagatcagcgaccgagcatggacaagagggcgtcgtccacctccttgctcgtgctcatcagcatcctactcgctctggcagaccccgtcgcagcggggatgaaggccacgttcgcggcgggggtgggcgtcgccgccgacacggcggtgctgcggcatctgatgacgacgaggctggaggacggcgtggcgccggagctcacggtggatgtggagcttcaccgccgcgtcctggccggcggcttcgtgaaatcaaacgtgctgaatccagacaaggcggcctgcataaagtcgtgcccagcgcgcgggcggccgtacaccggccggggctgcagtaacatataccagtgcccccactgagctagcagctccacaagtgattgctctgcccacgggtactacacgcatgcgtgattgttgatcggttgtgttgtgcatttgctggttggttcgaccatcgagatcttggttgctagctagtagcatgtcttgaaataattatgggattatttacttgattgtgtcagctaattgattctgttattgaagtatatggcatcttgcg

SEQ ID NO: 35461 - DNA, 1123 bp, Zea mays
  Clone ID: UC-ZMROB73079G12_FLI
gcgccgctcaactacgcgcgcaaccacctcgccgacctgctcccgcgctgcgtgccgcgcgcgatatacctcgactccgacgtgctcgccgtcgacgacgtgcggcgcctctgggagacgcgcctgcccgccgccgcggtcgtcgccgcgcccgagtactgccacgccaacttctcccgctacttcaccgaggccttctgggacgaccccgtcctcggcgccagggtctttgccggccgccgccgcgcgccctgctacttcaacaccggcgtcatggtcatcgacctccggaggtggcgcgttggcaactaccgccagcgcatcgagcgctggatggagatgcagaaggagaaaagaatctacgagcttggctccttgccccccttcctgctcgtcttcgccggcgagatagaggccgtcgaccaccggtggaaccagcacggcctgggcggcgacaacgtcttcggcagctgccgccctctccataacgggcccgtcagcctgatgcactggtccgggaagggcaagccatgggaccgtctcgacgccggcaagccttgccccctcgaccacacctggaagtcgtacgacctctacattggcgagaatgattcttcaccagcatcagggccgtcccggtcagccttgtcatcgttggtggcatggtagaagttcatatacacaataattctttgatctcgggtgcccgtggttcttggccggtaatggaattgccttgcgatgcattcccactgccggctgccgccacagctgctgccgcaagccagctgccgccttcggctgtacaggacagtgaggggaggggcggtatacagattgcagcaggagcagcagcagcagcaagggggtgaagacagtgaatagcgggggggagcaaattcttgttcgttttgcactatgattgagattgattcattaggctctggtttggaggctgtgactatcatgggatggaaggaattacttggttggtggtgtacaattcttggataggacaaaggtttcggttttttggtgtattagttcagaattgtttcatttacatgtctattcagtacactcgtgtaatacggattaaattgatttgaaacaaattgagtgc

SEQ ID NO: 35462 - DNA, 818 bp, Zea mays subsp. mexicana
  Clone ID: UC-ZMROTEOSINTE018G03_FLI
gcgagatcgtgcgcgcctccgagatctccacgaaggttggtgccagacctgctgctcgtgtcttcccttcctgaccacgtttcaattctgcttgctaggagttgtggtaacatggggctcaccttcacgaagctcttcagccggctcttctccaagaaagagatgaggatccttatggttggtctcgatgcagctggtaagaccaccatcctctacaagctcaagctcggagaaatcgtgaccaccatccctacaatcgggtttaatgtggagactgttgaatacaagaacattagcttcactgtctgggatgttggaggtcaggacaagatcaggccattgtggaggcactatttccagaacacccaaggccttatctttgttgttgatagcaatgacagagatcgtgttgttgaagcaaaggatgagctccacaggatgctgaacgaggatgaattgagggatgctgtcttgctcgttttcgcaaacaagcaagatctaccaaatgcaatgaacgctgctgagatcaccgataagcttggtctccattccctgcgccaacgccactggtatatccagagcacttgtgctaccacaggagaaggtttgtacgagggtcttgattggctctccaacaacattgcaaacaaggcctgaatggacaattctgctgtttcacggagcacatctgcacatggcgaggcatggtcattttgaccctcagacgattattgtttcattggaaagtatcgtatttctatgctaggcttttcagagagattactctctaagaaactgatccgatattaagacactat

SEQ ID NO: 35463 - DNA, 1400 bp, Zea mays subsp. mexicana
  Clone ID: UC-ZMROTEOSINTE021F08_FLI
gcgagggataagattggcggcgccgctagggaggcggaggtgcggctcatggccaccgcagggctgcgcctgctcgaggagcgcgcccaggaggcgatcttagcgtcttgcagggacgttctacgagcctctgggttccggttcgaggacgcgtgggccaaggtgatcccaggctcggatgaaggtgtctatgcttgggttgcggcaaattatgctcttggaagacttggaggggatcctaacaaaaccgttggaataattgaacttgggggcgcttcagctcagcttacctttgtttctgatgaagtacttccacccaaactgtcatataattatacttttggtgaaacaacatacactctctataccaacagctttttaaactttggtcaaaatgcagctcaagactcattccatgaaatgctgaggtcaagaggctctttcaaaaatggtacacttgctgatccttgtgctcccagaggatattcacgcaatgaaggtgcttcaaggtcaacattagagaaccaatatgttaataatgggactggaaactttacagagtgcatatcttcttcacaacttttactgcaaaaaggaaaggaaaagtgccagcatcaacaatgtcacctgggatctacttttgtacctgagctgcgtggatacttcttgggaactgaaaatttctattttacttcaaagttctttggacttaagaagtcttcatcactatctgatttcatgtttgctggagaacaattttgcaatcagcatttgtcgagtcttagaaaaaagcatcctaataggtcagatgaggatttttcacggtattgcttctcgatggcatacattgtggctctactgcatgacagtcttggtgtaccactggatgacaagaggattgagtattcaaaccaggttggagacattcaggttgaatgggctctaggagctttcatcacactgatgcaaaatatgagtttaaagccattacacaccaccgcagaatcaacccatagcaatagaccattgtttgctgtgatgggaatgtttcttttatgtggaatactctttgtatcaagatggaggaagcccaagacgaaaatcatatatgacttagagaaaggccgatacatcataacacgcatcagctgacgctaaatcttgtgcagaagaactatatttatacgacatgaatagatgttgtgttgtgcaacgatgtacgagttcaattctttgtgttttatctttaggtagcagagctgggtgggtggagcaggaagatagcgcatttgtgcgtatagaagaatgatgtgtagaacaaattgtcatgtgttaattgaattatttgatgaataattatagttgttttgttcatctaaagaggtcggcatttctcacac

SEQ ID NO: 35464 - DNA, 979 bp, Zea mays subsp. mexicana
  Clone ID: UC-ZMROTEOSINTE021H05_FLI
tcgtgtcatgggacaacaccgccacgcgcatcaggcactcgcagtcatccagggttataggaactggaacattcggctgtggtacgttcatcgttgagggggaagatttcattgcagagaatatcacgtttgagaactcagctccccagggctctgggcaggccgttgcagtccgggtaaccgcagataggtgtgctttctacaactgccggttcctcggttggcaagacacattatacttacactacgggaaacagtacttaagagactgttatattgaaggccattgtgacttcatctttggtaactctgtcgcccttatggagcattgccatatccattgcaaagcagcgggatacatcactgctcatagccggaagtccacatcagaatctactggctatgtgttcttgaggtgtactattactggacatggagaagctggatacatgttcctaggtcggccatgggggccctttggaagggttgtctttgcgtacactttcatggatcgatgcatcaagccttctgggtggcacaactgggacaaatccgagaacgagcgaactgcttgcttttatgagtacaggtgctcagggccaggcgccctcccatcgaaccgggtcgcatggtgtagacagttgctggatgtcgaagcagagcagttccttgcgcacacttttatcgacccagacgtcgataggccatggctcctccagatgatggcgataagaataccagcctcagcatagtttgatcccggcagccgcaggtcctgcatggttcatgcctcctttctagcctatctaaataaattaagttggaggatgcattatatttgtataagtttgtaacgtttggtgaattagtatccactttcatctcactgtgggcggtggggatagaggatgagagaccttctcttgttgtaacgaaccccagcactaggctgaaatatatgcagattttattttgcatg

SEQ ID NO: 35465 - DNA, 1743 bp, Zea mays subsp. mexicana
  Clone ID: UC-ZMROTEOSINTE024B09_FLI
cttgttcaatatttggctgacattatggatgagtacaaggataagattcaaaatacatgcgggtatggacctatcgcgtttatggcttcagttcagtcacttcagagtcttcctcaagacttaacctcttctggaagatttgatttccacattgagctttctgctcttgcagtacctgagcgcaaagcactattgcaacatcaagttgaggagcatgagttattgtgttctgaggaagttctgtcagagatagcatcaaaatgtgaaggttatgatgcatatgacttggaaattttggttgatagggctgtgcacactgctgcttatcgctttcttctgccttctaatgcttctcacaactctctgaaacgaactttgctgatggaagatttctctaaagcaatgcatggcttccttccagtcgccatgcgtgatcttaggaaatatgctcctgatgataaagatggtggttgggaggatgttggagggctagatgaagcagtaactatcattaaagagactcttgaattgccgtcaaaatacccaaatatctttaccagggcacctgtgcggttgcggtcaaacattctcctgtatggaccacctggatgtggtaaaactcacattgtgagagctgcggctgctgcttgttctttgcgattcatttcagtcaagggtccagagctattgaataagtatattggttcatctgagcaatctgttcgcgacttttttgcaaaggccgttgctgcagcaccttgcctattattctttgatgaatttgactccattgcaccccagcgaggaactcatagtgcaggagtttctgatcgtgtagttaatcagttcttgacggaactggatggtgtggaaaccttaactggagtattcgtatttgcagctacgagcaagccacagctaatcgatgctgcgctcttgcgacctggaaggtttgatcgtctagtcttttgtgatttccctcgatgggatgaacgtttagaaattctgaaggtgcattctaggacggtttcactggcaagtgatgccagtctcgaagatgtcgcttctctgaccgaaggatttactggtgctgatctcgctgctattctaacggatgctggactagcagcaattcatgaacttttggacaaccaggagaacggtgttccagaaaccgaaccgtgcatcagcaaagaacttctcatgtccgtcactaggaaggcaagaccttccacaccagcagacgagaagatgcggtatgatagggagtttggtgaattcgtgtcatccaggaagtctatttcgacaaaggcaagagagtcaaaaggcaaaaaggttacactagcttgagcctttccttgggcaatattaatgcgctgcaaaatttggacagtggcccacatgaaggctgctaacacgcggacttgtcaggtcatgcgacgtaggcttcctttcatttgaagagaaacaaaatctacaaagaaacccaaccaaggctcacttatgttagtgtacttggatggaggaggaaggccattggagggacctgcaggtggtcaaaggtgtcatagtaggaaattttgtacggcaatcctgctgtaattaaagttatagcacttgtcacaaattttgtacggtggtgaatagtaggaaatagaaatttgaagagaaaaccggtaatcctgctgtaatgaaagttatggtgaatgatccgcttcttaacgtgcagcggtcgtcttgaat

SEQ ID NO: 35466 - DNA, 651 bp, Zea mays subsp. mexicana
  Clone ID: UC-ZMROTEOSINTE024B11_FLI
ctgttccagcgcctaatgcagcacctggatatgctgggatggcctaccaccatgtcatccaatcccaccaccaccaccctgcgccgcagcctgtagcaaacatggctggcaactacgggtatgagtttgctgatcctacgcgcccgcaagtctactactcacaggcagctgcacctccaacattgccacagtatccgcccattgtctctcctgatgctggccaggctgaaaaacattaagcagactgaggattggtgaattcagggtgaagatgttgctattaggcaaccgtgcatttgcactgggatcaaaacaagcatgcatcatccaaggataggttcagcataaggtttttattggatggttcttgtgttggtgagacagaagggtgccggattagttggggggagtgaagtgttgggtccctgttccaaattggtctttttttctttcctttcttattttgaataaatatagtgtccaaaagaacctggtggaaacgaagaactcatcatcatttgtgtagccctctgtatatttgatctcatggatgtcattcaggttgaggtgcagataagtgtgttattagcttgcttgtagaaaccttatgcgagttaaatatatatatacatcggtcccttattgtacttt

SEQ ID NO: 35467 - DNA, 1560 bp, Zea mays subsp. mexicana
  Clone ID: UC-ZMROTEOSINTE024C02_FLI
acccattctcttccagtaacacctgtaggaactactgacaaggctgcatctcctccaaatcaattagataccctgccaactacaactaatgaaggagttgaagcaaaaattaggcgctcactttcagtacctggaaatcgcaaaaacagaagtttgaggagggcagattcattaggtgtcatccgtgtgattccaacaaccccaagacctgtcccagtcgaagcaaccacatcaagcgatgtaattgaagaaacaatcgatgtccctgaagatggaggcgaagatattcctgaagaagaggcagtctgcagaatttgttttgttgaactcaacgaaggaggtgaaacacttaaaatggagtgcagctgcaaaggagaacttgcacttgcacaccaagactgtgctgtcaaatggtttagcatcaagggaaacaagatatgtgatgtctgtaaacaagaagttcagaatctgccagtgatgttactgagaataccaactcaaactgcaaacaggcgggtagcaaatgctgctcagcagagagcagctcaacaatacaggtaagattttggcaggacattccaattctggtgatggttagcatgcttgcgtacttctgtttcttggaacaacttctggttactgatttgcagtcacgggcactggcaatttcgttgcctttctcgtgtgtgttaggcctcctttcttcaatgatagcatcaactatggtgtcgaagagctatctatgggcgtatgcttcattccagtttgctatcgttatcctgtttgctcatatcttctacaatgtgttgaaagtgaatccagtccttgcagtcttactctcctcattcactgggtttggtattgctattagtacgaactctctactagtagagtatttgaggtggagagctaggaggaatcagcgtttggctcagcaggctgccaatgctgcacatcaccaagaatctggaaatgatggtggaaatgacaacgatggcgctcagcaagggcacgatccaaattctgggaacaatgctgtgtgatgattcaggttcttggtgcaaaaatccagcaccaaaaaaaaagattatgaaatggtatgggtgtgaacagctgtttttttatctgtacagcaagtatagctcattcaacgcggcaccagtcacaagctgaaacctggaaaaacatatcttcatatgccacgtggagggtgctcacggatatcattatacatcacgcagagatgaagcaaaacacgatatgtttgtgtattagtccggtagtttgacatgaaatgtatctgttattcattttaagcttaatagatctaatgcattatagaagtacatcgctaagtgtgtgcagcttatagttgtgagttgcgagtatagccccatatagatatacatcaatgaaatgtacctttccagtatattgaggtttgctagccggcacggaacggaagaaatactcagattgaattgtgatacaattgtctcaactgagaactacagaattgtatgcaatgcgagcgattgaaataccctgcttctcgaatct

SEQ ID NO: 35468 - DNA, 433 bp, Zea mays subsp. mexicana
  Clone ID: UC-ZMROTEOSINTE024D01_FLI
ggggaacaggctcaaggccatgccgcgcgtcgacagcgagggcgccatgtgcggcgccaccttcaaggtcgacaccttcaccaagatcaactccatgccccgtgttggcagcgccgccaactgggccgcctgggacgaagccatctagtagatctagccactgcgctgcctgcaatccgttcgccggtgcccctgcctgcccctgcccgtggtctttatcatgcttccagccacgagactttgcttctaaaccagaggctccatctgtgtgccgccttgttttactagaaatcctttttttttattttatcctttttcacttttcctgcctagttttttccttatcctggcattgtacaaataatttctccagtgcttgtagcttgtggacttgggttgtccaacatgtcatgaatacaaactgagtttgctt

SEQ ID NO: 35469 - DNA, 1467 bp, Zea mays subsp. mexicana
  Clone ID: UC-ZMROTEOSINTE024D06_FLI
gaaaagagcatgtaattaatttggagcgaacagaatcagagatctttgctgtagcgcctcctccacctccacctccgccctcaacaccgccacctccatctccacctccacgattgccatcaccacctcctgctgaaaaagtaactgtaaatcccattgtacgtccagtaaaaagagttaacactccgccaaggactggtccctcgacatctgcaacatccttttccgtggcatcacttcagcaatatacaaatagttttcaagagcaaaatttgataagggagagtagattgggaaaagtttatctggcagaacttcctgaagggaaattactggaagttatgaagattgataatgctaatgggagaataccagtagatgactttctagagttggttgcttgtatatcagatattagacaccctaacattcttgaattagttggatactgtgctgagtatgaacagaggttacttgtgtataaccacttcagtagaaaaacattacttgatgtactacatgaaggggaggatattgataatccattatcctggaatgctcgcctccagattgctcttcatgcagcaaaagccttagagtatctccatgacacctgtgaacctcctctagtacaccagaattttgatccagccaacgtgcttctcgataatagatgttcagtacgtgttgctgaatgtgggctagcagaattgatggcgtctggttctgttacacagctatcaggtcgtatgcgggctctactcaattatgtagcacctgaaatccatgaatctgagccttttactcagcgcagcgacgtatatagtttcggtgtggtgatgctagaacttcttactggtcgtaagccatatgacagctctcgtccacgtgctgaacaacatcttgttagatgggctgattctcagcttcatgacatgaagtccctgtcagagatggttgatccatctatccgaggagagtgttcagtgatactattgtcatgttttgcagacatcatcagtcggtgtattcagccgggaccagaattcaggccagcaatgtctcaaatcgtccaagacctagctaggattgtaggtgctagtagtgaggtatcagagtgacaaataaaggaggaacagtaaaacatctagcttgccagtggcgtggccagcgaagatccctagatccatagcgcagtgccaggggcactctatctatcagcatttatattggacgagattgcggctagtgtacatgccattttggagcctcatttacttctggaaaggtgtagactggtagtatggcacaaccagtgagatatggcttctcattgttgccgagcagattcatgtgctcctctagacatgataatttcacctgtaggcattatttcttgtaactaattctaatttttattactttattacattatggctagctatgttaaatatgatgccttttacc

SEQ ID NO: 35470 - DNA, 1914 bp, Zea mays
  Clone ID: UC-ZMROB73033D11_FLI
cttgtcctgtcgcactgcttgtgccgcaccagcttgttgccttccgcgcccggctgcgccagccaggctcgtccggccctcgcgccgcttacttctattttgcccggccccatagaattcgaaccgcaaatgagacaggcgctactgcagccgtgggaaaggaaacgcaaaacaacgccaacgccgtcttctcttcctggaggcgggcctgggaaggaggtggagcgcagctggctccgctagggtttcccctgttctcggtggaggcgccgcgcctccgggacacgggctgcgtcaggtgactgctgcaggctcgttgatgcaagggaggtcaagccgtctgtgattctcttcctgaagttctatcccgatgccgtccatcacgcactacgtgctggatcgcctcctagagacacggtcgcctgttcatgtccagaaggtggttcccaagcctccgcccccgcctcctgacaaggccacaccggtgccagtgtctactgccaggacacggtcgtcgctggcatcactctatgccacgcctgagaacaccaccctgccggacttgccttcctcgttcccgggaacctggtcgccatacctcatcaaccataagaggcggggagcctcccttgccaggaccttctctcagggtgatgctgggagggaggtcagccagccaaacctccctgtgatgctgcctgctttgccgagagggtgtgaacccactcaagtccaggagcccgagtttgtgtttcagcaagcaggcaatggtcaagctgaaggtgaaagtgctgtagaagaggctttgaatggcaaaagtgtaatgctacagaaaggcaaggggtctgttatagctgaaatagagcaggagcagcctgagtttgagttttgtcaaagtcttgaagcattagtgaagcctgttaatgttagaaggcctttgaatggtgaggcacccaaaatttgtgagagtgacacctttgaatggcggaagcctagttcacctcttggaacctctgttggtacaccaggtgcagaattctacgatgcatttgaagaaatatccagtgacggtggaactcggtcatcgcgaggcatggatgatgacctccgtgaaatgaggttaagtctgttgatggaaattgagaggaggacacaaacagaagaagcacttgagatctggcaacaggaatggaagaacctgagtcaccacctatctcttgttgccttatcactaccatctccaagtatagctgaggattctgattgtttaaaggtggatcctggagctgagttgtgccagcaaataactgtttcacaacttgtggctgctgctattgctcggggttttgctcgtgctgaagttgaatcagagatggaaactatgattgcgacaaagaactttgagattggaaggctgtcggatagggtccagtactatgaagctgcaaacagggaaatgtctcaaagaaaccaagaagctatcgagatgtcaaggcaacaacgcaaggggcgtaagaagcgacagaagtggttctgggcttcagttgggcttgcagtcacccttggcgccacagccattgcctggtcttacgtaactccgtcgcagccccaggccagtgcagatccaagtagtgctgccagccagtaagctactaagtaagctaggatgaagacatactcctcgttccagaagcctaacaaagatctagctatactcctatagagggaaaaaaatgctgtataagttttctctttggtgatcggccgtgatcgccgccgcaatcttgatctgtcgcttcgtttgtagaagcgttgtatggcccatctcgtagatggttgagcaaataacacaatggatgtgggcgtgtggctatggttagtgaaccatgcccgtagcccactcaagcggagttt

SEQ ID NO: 35471 - DNA, 2065 bp, Zea mays
  Clone ID: UC-ZMROB73033E07_FLI
acgagaccgtccaccgcgacgcgctctcttgcccgtgcccccgtcctccccttccccctccacctccgcggcgcccgcggtaacctcgccacgccacatcgcgtgcgagcaccaaccgtcgccggccctctaattaagctgcccgcgcggcgcgatccggtgtccaccgctgccccgccggaggaggaggaggaaggggggcggggggtggagcacagggggatgctagaggcgaagccgccgtcgccgggctcctccggcgcggccggggcggcggcacacatccacgctcaccggcggcgcggcgccgctgctggcctcggtcctgctctcgtcgatcctcatctccgcgtcgctcttcttctcctcctcccgcgcgctgctcctctccttctcgccgctcccctccgcggcctccgccgagcccctcttcgtcgaggccaagctccgccagcagatgcgggccgaggagcgccccgcgcgcggcgccgtgcccaggatcgcctacctcgtctccggctccgcgggggacggagccgcgctgcgccggacgctcagggcgctctaccacccggcaaacacgtacgtcgtgcacctcgacctcgaggctcccgccgccgagcgcgccgagctcgccgctgccgtccgcgccgaccccgtctacgccaggttccgcaacgtcaaggtcgtcacacgggcgaacctggtcacctaccgtggcccgaccatggtggccaatacgctgcacgcggctgccatcctgctgcgcgagggcggtgattgggactggttcatcaacctctccgcctccgactatccactcgtcacccaggacgacctgttgcatgtgctctccgagttgcccaggcagcttaacttcattgagcataccagtgacatcggatggaaggagtaccagagggcgaaaccggtgatcatcgaccctgggctatacagcctgcagaagtctgacgttttctggataacagagaaacggagtgtcccaactgcgttcaagctcttcactggctcggcatggatggtgctcacccaccagtttatcgaatactgcatatggggatgggacaatctcccaaggacagtcctgatgtactacgccaatttcctttcctcgccagagggctacttccacacggtcatctgcaacgtgccggagttccgcaacaccacagtcaaccatgacctgcatttcatttcctgggacaacccaccgaagcagcaccctcactacctcacgctcgctgacttcgacggcatggttaacagcaacgcgccctttgcaaggaagttcgggagagaagaccccgtgctggacaagatcgaccaggagctactgggccgccggcctgatgggtttgtgcccggtggatggacgtatctactgaatgcgacgactgaggaagggagacccttcgccgttgagcgcgtgcaggatctccgcccagggcctggtgtggacagattgaagaaactcgtcacgggcttgctcacacaagaaggctttgatgacaagcactgcctgtgagactgccccccagtaagatgattctggctgggggcggtagattacacggtcaaatcttgagggcattgaagccattttctgggaatatgcctactggctgaagaagcagcacatagtatcatgtgatgtacgcgtggatgcgagcaacggtaagataggtgctcttacagacagccgcctgagttgagctactaccgtacagcaggaggccacggacgtagccggcggagattatacaggaatagtagctcattaggttatgttagatgactatatcagccccttcccaaccgtcaataatgttgggaattttgacatctccgcggcgctgcgggttgtgcaaggcaggcaggcagtccattctttgcttggatgccatggcgcctggtgtaatcaactggtagcgtgtgaggaggcttcgttgtattgactagtgcatatttctgggcaaaacagatgcgtttggttgcacacatgtattcttttatcccttttcctctttgatgatgagtatagcag

SEQ ID NO: 35472 - DNA, 590 bp, Zea mays
  Clone ID: UC-ZMROB73033E10_FLI
ggaccgcctccgccggatgcgcgggtggcgccactcccccggaggactcgaggaagagataaggatgtttcagacaagagtgttactgggaggaatgaacatgtatgaccgctaccaggattggcgccttgacgttgataacatgacatacgaggagttgctcgagcttggagacaaaattggatatgtcaacacagggttacgtgacgacgagattactcgcaaccttcggaaggtcaagcacccatccttcagttccttacggttcgcaacagaaatggaaagaaaatgcagcatttgccaagaagaatttgaaacaaatgaagagatgggaaggctagactgtggccatagctaccatgtgtactgcatcaagcagtggctctcgcagaagaacatttgcccagtttgcaagactgccgtcagcaagaattgaaatccaaactccagtcacgctgtctgtagatctcggtgaaaacagcaaattctgttgtcctgtacagtccgttatatatattattattgtatgaacacaatccatttgtttcatcttgcagaaagaaaatgccatgttttggtcatgttccagc

SEQ ID NO: 35473 - DNA, 1388 bp, Zea mays
  Clone ID: UC-ZMROB73033F10_FLI
ccttaaggaaggaatgggtggtggtgggtcccatgctgatccatttgacattttctcatcattctttggaccctcttttggaggaggtggtggaagcagcaggggaagaaggcaaaggaggggagaagatgtagtccactcacttaaagtttctctggaagatctttacaatggaatctcaaagaagctctctctttcgcgcaatgtcatctgctccaagtgcaagggcaagggctcgaagtctggtgcttcaatgaggtgccctgggtgccagggctcaggtatgaaagtcaccattcgtcagctggggccttccatgatacagcagatgcagcagccttgcaacgagtgcaaggggactggggagagcatcaacgagaaggaccgctgcccagggtgcaagggtgagaaggtcgttcaggagaagaaggttcttgaggttcatgttgagaagggaatgcaacacagccagaagatcaccttccctggtgaagctgatgaagcgcctgataccgtcactggagacattgtattcgtcctccagcagaaggaccactccaagttcaaaagaaagggtgaagatctcttttatgagcacaccctgtctctgaccgaagctctatgtgggttccaatttgttcttacacacctggacaacaggcagcttctgatcaaatcaaaccccggcgaagttgttaaacctgaccaattcaaggcgataaatgacgaggggatgcctatttaccagaggcccttcatgaaggggaagctctacattcatttcacggtggagttccccgactcgctggcaccagagcagtgcaaggctctcgagtcggtacttccgccaaagccttcgtccaagctgacagacatggagatagatgaatgcgaggagacaaccatgcatgatgtgaacaacatcgaggaagagatgcgcaggaagcaggctcatgctgctcaggaggcgtacgaggaggacgacgagatgcctggcggagcccaaagagtgcagtgcgctcaacagtaagcagactaccaaaatgggattcaaggcactttggttgctcttcaattatgcgagtgcgcctgtggactgtatggttctatggttttgctgtcgctgagctacaaagtaggaagctgatgcgcccctggctctgcaagcgggggaatgtatccttttttgctgcaactgaaaaatgctacccaggcaatagctggctaccttataacttttgcttgtgagatttgctagagtgacgattttaatttgtaggtggacttaatgtttgtgtaaggctaggcataacatcatgtctcaatggacgttgccgttgcacattggtgcattttattttaatgtaacgcatgtgcttgtgctgtcg

SEQ ID NO: 35474 - DNA, 1331 bp, Zea mays
  Clone ID: UC-ZMROB73033G02_FLI
aaattctagggtttgcctcttccctctcggctctcgctcccaccaccaccaccaggcagacgcagatcggcggcgggataggctagcaatgatccccaattccgacttcctctagactgcctggcggtcgaattccgattcgattggagtagggaacgagaagggaacaaatacaccggcaccaccaccagaccagacagcacgtgcctccatactatggtttacgccccgtgccgctcatcgacgccgccgtcttcctcgccgatgctccacaagaacctccgcgccctcggacccggcttgaatcccttggctcccttcggcatgggcaactactcccgctagccgtttcctcctatccctctttctccgattccgatctctgagtgcttccgcctccgcccccggccgcttcctccatcggaaccgatccccgctattttactcccgttcgtttcattgttccgttgctttggatctgagtctcgagatcctcccctgtcctgctgctcgaggagccgccaaggataccaaaataccatggtgcaggtgcgcaggtcgctcagcatgagccgccttcggagctgccacgacgcggacgaccgtggctggaacccgctccatgttgctgctcgcaagggagacctcaaggaggtccgacgtctcctggatgagggggggatggatgtgaatgcacctgcatggggaccaaaatgtcctggtgctaccccactccatctggctgctcagggtgggcatgttaaaatcatggatgaactactggagcgtggtgccaatattgatgctcgaacaaaaggggcatgcggctggactcctctacacattgctgccaaggaaaggaacaagaaggctgtgagattcctgattgagaatggagcattccttcctcctgagatgaatgaccataggttcaatccccccctccattactgctctgggttagaatgggcgtatgagatgaagcgcatgcaggatgaaagcgattcgcctggcgaaacttcgttgagctcggataactagagagaaagcagcaggtgcatgcagcttgagaacgatgaagttaagtcaagtcattgagtacatttgcttgatgtctggatgatggagatgttctgttctgtgactttagaataattgttgagtggtacctgtaatatacgacgagtgatttgttgaataataatcatacactagtgtatagcgcgcacatgcgcgcatgccgttctgtggtgtaaaatcttgttataagcatgtataacttgatattgtatcgtgaacatgcatatatgcagagtagtcattattgagac

SEQ ID NO: 35475 - DNA, 1798 bp, Zea mays
  Clone ID: UC-ZMROB73033H01_FLI
gttggctgttgcaaaagcaaccgtttcaagtttcctccctagtgcacccaggaaatcgccagcacctcccctgttccctctctgtctctggctctctctcctctccgcccctttttatcgcccgatctcacacattttggaaagaggagagagagggagagattagagggagcgccctgcccaagcaaagagaaaccgcggcgcgagaagagggaggaagggcagacgggcgagcaggatgagagagatcatcagcatccacatcggccaggccgggatccaggtcggcaacgcctgctgggagctctactgcctcgagcacggcatcgagcccgatggcaccatgcccagtgatacctcggttggcgtcgcacatgatgccttcaacacgttcttcagcgagaccggttctggcaagcatgtgccgagggccatcttcgtcgaccttgaacccactgtcattgatgaggttcgcactggctcgtaccgccaactcttccacccagagcagctcatctcgggcaaggaagacgcagctaacaactttgcccgtggccactacactgttgggaaggagattgtcgatctatgcctggaccgtgtgcgcaagcttgcagacaactgcactgggctgcagggattcttggtgttcaatgctgttggtggtgggactggctctggacttgggtcacttttattggagcgcctttcagttgattatggcaagaaatccaagcttggtttcaccatttatccttccccacaggtgtcaacagctgttgtagagccatacaacagtgtcctctccacccactccttgcttgagcacactgatgttgcagtcctcctggacaacgaggctatctatgacatatgcaggaggtcccttgacatcgaaaggccaacctacaccaacttgaacaggctgatctcacagatcatatcatctctaaccacctccctgaggtttgatggtgctatcaatgtggatgtcaccgagttccagaccaaccttgttccatacccacgtatacatttcatgctttcctcatatgcccctgtaatctctgctgagaaggcttaccatgagcagctctctgttcctgaaatcaccaatgccgtctttgagccctcaagcatgatggccaagtgtgacccaaggcatgggaagtacatggcttgctgcttgatgtaccgtggtgatgttgttcccaaggatgtcaatgctgcagtcgcaaccatcaagaccaagagaactgtccagtttgtggactggtgccccaccggattcaagtgtggcatcaactaccagccaccgtctgttgtccctggaggcgacctggcaaaggtccagcgtgccgtgtgtatgatcagcaacaacactgccgttgctgaggtgttctcgcgcatcgatcacaagttcgaccttatgtacgccaagcgggcgttcgttcactggtacgtcggtgagggtatggaagagggtgagttctccgaggcccgtgaggacttggctgctcttgagaaggactatgaggaagtcggcgcagagggtgcagatgacgagggtgacgagggcgatgactattgagtagccggttaataattagttcgctggtgcttaatggttgagttattttgagtatactctgtatgggtccactccattgcgtgctgctgctgtgtgtttccattttgtattttgtgataaattgttcgtagccccctattggccatgattgttgttcatatcatcctgttttgatttgcaatgctattcatcgaagttcgatgtagt

SEQ ID NO: 35476 - DNA, 1909 bp, Zea mays
  Clone ID: UC-ZMROB73034D03_FLI
gtgagcgagtgcccacagctctgcaggctggcgaacaactacctcagcagcagcaagacatgcatggaggacatctacgggttcttcgccggcgccaaggacgacgccgccgagtgcctgctttatgtcaagctcatagaggagctggacagatgcatcctcggatattttgcgttccactgggaccatgccacctacctcatcacctcggccttgaccgcggacaccggcagcaaaaggaagctcaggaacatggtcttggaagcaacaaggaagcagcgtttcgagcgcgtgacgcgtgacctgaaggtgacgcgggtgttctcgacgctggtggaggagatgaaggcgatcggcatcatagcggcgggcggcgaggcgtcgcagtgcacggacgtgatggcccccgtggcgcactcggagcgcagcccggtgctgctgctgatgggcggcgggatgggcgccggcaagagcacggtgctcaaggagctgaagcaggaggcgttctggaccaacgcggaggccaacgccgtggtggtggaggcggacgcgttcaaggaggcggacgtcatctaccgcgccatcagctccatgggccaccacaacgacatgctccagacggcagagctggtccaccagtcgtcgacggacgcggcgtcgtcgctgctggtgacggcgctgaacgaggggcgggacgtcatcctggacggcacgctgtcctgggagcccttcgtggagcagaccatcgccatggcgcgcgccgtgcaccgccagcgctaccgcatgggcgtcggctacaaggtggccgacgacggcaccgtcaccgagaactactgggagcccgcgagcgacgacgccaccgagcaacccccgcggaggccctaccgcatcgaggtggtcggggtcgtctgcgacgcctacctcgccgtggcgaggggcatccggagggccatcatcacccggcgggccgtcagggtcaggtcccagctgcagtcgcacaagcgcttcgccgccgcgttccagcggtacagccgcctcgtggacggcgccaggctctacagcaccaactccatgggctccgccaagctcatcgcgtggaaggacgggatcggaaacagcctgctggtggagccccgggagttcgactgcctggagaaggtgagcgggctcaacgagcacgccacctccgtccacgacctctaccccgacggcaccaccacctgcggatcgcgctccatctgggaggacatgatcgtctccacggcccgtgccgacacccagcgcgagctcagggaggccatccgctccgtcgagtccggcggcgggcagccggacacaccaccaacaacgccccagcgcgagctcctgggcttcatccgctccctggaggccgccaacgccgagccagctgcagttgacaatggtctctaaattttaaaccataagatttaagaatcgaatcagataatcggaccatatttctatttatttttgaaaccaacatttaattgagactattttattttgtgaaaaagtatttggatcgtgatccattaccacccttagctgcagcaggtcagacaccgacaactacctcttagctagtgctggaaaaatacgggacatgctttttggtcagcacaaacacaacccaaaaacaataggttaaagcacggaccgacacgaaataatatggaccgagttagtacggtccgaaggcgggcctaaaccgagcctcaaattctggcccgtcgagccccggcacagcccacacagataggttgggcttgagccggcacggtctgatgaaactcatgtgtttaattttatttaatttagtaagtgatagactttatattgttatggtatttagagtttatgtggtcaaataatgatgtgattgtttaac

SEQ ID NO: 35477 - DNA, 2035 bp, Zea mays
  Clone ID: UC-ZMROB73035A07_FLI
cagcttcctgttcaccatggactcgagggagtgcatcgtcccgtcaaacaatcctgctccaatcttttgacgtcttcgctgggcctgtgccgcctccccgtacccgccgttcctgcaccgtcaaaccgccagccaagagtccatttttttttcttatcaaaagtttgcgtttgatcggtttcgtttctaagagctgcgcgagatgtccttgttccgggaagggaggaaacgagaggctctgttcctgtcgcgattgttggaggacctcaccatagtttgaggcggtgaggtggaggcgatagagaagacgagacaagaagcagccgccaggagctgagctgaggccctgccgccgtcttgccccaactccaagcgatgtcttgcttccgctgcttcagcggctgcaggaccaagaggggcaagggcgagaagcgccgggaggggtcgacggcgccggcgtccccggcggccgcctcgttcccgtccaccgtctccacgggcgcgccatccaacctcaccttctccacggcgtcgtcggccgtcgtcacgagccactccgaggactccagcgcggtcatgcggccggaggcgaccaagtcatcgggctcggcctcggtgtcgtcggcgcggagcatcccggagctgtacgaggagaggggagccagcagcctccgggagttcgggttccgggagctccgggccgccaccagcgacttcagccgcctgctcaaggtcggcgagggcggcttcgggagcgtttacaagggcgtcgtccgccttcctggcgggcccgccggcggcacggtagttgccataaaaaaactcaatcccaatggtcatcagggccacaagcaatggttggcagaagtccatttcctgggggttgttgagcacccaaatctcgtcaggctcattggctactgcgctgctcaaggcgagcgaggtccgctgaggctactggtctacgagttcatgacgaacaagaccctggacgatcatctattcaataaagcataccccgtccttccatgggacatcaggttggagatagcgctggatgccgctgagggattgctgtacctccatgagggattggaagttcaggtcatatatcgcgatttcaaagcttcaaatgtcctgctggacgaggagtttagagcgaaactttcagatttcggattggcaagggaagggccatcagctggtgatacccacgtctctacagcagttatggggaccttgggctatgcagctccagattatgtcgagacaggccatctcactacaaaaagtgatgtgtggagctttggagtagttctatatgagatcctcactggacgtcgctcaatagagaggaaccggcccaagaacgagcagaaacttctggaatgggtcaggctgtatcccgttgaaagcaagcagttcagcaagattatagatgcaaggcttgagggccactactctaagcagggcactagaaaaattgccaagttggccaatagttgccttgcaaagcacagaagggaccgtccaacgatgagagaagtggtcgagagcctgaaacaagcaatgcagcacaaggagttggatgggaaagcaggggctttgaatgagacttcaccaccagaggaaatgtctggaaaaccaagcacagaggatgttgccgtggcatcagcaaggcggaggatgcttcatttggctgccctaggtgagaatgcaaacagcattgcgaggaggagattcatgttcatgaggactgcggcttctccaactcctacgtaattttgagttgtagttgtgatcttttctctctctttttgaacaaatgtgatcttttcttttgactttgtactttttgaagtggttatgaaggtaggatcattggggatgttttcaccatgtcatgtataaatctattagatggccagacattgtttttttacttgtgttctttgtataggtagggtagatctgagacccaagagttactatgtaaaaaggtttcactgctataaggatcataggtgtgaaatgt

SEQ ID NO: 35478 - DNA, 1243 bp, Zea mays
  Clone ID: UC-ZMROB73035C10_FLI
cgagtagccagtggtgtccctatggattcagcttttagaagagctctcaatgagcctatgtgcttggaagaaaccgtcgtccaacaaggaattgaaaggtgcccattcctgaggaacatcaatgagcctacaagtttttccttctcgtccgtcaacttccctattcccgcaagaggagccaagggaccgattttcgaagatgggcctaattttgacatggcatttcgagttttccatggtagagatggggttgttccactttcagaagggtcattggcccagattgagaagccactgccaaagcccaatcctgagttcaacccattggcagccaaagcagcaaccatcagtctatctgcatttggagggtttttcagctttggtgacttctcaaataagcgcaataagaaaaactccaacaagaagaaccccaacaacctcccccagaataaaggccagcctaacaataacaaccatgaagcactgagcaacgagtggctggagatgggccaatgtccacttgcgaaatcttatagggcattaagtggaattgtgccacttgtcgcaaagatgatgacacccccagctggtatgaaacttaagtgcccacctgccgtggttgctgcccgcgcagcactatcccgcacagcctttgctaaggggcttcgccctcagcccctgccaacaaaaatactggtgattgcattgcttggtatggcagcaaatgttcctctgggcatctggagggagcacacacagaagttttcattgcagtggtttgccgcagtacatgctgcagtgccgttcatagggatgctcaggaaatctgtgctgatgcctaagacagccatggcccttactatagccgcctcgatattgggtcagacaatcgggtcaagagctgaacgtatcagactgaagagggccgcggcagcaaaattagcaagagagagccatggtgacgctgctgactacatcaaagcaccaatgagtctgaaaacagggaaccacactgttcagttttgggatccgctttccctcagagctgaaagcacagtggctgcaggtaccacagcagttcttgtccctgccatttctgctttcaactgatgacaggaatggattcattacgattgtaccagcatcgctggttggtgtattcttttttttctcctattctaaataatctgattgttgtatccattactgtacttttgagcttaagaaagaaatacttcacggc

SEQ ID NO: 35479 - DNA, 1844 bp, Zea mays
  Clone ID: UC-ZMROB73035F03_FLI
agaaaggcaagcaagaaagcagcagcgatgggagcagttctgatgatgagtcagacgatgatgttaaacctgctgccccactaaagaaaacatctgtggctgttgcacaaaagaaaaagggagattcttctgagagtgactctgatgatgactcagatgaggaagtgcctccaaagtcaaaggctccagcagcaactatcaaaaaggaagattccagtgaaagtgagtcagagagtgattctgaggttgaggatgcaagtaaaactcagcctgctaagagagctgcttcaaaaatgaaagatgaatcaagtgatgactcagacactgatgaggatgaagaacctcctcaaaagaagcagaaggaagcactttcagctgcaaaaaaagaaagcagcagtgaggatgaagatgacagtagtgaggaaagttcggatgatgagccaacaaaagttgaagaaaagaaggctccaaaagtatcagaaaacagtggatcggaggatgaatcttctgaagacgagagtgataaagacagtgaagagcctgctaatactccaaagaaggctgctgtgcacgcctctgaaaagaaaactgctaccaaagaacctaagacgcctactggctcccaaagtgaatcaacggaggtgaatacactttttatgggaaatgtcccctggaaagctgaatttgatgatgtgaaagaattttttgaggacgttggtgaggttgttgatgttcgttttcctacacatgatgatggcaatcgtaaaggattttgctatgttgaatttgtttcagctgaagctgctgcaaaggcatataaagagaagcaatcaaaggagctgcatggtcgtgaagtaagacttgacttcgctaaaggaagaagtacacaaactcctcgcagcggcaatgatggatctttccagaaggctgctcggggtaacagcagttcaatatttatccggggctttgataaaaatctttcagaggatgagatccggagctctctcgaacaacattttagtgattgtggtgagatgacaagggtctctatcccgactgatcatgaatctggtgcaataaaaggaatggcttacatagacttcaaggatcaggactctgtgtctaaagcccttgagctcagtggctctgacattggtggtggctatgagctttatgttgatgaagccaaaccaagaggcgatggccagcgtggtggtggtagatctggtggccgttctggtgggagatttggtgaccgttctggtggccggcgtggtggtggtagatttggtgaaagatctgggggcagggatggtggcggcagattcggtggccgacgtggtggtagggatggcggccgaggacgtggtggccgtggctttggtaacaagcacagcgctggcactcccagtgcaggtacaactcatcctgtaattgtgaagttcactgcattttggtttgagcaaaaaaattgccgccctgtggtttctggcttcaaaaagcttgaggtcactgctgtactacctcttatttgcacaggaaagaagactacttttggtgatgattgatgatgaacgcggaggatgcggcaaaaggatccaatgaaattgtgtttttttggtcttgttgtggtaccgtaactggaatttggtattttttgtctactatttactgtagtggtttctggattttccttgtgttgcctatgctgcaatacaccgttttgttgttgcgatacatctgtagtttggttttgttatccacctgtcgtttataagaagcggctgtactcaggctactatgccgaactgaaatgggaatggagcaaaacgaaatcttagttc

SEQ ID NO: 35480 - DNA, 888 bp, Zea mays
  Clone ID: UC-ZMROB73036B05_FLI
aaccgtcgtggtacaatctgtgacaagtgtcctttggcttggcatccataggccaccgccatcagcagtccaatacagtgacctgacctccacgcgaagccaccaccacaactccacaagatctagaacctaagaacctgcagaggagaggaagaggagcttggggaggagatggccggcgccgagggcgagaggtgggtggggctagcaacggacttctcggaggggagccgggcggcgctgcggtgggcggcggccaacctgctgcgagccggcgaccacctgctgctgctgcacgtcatcaaggagcccgactacgagcagagcgaggccatcctctgggaatccaccggctccccgttgattcccctctcggaattctctgaccctatcattgcgaagaaatatggagcaaagccggacatagaaaccttggacatcctgaacactacagctacccagaaggatatcgtggtggttgtgaaagtcctgtggggtgatccgcgtgagaagctctgtcaagttatccatgataccccgctgagctgcttggttataggaagcaggggccttggcaagctcaagagggtgctcttgggaagtgtcagcgactatgttgtgaacaatgcaacctgccctgtcaccgtcgtcaagtcaacaagcaccgaaggttgatcttatcgccgagatgcctggatgtgatgttgtaataaagatggttggcctgatgaagaacatgcactagtttctagctatttgaaacatgttgaacgaggcaattctaatgtaataataatagacaaagtgccttatgaaggacatggttgacatgcctttgttgctgtatgagtgatgtttatagttttgagggtttgaagatgtggatcc

SEQ ID NO: 35481 - DNA, 1458 bp, Zea mays
  Clone ID: UC-ZMROB73036B07_FLI
agccatcactgatcatagcatcagcagcttagtataccgtaccgctccacatccccgagctagaagaagaagcccggccagtacctacatctgcctagcggcgcgagcgaagctagcagagatggcgagagcgctgccgctggtgctcgcggcgtccgtcctgctggcggccgccgcgctgctgctggccgcggcgccggcgccggcggccgcggtcgacttcggcgcggaggacctggcgtcggaggaggcgctgtgggcgctgtacgagcgctggcgcggccgccacgcgctggcgcgggacctgggcgacaaggcgcgccgcttcaacgtcttcaaggccaacgtgcgcctcatccacgagttcaaccgccgggacgagccctacaagctccgcctcaaccgcttcggcgacatgaccgccgacgagttccgacgccactacgcgggctccagggtcgcgcaccaccgcatgttccgcggcgacaggcagggctcctcggcgtcggcgtcgtcgttcatgtacgccgacgcgcgcgacgtcccggcctccgtcgactggaggcagaagggcgctgtcaccgacgtcaaggaccagggccaatgcggtagctgctgggcgttctcgacgatcgccgccgtggagggcatcaacgcgatcaagaccaagaacctgacgtcgctgtcggagcagcagctggtggactgcgacaccaaggccaacgccggctgcaacgggggcctcatggactacgcgttccagtacatcgccaagcacggcggggtggcggcggaggacgcgtacccgtacagagcgcgccaggcgtcctgcaagaagtcgccggccccggtcgtcaccatcgacggctacgaggacgtgccggccaacgacgagtcggcgctcaagaaggcggtggcgcaccagcccgtgtccgtcgccatcgaggccagcggctcgcacttccagttctactccgagggggtcttctccggcaggtgcgggacggagctggaccacggcgtcgcggcggtcggctacggggtcaccgcggacggcaccaagtactggctggtcaagaactcgtggggccccgagtggggcgagaaggggtacatccgcatggcgcgcgacgtggccgccaaggagggacactgcggcatcgccatggaggcatcctaccccgtcaagacctcgcccaaccccaaggtccacgccgtcgtcgacgaggacggctccagccacgacgagctctgaattgcgcactacactactacgtactagctatagcctatatagctatactatgattgatccatgtatgctcggacaggaacatcgccgactgtgaatgtctgaatggcatacgcacatcgtacacctgcattcatgtaataccagtcgagagttgatctaccagcaactttcatttcattcggttattattatattatttaact

SEQ ID NO: 35482 - DNA, 2057 bp, Zea mays
  Clone ID: UC-ZMROB73036C10_FLI
gcgtacgccgcttcgtcctgattctcaatctctggtgctcccatgaagaaagacagggaatgaaggaccgccacctcgcgctgaaccagacccagagggtccgcctcgaggccgcgcttcaagagctccagtccgttgcgcccgccgctgccgtcaccgtcgcggacaccattcccgtcaatcaagaggacaacatcctcaaggggcatgggacgtcggaccaggacggggaggtggttgcgacgctctgcggggtggtggagcgggtcaacaagctggtctacgtccgcactcttcgcgcgagctgcagattctcgatggagatgaatggggttctgcaagccgcggatgccaagtactgggtttacaagggtgagggcgccgcgaatctcatcctcagctacaccggctcatcccctactatgcttggcaaggtattgcgggtcaagaagcttctaaatgacaagtcacagctgccaccaagttgtatggtcttctcaagtcatgagcaactcctgtggggccatattccagaactggttgagtctgtcaaacaagattgcttggctcaagcctatgctgtacatgttatgagccaacatctgggtgccaatcatgtcgatggtggggttcatgtacgtgtttctagggattttctagagcttgttgaaaagaatgttcttagcagccgtcctccttggagagtaaatgcaagttcaattgatatcactgctgatgccgctcttctaatagcagaccactctttattctctggtactccaaagggtagcagctgcatagctgtagagataaaggccaaatgtgggtttgtgccatcatcagaatatatatcaaaagataattctatcaagaaacaagtaacgagatataaaatgcatcagcacctcaaatttcatcagggtgagatatcgaagactagtgaatacaatcctcttgatctattttctgagtcgaaagaaagaataagcatggccatcaagtcatttttctcaactcctcagaacaacttcaggatttttgtcaatggatctttagcttttggtggcatgggaggtggtgcagatagtgttcatcctgctgacactgataagtgcattaaagatctcagcaaggtcagtggcctggaactccctgacttcactgagctcctgtcagagacaattttcaaatctggggtattgggcaaactgttgaccactcaaaagctggatgatcatgacattgaaggggcaattcatctgtactacaacataatttctcagccttgtttagtctgcaaaaacctaactgatgtagagctattgcggaagtacacactcttgcattctcttccgttggacaagagcttgaagattgtcagaaacttcctcatttctgctactgcaaaggactgtagcctgatgatcagctttcggccaagagagaatggaagtacagattctgagtatgattcagtgtttcttgaatcagcgaagcgaacctatgagtacaagacatatttcgttgatctggatgtgaaacctctggacaagatggtacattattttaaactggatcagaggatagtcaattcctacacaagatatggggaggtcttgccacctccaaagggcaagtaataccaaagacacttcggcgattcagctccaacaatgaggagcctctcttcttactatatacgtctggactatggagaagggtgcatcagagagctccagcccactacgcccttaggttctgtgcatatattgttgtatctcttaactgtttgatgatatggaatattcttttcccaatatggtaccgagcctttcttgagcctcctcctcgctgccgctcttcttcggaatgccgcggcatttgccctcccctcatgtttggcgagccggctgcacgtacagcacgacagtgagtgccagggacatgcacatcatggcgacggtttaagcttgtggacactcagcagatagggtgatgaccgccattccctgtatgacagacacgatgtgcatgcaacatgatcagccattcgatgc

SEQ ID NO: 35483 - DNA, 1659 bp, Zea mays
  Clone ID: UC-ZMROB73036G01_FLI
atggttctaggtctctcctcgtaccagcgtctccaaatctcacgctctctcctcctccccatctccaatctcgcactctcctctcccaaaaaacctcatcttccccgctcgtctgcattctcggccatcggcggcgctccagagttccaggccaggagaagctagagttacaaatcgtagtccgtgagaaccagttgaatttcatcaatcttatcaggtcatctcaagttcagtgactctcaaccagcctacaacgacggaaaggaagttggcaccttcaagggtcctcaaacattgctgcaccggacgttgtgtcgtgtatcattgaatgaagcacacctaggttagcaaaggcatgccagattctacatgttccaagaatgacaacatttagtccatcctgaaatacatcaagagaccttccttcctgatataggaaggcagggttcatgagcggcggcacgcctgcagcaagcagtagcctgcgggcagcactctcatactgcgtgaggcaagtccgcgcctatgactaccaccactacctctgccttctccacctggccccggccgtgcgcaaggccgcgttcaccttccgcgccttcaacatccagacagcaagggccatggatgtggtgtccgacccccggaccggcctcatgcgcctcctctggtggaaggaggcggtcgacaaggtctttggcaacaagctggtcgagcacctagttgcccacgcgctctcttcggtcatcgcagaccataaggttagcaagcactggctgaagcggtccgtggaggcgaggatcaacgacaccaaccgtgaggaaggcaccattcctgggacgagcgcggagttggagaggtatgcagaggacacccagtccaccatcctttacatgaccctgcaggctggcggaatacagtctaccgtggctgaccacgccgcctctcacatcggcaaggccagcgggcttctgttactgctcaaggcgctgccgcaccatgtaaataagcaagggacggtacattatatcccagctagtgtggccgaggaatgcggcctgctcatcacacgggagggtggcaggtcggaggtcagggcgggcgtgaggctgccagacgtagttttcaaggtcacatctgttgcagaggctcacctgcacaaggcgcgggagttggcatcgtccgtgcccaaagaggcgatccctgtgctcctcccagccttgccggcctaggtcctcctagataccctgcgaaggtgtgagttcaacgtgtttgatcctcggctgtcgaggggagtccacgaggtctctcctctgtggtaacagctgaagcttaactggaacgcgtggcgaagcaggtactaatgaggaggaggaactttttgccctcaaccatgggagctgctgttgttccttgtagcaaaaagctttttattggggggtttttgacatagcagagattgaataagatgagtagggtctgctacttgcagcagatttgaagctgttgaatatgtgtcgtgctttctgttgtgtttgtgggttgggctcatttacattgcacaattgcaacactgacaatgcctattttatttttgttttggaacatacaatgcctgtttgtattcatacagcagaaagcagacactatttttttgat

SEQ ID NO: 35484 - DNA, 1898 bp, Zea mays
  Clone ID: UC-ZMROB73036G10_FLI
tgccactgcccttccatctcgtcccttagctacaagtcatctcgccgcaaccggaacccgcagccatggggacggaggcggagcagccggacatggacagccaccgaaacgacggcgtcgtggtggtgccagcgccgcgcccgcgtaaggggctcgcctcctgggcgcttgacctgctcgagtccctcgccgtgcgcctcggccacgacaagaccaagccgctccactggctctccggcaacttcgcccccgtcgtcgaggagaccccgccggccccaaaccttagcgtccgcggacacctcccggagtgcttgaatggagagtttgtcagggttgggcctaatccgaagtttgctcctgttgcggggtatcactggtttgatggagacgggatgattcatgccatgcgtattaaggatggaaaagctacctatgtatcaagatatgtgaagactgcccgcctcaaacaagaggagtattttggtggagcaaagtttatgaagattggagaccttaagggattttttggattgtttatggtccaaatgcagcaacttcggaaaaaattcaaagtcttggattttacctatggatttgggacagctaatactgcacttatatatcatcatggtaaactcatggccttgtcagaagcagataagccatatgttgttaaggtccttgaagatggagacttgcagactcttggcttgttggattatgacaaaaggttgaaacattcttttactgcccatccaaaggttgacccttttacagatgaaatgttcacattcggatattcacatgaacctccatactgtacataccgtgtgattaacaaagaaggagctatgcttgatcctgtgccaataacaataccggaatctgtaatgatgcatgattttgccatcacagagaattactctatttttatggacctccctttattgttccgaccaaaggaaatggtgaagaacggtgagtttatctacaagtttgatcctacaaagaaaggtcgttttggtattctcccccgctatgcaaaggatgacaaactcatcagatggtttcaactccctaattgtttcatattccataatgctaatgcttgggaagagggtgatgaagttgttctcattacctgccgccttgagaatccagatttggacaaggtgaatggatatcaaagtgacaagctcgaaaacttcgggaatgagctgtacgagatgagattcaacatgaaaacgggtgctgcttcacaaaagcaattgtctgtttctgctgtggattttcctcgtgttaatgagagctatactggcagaaagcagcggtatgtctactgcactatacttgacagcattgcgaaggtgactggcatcataaagtttgatctgcatgctgaaccggaaagtggtgtgaaagaacttgaagtgggaggaaatgtacaaggcatatatgacctgggacctggtagatttggttcagaggcgatttttgttcccaagcatccaggtgtgtccggagaagaagatgacggctatttgatattctttgtacacgacgagaatacagggaaatctgaagtaaatgttatcgatgcaaagacaatgtctgctgatccagttgcggtggttgagcttcctaatagggttccttatggattccatgccttctttgtaactgaggaccaactggctcgacaggcggaggggcagtgaagatacggcacctgcagattctgcacacgcgggtacatgttggaagttattgcaggacatgtatatgtataggacaagtttattacacatgtattcgaaccacacattacacaagtttattgcaggacgtgtattcgaaccacacattacacatgtatatgtgtaggacaagtttattac

SEQ ID NO: 35485 - DNA, 1513 bp, Zea mays
  Clone ID: UC-ZMROB73037A05_FLI
ccgacgcgctcgctttctcgggcctccgcgccggcgacctcctcccgcgcgccaacgccgccgccgacagggaccgcgcgctccgcgtgctcctcaagtcccccgcggcgtcgccgtcgtcctcgcccaagaagtccgcctcgccgccaccgccgacggcggcagctgcggcgccggagccgaggaaggagtacccgcccgacctcacgctcccagacctcaagagcgggctcttcagcaccgacgagttccgcatgtacagcttcaaggtgaagccctgctcgcgcgcctactcccacgactggaccgagtgccccttcgtgcaccccggcgagaacgcgcgccgccgcgacccgcgccgcttctcctacagctgcgtcccctgcccggagttccgcaagggcggcgcctgccgcaagggcgacaactgcgagtacgcgcacggcgtcttcgagtgctggctccacccggcgcagtaccggacgcgcctctgcaaggacgaggtcggctgcgcgcgccgcatctgcttcttcgcgcacaagcccgaggagctgcgcgccgtcaacccgtccgcggtctccgtcgggatgcagcccaccgtttcgtcgccgcgctcctcgccgcccaacggcctcgacatgggcgccatgctcaacccggcctggccctcctccccggccagcaggctcaagaccgcgctcgccgccggccgggagctggacttggacctcgagctgctcgcgctcgaccagtaccagcagaagctgttcgacaaggtgtcgtcgccgagggccggctggggaggcgggatgggctcgccgctgcccgccgcggcgcccagcaccagggccgtgccggactacgcggacctgctcggctccgtcgacccggccatgctgtcccagctgcacgcgctgtcgctcaagcaggccggcgacatgccggcgtacagctccatggcggacacgcagctgcacatgccggcgtcgcccatggtcggcccgaactccgcgttcgggctcgaccactccatggccaaggccatcatgagctcccgcgcctcggcgttcgccaagcgcagccagagcttcatcgaccgcggcggccgcgcgccggccgcgcgctcgctcatgtcgcagcagcccaccgccggcgcgccgtccatgctctccgactgggggtctccggacggcaggctggactggggcgtccagggcgacgagctgcacaagttccgcaagtccgcgtctttcgcgttccgtgggcagtccccggcccccgcgccggctcccgccgagccagacgtctcgtgggtgaactctcttgtcaaggacggccacgccggcgacatatttgcgcagtggtcggagcaggagcagatggtggcctaatctatcgaccgtcactgctggctcatagcatctagctgaccaaagttcattcctttccttcaattgttttccccctttgtttgcttaattcgattcatatgagatgttttttactagtacat

SEQ ID NO: 35486 - DNA, 1228 bp, Zea mays
  Clone ID: UC-ZMROB73037A09_FLI
tccatcagatccaacgccaccagctagcagcagcagcagcagcatggccaccaccagcacgcctcgcctcgccaccctcctggtgctcctggcggcggcgtcaccgctgctgagcgcagctcaaaaggccgccccgaaggctccggcggcggcgaaggcggcgccagggccggcggcgtcgtcgtcgtccggcgcgggcgcggcggacgcggcccctcccacagacgtgaacaaggcgctcaaggacgaccagttcagcgagttcaagcagctgctgcacgacacgcgcgtggacacgcagatcaacgcgcagctgacggacagctacaacgggctgaccatcatggcgcccaccaacgccgccttcgacaagatgaaggccggcgtgctcaacgggctgtcgccgcaggaccagatccagctcgtcctctactgcgtgctgccccgcttctacagcctctccatgctcggcaccctcgacggcaaggtcaacacgcagggctccggccacgacgggccctacaggtacgacatcaagcggtcgggcaacaacgtcaacgtgtccacgggcgtcaactggatgctgctgggcagccccgtcagcaaggacttcccgctcgccatctaccccgtcgacaaggtgccgctcccctacgagctgttcgggcccaagccgcccaccccggcgcccgcgccggccccggcacccgccaagtccaagaccaagaagaagaagaaggccgccggcatcgccgagccgcccacggccgacgacgacacctccgcctccgacgaccagaaggcggccgccacgcccggcgccgccggcagctgggccgccgccgcgctctcggcgctcgccgctgctgccctcggcgccggcctcttctgatggggagagggaggatagagtcagtcaccatcgttcagatttgagatcacacggcgcggcgctactgcggtggcgatcgatcgctcctgcgccgcgcgccgtgcattgccatacaatgtcgcacggtcgatacgatcatagagttggtgtgccccatccatccatgtacccatccatgcatttgtggctttattaattctttcttccccttcctttctctccccttttcctttcggcggatttctattggtgatttgtatttgtaacctaatgtgatgtacacaagtagtgcttcctctttcactggatggatctttggcctccgagatctggacc

SEQ ID NO: 35487 - DNA, 2131 bp, Zea mays
  Clone ID: UC-ZMROB73037D08_FLI
cttcctccgcctcttcccgcgcgtgttcgacctccgcgccccgctcccgctctccctgtccctgacccccgccgccgcgggcctcctcgcagtcgccagctcccccgccgacgcagcgcggacgctccaccgcctcctagcgatgtcggtcacccgctccctgcccctccgcgccgtcttccgcgtctggcgcgagctcgccctccccgacgacttcgaggactccgtcgtcgaggggcacccacacctcttccgcctcgtctccaatcccgccgagcccaacactcacatcctccacctcgtcgccgaccaggcgaccgaggacttcaccccggcggtggagaaggcccgcccggacaggtacgccttcaaactgcagtttccgccggggttcaggctggccaaggaatatcggaagaaggtgaaggagtggcagctgctgccttacaccggaccgtatcaggtcgtcagtccgagcgctggaggtagcaagagggtgtcgaagttggcgaggaggaagatggagaagagggcagtagggattgcgcacgagttcctgagcctgaccgtggagaagatggtggaggtggagaagttcagtcagttcaggaagtggtttgggatcgaggtcaatgtccgggacgtgttcttggatcatcccgggatattctacctctcggcgaaagggaagcggcacacggtgtttctgagggagatgtatgatcgtggaaagcttctcgagtcgaatgatgtctctgaggcaagagccaaactcgttgagctcatgctccttcgtcggcgtggtctcgggaatgccaattcaagtgccaacatggcttcaggtgccactgctgatgccagagagagtggtgatgattttgttgatcatgaggattgtttgttggatgtatcagagaagtgatggtagaaggatgttgtcaacttcatgggaactcatgtcagtaagccatgttgaacggtgcttagcgcacttctgatggagaatggattaatggtaccacggacaggaggtttgtgtgctggagataaccaaatgagaaggtgcatggatttccagagtggtatgacttggtcgacaaagctagaggccatggatatgcttggaactcaaaagtcatgtttcaactgtgcgctaccatgttggtaggtcgagattcatgaggaaatgttgaacctttgaatttcggtccccttcagttctctgctcagattctttttcctgacaaatcattctgccaaggttgcttcattccatttgatttgtcaggattcatgagtttgctctacttcttcactttgatctggcagatgtactttttggttgtggcaatcgcctgaagtacaaccactggttggtgtcattgcctgaatcttattatttgaacaaagcattgcctgaattgaagagccaggcatcattcttcagcaatttttgcaacccgggtcgtttttgcaacattcttaggttcaacagaccagcaagatgtgcaaacatgcttcatgttgttggaccacttcaggcacctacatcgctagttcagcttttgagttccttattcgtacgatataactttatcctttcaacaattacgcctactctgatgtggggacattgagcacctatgaatcttaaggttttctgctggttgtcatcacaaaactagttcctgatgttcaaatatcaagaagagatggtggttgaatagccctatatgttggctaatggagagacagtccggcaccttgtgataggcagataggggtggagtaatggtactgcattgttgctagctgtttctctatatctaacaattttgtggcaaggaaacttaccagccagtctgtgtgctgaagattggtggttaccgtctgcctcgctgcagctgtatcttcaattcttcatacacattacttctgctgtcttttcttgcctggagttggttctgactcttcgctttggagggcaaaatgctagtattataattcagaaccattgttgcgataatttaaaattactttaggttattccagttatcagcctattattgttggagattggctgttaaactatgcctaaaatttgaaatggggagagaaccaagttttgttc

SEQ ID NO: 35488 - DNA, 1210 bp, Zea mays
  Clone ID: UC-ZMROB73037H10_FLI
ggccgtggcgctcctcgtcctctgctaccggtccagcagcgtggtcaccgtcaggccctgggcgacggggctcagcgggcagctgcagaaggcgttcgtcacgggcgtgccgtcgctcaagaggtcggagctcgaggccgcgtgcgaggacttcagcaacgtcatcggctccctgtcggattacatggtgtataaggggacgctgtccaccggcgtggagatcgccgtggtgtccaccaccaagaactctgccaaggagtggtccaagcactgcgagtcacaattcaggaagaagataacaagcctgtccagagtgaaccacaagaacttcgtcaacctgctgggctactgccaggaagagcagccgtttacgaggatgatggtgttcgagtacgctccaaacggcacgctcttcgagcatctgcacgtcagagaagacggttacctggactggcccactcgcctgcgcgtggcggtcggcgtcgcctactgcctggagcacatgcaccagctgagcccgccggagatcctgcgggcgctggacacgtccaccatctgcctcaccgacgacttcgcggccaagatctccgacgtcttcttctgcgacgagccccgccggcaggaggggagcctgtccctgtcggcgctgtcggaccgggagagcgtggtgtacagctacgggatggtgctgctggagaccatgaccggccggttcacggcgtccgacggcggcctgctagaggcctgggccgcggcctacctgagaggggagcggcagctccgggacgtgatggatcccgccctgcggcggtccttccacgccgccaccgtggacaggctggacggcgtcatcaggggctgcaccgaccgggagcccaggaggcggctgaccatagcggaggtcgccaagcgcctgagggagatcactgccatgtcacccgacgcggccacccccaaggtttcgccgctgtggtgggcggagctggagatcatctgcgcagaggtcaactgaggtcaacctgagacggacgtgccaatgtttgtcgtgaaaaggctgtttcgtggtagatacacaggttgcttctttttgatatttttattttttaggtttatgttgaagtttgtgtccatctgtacatatgaacaaaatgaagtgtgcaaccaagctgattgttttaaaatattattttaataattaattattaaaaag

SEQ ID NO: 35489 - DNA, 1887 bp, Zea mays
  Clone ID: UC-ZMROB73039A10_FLI
gcctgccgcacatgctttaagtcccactccccacctccccagatctccgccctcctccccaccgcccccattcctcccctcggccgcaaccgtagccgccgcactacggagcaagatcgtcgggtagacggacgggcgggcgggcgggcgcggctctgtatctatctgtcggtgggagaccgcgtgtgtcggttaggcggcgggtggcaaggaagaatggcggcgagcggcagatccgtcgcgtgctgtgccgccgcgctgctcgcggccgcgttgctcctctccgcaccgactgcaacagaggcttatgattcgctggatccaaatggcaacatcaccataaaatgggatatcatgcagtggactcctgatggatatgtcgctgttgtcacaatgtttaattatcaacaatttcggcatatcggcgcacctggttggcagcttgggtggacatgggcaaagaaggaggttatatggtcaatggttggggctcagaccactgaacagggcgactgctcaaagttcaagagcagcccaccccattgctgcaagaaagatccaacaattgtcgatttacttccaggcactccatacaacatgcaaattgccaattgctgcaaggcaggagttgtaaatacctttaaccaggaccagcaaatgctgcttcctccttccagatcagtgttggtcttgctggaactaccaataaaactgttaaggtgcccaggaacttcactcttaagactccaggccctgggtacacatgtgggcgtgccattgttggcaggcctacgaagtttttcaccgcggacgggcgcagggcaacccaagctctaatgacatggaatgtgacctgcacatattcccaatttcttgctcagaagactccatcctgctgtgtatctctatcatcgttttataatgacacaattgtgaactgcccaacatgctcatgtggctgccagaacccaagtgggtcaaactgtgtgaatgaggattcacctaatctacaagctgcaattgatggccctggcaaatggactggtcagccccttgtacaatgcacttcccacatgtgcccgataagaatccactggcatgtgaagctcaactacaaggattactggagagtgaaaatcactatcacaaacttcaacttccgcatgaattacacgcagtggaacttagtagcccagcatccaaactttgataatatcactcagttgttcagcttcaactacaaaccacttactccatatggtggtggcataaatgatacggcaatgttctggggtgtaaaattctacaatgatctgctgatgcaagccggcaaacttgggaatgtgcaatcagagctgcttctccgcaaggactcccggactttcactttcgaaaagggatgggccttcccacgccgagtttacttcaatggtgataattgtgtcatgccatctcctgaaaattatccatggctgccgaatgcaagccctctaacaaaaccattggcactcccattcttggtattctgggttgccttggctgctctgttggcttatgcatgattagtgggatcaagaggtttagcaagtttcaagttgatgtcagattccatgaggtgcactgcaacaagtcatttgttcattcaattccatggttgcacagaaaagatgaggcgatgccaagaaaaagtcgatatgtctatgtgtttaagttaaagggccaaaatgtatttcttgtttggtatataacagccctacaacactttggtgaacttagttactgcagattaggtaattacagttgcaccttttgtattttatagcaaacccagaatttttcattggattctacgactgcccctcttgtagtaaatgcaaggcttccctg

SEQ ID NO: 35490 - DNA, 860 bp, Zea mays
  Clone ID: UC-ZMROB73039B02_FLI
ccagcactcactcactagctacgtccaactcgtacacaacccctctttctctctatcttctctccatccatccatcctctcgctcgcccttcgacagctagctaagcagtacgacgtagtatactagcatttagcagttcatcaacgcgctcaacctagcacgacgtacggcgatgaggcgccgcggcagcaactcctcgccgcttgcggctgctgccctgcccctcctactcctcctcgtcgccggctgcttccactgcatggcagcggcggctcgccacctgccttctcctggcgccccagtccaagcgctggatcaccaagccgagaacggtgtcaaggctgcatcagctggtgcagacggcgccggcggccttgtgctccaggaaggtggcacgggcaacaacggcgacgacctctcctccaaaaccctcctcgagacgacgacgacgacgatgggagcggaggcgtgcgaggaggggaacgacaaggacgagtgcgtgcagaggcggctgctcgtcgacgcgcacctcgactacatctacacgcagcacaagggcaagccgtgaccgtcagcgacgaggacggtgcatgccgcggctgcagaaaatgaggagcggaagaggagtgaaaaaatgatggaccatcctcaaaccaaatatcctataaattcacgcacaaggggaaggggatagtaatctcatctgctgctgctagctactagtacatgcatcgatcgaccttctgcgtgtgctgtatatttctgccacgctgcctatatattagcatgcatcatcatctaggtctaggactgtctgatggtttcccgtatttgtaaacactgatgaacagtacctctc

SEQ ID NO: 35491 - DNA, 1711 bp, Zea mays
  Clone ID: UC-ZMROB73039B10_FLI
gccgtgctggtgcagatcgccaaccctgcccgcagcgaagggcgcgacgtgcaaggcgtgcaggacgaggccagggccatcagcgcccgggtcaatgcgcgcttcggcacccccgggtacacgccgatcgtgctcatcgacggcccggtgacgccgcaggagaaggccgcctactacgcggccgccgagtgctgcgtgctgagcgccgtgcgcgacgggctcaaccggatcccgtacatctatacggtgtgccggcaggagagcaccgcgctcggagacgacgcgcccaagcggagcgccatcgtgctctctgagttcgtcggttgttccccgtccctcagcggcgcgatccgcgtgaacccgtggagcgtggagtccgtggcggaggccatgaacgccgcgctgcggatgccggaggccgagcagcggctgcggcacgagaagcactacaagtacgtgagcacccacgacgtcgcctactgggcgcggtccttcgactcggacctgcagcgcgcctgcaaggaccatttctcgcgccggcattgggggatcgggttcggcatgagcttcaaggtggtggcccttggcccgaacttccggcggctctccgtggagcacattgtcccttcgtatcggaggacggagaatcggctgattctcctggactacgacggcaccgtgatgccagagaattcgatcgaccggacgccgagcagtgaggtcatctctgtgctgaatcgtctgtgcgaggaccccaagaacagagtgttcatcgtgagcgggcgtgggaaggacgagctgagtaggtggttcgccccctgcgagaagctgggcatcgcggcggagcacggttacttcacaaggtggagcagggacgcgccatgggaggcctcagcattggccgccgacctggactggaagaacaccgcggagccggtgatgcggctgtacacggaggcaacggacggctcctacatcgagcacaaggagagcggcatggtctggcaccacgacgaggcggatccggacttcggttcctgccaggccaaggagctgctcgaccatctcgagaacgtgctggccaacgaacccgtggtggtgaagagaggccagcacatcgtggaggtgaacccccagggcatcagcaaaggcgtggtggtggacagcctgctgtcgtccatggtgaggacggggaagccgccggacttcgtgctgtgcatcggcgacgaccggtcggacgaggacatgttcgagagcatcgtgtgcccggcctccagcagcggcggcgtgaggctcccggccagcagcgaggtgttcgcgtgcacggtgggcaagaagccgagcatggccaagtactacctggacgacacggtggacgtggtcaagatgctggacggcctggccagcgcgccgtcgccgccacgacggcccgggccggcggcggcggtgcagctccgggtctcgttcgaaggctcgctctgagggggggaagggaagtaaaacacacagcgctagcggtaaacagcaaacgtcgagcaaagaaaaataaccagtgatgatgaacaggattcagacaggtgtggcgtaggattagctgcagttacaggatcgacagttttttttttggtttcttcttctacattgctacccccaaaatcgttcgtgcctgtatatatgccgttaatgataatgtgcgaagaatgtttggacc

SEQ ID NO: 35492 - DNA, 1183 bp, Zea mays
  Clone ID: UC-ZMROB73039C03_FLI
gcccggccagatgcggcgggcggtgcggagcgtcgccaagcacttcccgacggcgatcgtgagcgggcggtgccgcgacaaggtgttcgaattcgtgaagctggcagagctgtactacgccggcagccacggcatggacatcaagggccccgccaaagggtcccggcacaccaaggccaaaggaggcggcgttctctttcagccggccagccagttcctgcccatgatagagcaggtgcacgattctctggtggaaaagaccaagtgcatacctggagccaaggtggagaacaacaagttctgtgtgtctgtccacttcagatgcgtcgatgagaagagctggatcacgttggcggatatggtgaagtcggtgctcaaggactacccgaagctgaagctgacgcagggcaggatggtgttcgaggtccgccccaccatcaagtgggacaagggcaaggccctggagttcctcctcgagtccctcgggtacgccgactgcaccgacgtgctgcccgtgtacatcggcgacgaccgcaccgacgaggacgccttcaaggtgctccgcaagcgcgggcagggcgtgggcatcctcgtgtccaagcaccccaaggacacctgcgcctcctactcgctgcaggagcccgccgaggtgatggagttcctgctgcggcttgtcgagtgggagcgcctctccaaggcccgccccaagtggtgatccaatccacgacgacagatgacgatcgagctgggattaattatacactatatatgctcaatatataagttagttatactaagggtgatggattaattagagggatcgggggagccgggagcgagggagtaattaagaccgtacgcacccactccctacttgagctgagctgagctgagctgagacgagagctcgctgcgctgtgcacggcacagtcatgtgcgtccagtccacggcgcctccctatgtttttacgggagccatgtggcggctgctgcgcggcaagggtgaagaatgtacgtgcggctagctgtaacactccagtaattacttcctactctactccagccatgaaccttggctctggatcctgaattctgattgtgtacaagtacaagagagcaactgctgtcgatgcctatgtatgaaatcatctctataaattaagtagccagctttcctctgtac

SEQ ID NO: 35493 - DNA, 1520 bp, Zea mays
  Clone ID: UC-ZMROB73039H09_FLI
atcagatatcgcccactactcaggactaaagcagtagtgtactcgtacaattgagccgcaagaaaagcatcgcatccatcgtcttctccatcagtccatcccgattcccgagtaccattcgattctatattccgccattgttgatcggctcgctcgccttccttggttcatcactagtaacggcaggaaaggagccgagccattccaatccaagattgattcagtgctggccatggagaaggagactccgccgccgctgcatacggaccaggagactagtgtttcatccgagcaacaacgtccacggccgcatctctccatcgacatcccggcagcatcaagcctgccggcagatcacctgctcccgatggctacggcgacgcaggccggcaccagcatcaccccgccttccaccaggagggggcaacagacaagcagcaacatcctcagcacgcccgctccttcctccagctctagcaagccaagcagcaggccgcctctgcgctcgccgtccttcatgctgaggcagacggtgaagagcctgctgccgttggggagcttcaagtcgtcggccgtcaagagctacgaggcctccatctccaagctgttcggcgccagcgccaccaaggtgatggccaggacgccgtcgctgccgctggaccatgctctgtcgtcgtcgccacatccaccaccagttcagcagaaatcagccgcgctccaccacatgtgccgctcgcagtcgctccccacgaccaccaacatgaagaaggcgaagctgctgaacgcggccaacgccaagagctttaagcggatggactcgctcggcggcacgttccgcgtcgtgccttccacgcccagaacccccgccaccgccgtccccgacgacatagcccctgctccaccaggcggcccaggggtcgacggcggcgaggacataccggaggaggaggccgtgtgccggatctgcatggcggagctgtcggagggcagcgacaccctcatcaagctggagtgcgcgtgcaagggcgagctggcgctggcgcacacggactgcgccgtcaagtggttcagcatcaagggcacccggacctgcgaggtgtgcaagcaggacgtgcagaacctcccggtgaccctgctgcgggttcagagcgtgcagcggcgggacctcctgaatcgcggcggcgccagcaacacgcccagatacgaccggtacagaatgtggcacgggacgcctatccttgtgatcataagcatcctggcctacttttgcttcttggaagaactactggtggcccatgacggcattgttgcgctggctatatcgctgcccttctcatgtatcctgggcctcttctcgtccttgaccaccacaagcatgggtacgacatggcatccaacgagtactccaaaacacaactatatatatacatagttccagagctaggctagctagccatcaatcatgtatagtaagtatatcagaaccttgcattgttgaatgcatgcagtggcaagaagat

SEQ ID NO: 35494 - DNA, 1047 bp, Zea mays
  Clone ID: UC-ZMROB73044C03_FLI
ccctctccctctcggatctctccctctctccgctcgccgcgcctccatcggtccactcagccatgtatagtaattacgggaatccttcggggatgcagatgcccccgcaaaactctcaacctgtccagtttgataatccattatacggtgcaagctcgggcctaatcagatctgggataggagtatatggggagaagtttttgggttctagttcagaattcatgcaaagcaacatcaatagatacttctccaacccgcagtattacttccatgtgaatgatcaatatgtccgtaacaagttgaaagttatactgttcccgttctttcacagggggcactggactcgaataagtgagccggtcggtggccgcttgtcctacaaacctccaatctatgacataaacgcaccagatctgtacatccctttcatggcatttggaagcttcatcatcctttcagggtttacattgggtttcatgggaaagtttactccagcagctataaatctgcagtttacaagggcgctcatcggctggggcttccagctcatggtcctgaaaggtctgctctactcgatgggtggtggcgaggtgccactgctcgacttggtagcgtacggcggttatttattcgccgggctatcgctcgccgtcgtcgcgaggctcgtgtgggcgtactcgtactatgtgatgatgccgtggatgagcctgtgcatgggggtgttcctggtgaggacgatgaagagggtgctcttcacggagatgagaagcagcgagaggcactcgtcgcggcagcactacttccttctcttcatggcaatcgcacagttccccctgttcttctggctcggcagcataggtgcatgatacagttttgtgtacttttcgcagcattaacgttgcaaaaatgatattgaagtgtttagatgtgttgtaaagaaaaaaacaattggacaatggtctcaacagcttagaggttggcagctctgcttgtgaagttgtatgtgatccacaatcatgttatgctattgacttttttggttggtac

SEQ ID NO: 35495 - DNA, 1845 bp, Zea mays
  Clone ID: UC-ZMROB73044D01_FLI
gtcaacagggtatttttatttcgacatcaggagatcaacctcaatcaacaagtggaaatggagctttggcatttgacatggagtatgcacgctggttggaggagcacaataaacatgtaaatgagttgagggctgcagtcaatgcacatgctgacccctgctgagagatgtttcatgtggttaggtggcttccgatcatctgagcttcttaagttactggcaggtcacctagagcctcttactgatcagcagcttgttggtatatccaacctgcagcagtcctcccaacaagctgaagatgctctttctcaagggatggaagcattgcaacagtcgcttgcagaaactctagcatctggatccttgggccctgctggaccttctggcaatgttgcaaattacatgggacaaatggcgatggctatgggaaaacttggcactcttgagaactttctacgacaggctgataatctacggctgcaaacacttcaacaaatgcaacgcatcttaactacccgacaatcagcacgagccctactcgcaataagtgactacttctctcggctgcgtgctttgagttctctttggcttgcccgtccaagggaataaattcaattaattcataactaggataatttttttttgtactgtttctagtatgcccattagtttcttcagaatgctcatgtgtcagtgagatatttggatcatattgtaggccatcatggtttactggacaagtttgtaacaattttggaggaaaaaaactgagttgtaaatacatctggaataatctaagatcttatgaagggatgatatgggaggatatgatggacgaacaaaccagtgcaacatcactcgggtgatgcggcgtgattatatccaaactaaacagttgaatatctgtttgcagagttacgttcttccaaaggaatcacagtactgcgtaggtcatccttcatgaacaatcaggaatcatgctcctcgagcatgtattggggataactcatgatgaatatgaaggatttaacaatacattgcaattgataaatgtgatagtatgatttattggaatagcaatttgctagttgcacaaagtggccagtaaattttctgactcacaaatgtgtttgatgtacataggcaaaatttgaagtggccagtaaattttctgactcacaaatgcatttgcctattctgaatctgatcttaaataaagtgttctgtataggcaatacaaataatcagacgagggactactgccaggtcaatatcatcggagggaagctctgtaggaggcatcgaacttctcaatctcatcaaaacatgccggaaggtggcagcatgacgtatcttcctgcaccaagagcaatgttcagaacgccatcctcccatactactcggccccttgagatcgtgatctccaccattccctgcacgaacgaaatgaacattagtacatgatgcaccgagaagttgcaagttccacattaagggcatatttagtttgttgctaactatgtcacattttgcttaaggttagtcgttcgaattgaagaactaaatttagtcacaaaagtgtggtaaattagccagcgaaccaaatatgctctaaatactgctgattcatatgtgcaaaaaagaaccgacctttcctctccggccctcgtactccctccatctacatgatttagttgttttagatttgtcctaagtcaacctctatcagagggagtacacattagtgttggacggtgtgtgtgagctgagaagggttaagtatttgtatcattgttgtttgccaattgaacaatgcattttgatacgacaaactgctgctaaact

SEQ ID NO: 35496 - DNA, 2097 bp, Zea mays
  Clone ID: UC-ZMROB73044D09_FLI
tccagcctcccacctccagcattccaaacctcagatcccccgcacgccgcgcctccgaaattccgaaacccaaatcagagcgccgcccccggcccccgctgcacgcaccgggcgggggcccatgcggccgcgcggctccgcgcccgcgccacaccgttggaaccgagcgggcgcgctagatgcctgagcccggcggccgctgcctcggcgacctcggcggtcagcgccaggtgctcaagggctggcctgacctgtggctggtgggggacaagcccggcctccgcgcgctctccaccgcggccatggccgccgcgccccagccgccgccgctcgaggccgaccaaaccctagcgctcccggacgtgcttctcctccgcgtcctcgcctgcctccctgagccccagctcacgggcgccgcctcgctcgtctgcaggcggtggacgcgcctcgcggggcgcctgcgccgccgcctcgccgtgcgggactgggccttcgtcgcgcaccgactgccataccgcttcccggacctggccgacctcgacctgttcccggcctctatcgccgcgcccaccacggcggtgccccacggcgccgctgcctccccgcttctcacctgcggcgtggtctcgctaaccctagacaccagcgcagacccgccgctcggcgcctgccggttcatcgacgacgacgcgctcgaccggggactcgccgccgtcgccgctagcttccccaacctcagccgcctctcggccaccgccgcctctgagtccggcgggctcatggccatcgctgtcggatgcccgacgcttcaggagctcgagctccaccgctgcaccgacctcgccctccgcccggtttccgccttcgcgcacctccagatcctccgcattgtcgccgcgtcccccgcgctctacggcaccgccgagggcggcggcgtcactgacatcggcctcaccatcctggcccatggatgcaagcggctggtcaagctggagcttcagggttgcgaggggagctacgacggcatcgcggctgtggggcgctgctgtgcgatgcttgaggagctcaccatcgctgaccacaggatggacggtgggtggcttgccgcgctagccttctgtgggaatctcaagaccctgcggctgcagagttgcagtaggatcgacgacgaccctggcccagcggaacaccttggtgcttgtctcacgctcgagagcctgcagctgcatcggtgccagctgcgtgaccgtagcgccctccacgccctctttttggtctgtgagggagcccgtgagatacagttccagaattgctgggggcttgaagatgatatgtttgccttggctggcctatgcaggagagtaaaaatcctgttgttagaagggtgctcactattaacaactcgaggtctagaatcggtgataacctcatggggcgacctccagagtctagaagttgttacctgcaacaaaatcaaggatgaggaaataactcctacccttgcagagcttttctccaatctcaaagagctgaagtggcggcccgacaacaagtcacttcttgctgcaagcctcgttggcactgggatgggaaagaagggcagggtatttttcaaaagggtatgaagtctgatctccttggtgctccattccctgtgatgcgcttcacctgttatctgccctgtaaggattgtcctctcttgcagcttatcttacctgcccatcaacgaatcaaagggaaggtgctcaacaattcagcaggtgttgctgcttagttggattgctagtcgaaactaggctaccgcacaaagttcctagttcttgacttgatcaaagtcaaccacgtttcttgatactcaaaagccgtacacaatgtggcatctgttcttccacttaagaccaaggacagtcataactagtcagaacctggtagtttgatgatgcacagtttcgggtaccaggcgcctgatttgtgtttgtacctgtgttcatgtgttgtaactgacaagctgaggtttgctcagaggagcctgaccgtagtatttctgtatgaggaaaagcattgcttcataaattatggcagagttaaattatggat

SEQ ID NO: 35497 - DNA, 914 bp, Zea mays
  Clone ID: UC-ZMROB73044G05_FLI
aggggaggagagtttcccgcgctcagacggcggccaccccatttccatcccccaaatcctaatctaggggtcttcggcccgtgaatcaccgtacctcatggcccccaagcgacgtcgcgcggatcagggctcgtcggtgcctgcgccacctcctcctttgcggaaagcaaaacttcagccggttgtcatcttcgcccacggcgccggtgccccttcctcctccgactggatggtccattggaagaagatggtgcaggacgcattagatgctgtagccgtggtgacctttgactacccatatatgtcgggtgggaagcgcagggcgccgccaaaggcagagaagcttgttgatcaccacctgggcatcgtgaaggatgctgctgtcaagtatcaggggcaccctcttattttgatggggaagtccatgggatcgagggtcagctgcatggtggcaagctccactgaagttgatgtttctgctgttgtatgcttgggctacccgctaaagggagtgaatggagcagtgagagatgagacactcttacagctgaaggtaccaacgatgtttgttcagggaagtaaagatgccctgtgccccttagataaacttctgtctactcaaaagaagatgacctgcaagaatgaactgcatatcattgatggcggtgatcactcttttaaggtcggcaaaaagtacctagaatctaaagggttaaatcaatatgatcttgaaatggaagctgtcacaaaaatttcacagtttttccaggattccttcactgagagttgtacctagccgttctgtatattttccttaacaccttcatggtgactaaacctaatctctgtcttcgaacaagattaatatgttagtgtaatattttggtgtaagatgctagttctgattgacagtc

SEQ ID NO: 35498 - DNA, 2220 bp, Zea mays
  Clone ID: UC-ZMROB73045B08_FLI
ctcatcaccaactcccctccatctcgctcccggtcctcactctcctctccgcctcctccctcctctccctttcgaaaccccatcttcgttggcgtagggctcgggggttggagtttgggctcgggggttagagtttggaggaagcattcgtgaagactctgtggcgacttctccagatcggcagatccgtctttctgggcgatttggagcgaagcccccaagtagtttgttacagaaagcagcggcttttgcgtcgctcctgcgtcagtgtacctgttgcgttcgtcgttcctggccccggccttcggatcatatatatccagctaggaaaaggggcactttgcatttattctttggccccttcggagatcgccctcgtcaagatttgatcaatctgtggccgttgtttccatcggagctgttgaggtttgtcttcttctcggccgaagacatggcggcggcgaacggagctgccggtgcggtgctgttcagcgaggaggacctgagggaggtgagtggggtgcgctggggagaggacttcgtggaggtgacgtgcggatgcaccagccaccgctacggcgacgccgtcggccgcctccgcgtctttgcgtcaggcgacctggagatcaactgcgagtgcacgcccggctgccgcgaaggtccgtcccaggcccagccaccacttccatccctttgcttctctcttcgctcttgatttcatgtccgtgcatcgatgtgcttatggtgtctggtctctgggtcacgatgtcttgaccccgcagatgaacatgcatgcaatgtcagtgcacgcgccacggcgcctcttgtggccggcatggcctgcttctagtgcttggcaccatgctgcatcccatgcatccctgctctggcctagcttgtgtctgttgcctgttgatttttgccaatgccttctctgcaatctgaatgtttggatgggccaaacttgttgggttggtggtcatgcgcccccccctgggagtaattaatatcacttgtatcattcattatgcataactgacctttcatgttgttgtcttggcacacccctctagcactagcacatgcaagcattttgtcctagatacctaatgcacgtcgattcattctgtgagtcctttttgcatgctggtggtcgtgggatttgcccctccctctgttcagtcgtggtgtccatccagcagtacaacaaattataacgtctctgttcatgttcaggccttcgtttgcatggattaggacctgttcccgtttagagttgcatgctgctgtcttttgtagataggtaaagcggaagtggcccttttgatcttaaacatcggatacttgtttgctacgagtgggttgtgaagacacttgtctctgctctgtaatagtacctggtagccttaatagttcatctctgatatcgtcgatgacatttttctacttctaatctgcagtgtctatcttgcaatatccgtgtatcagtgtgtgcctagagtactactgtaggtgacatactgacatagatagcataagttatctgtgagttttactgcataccatatacattggcatgcaggaattttaatagtataatttggaaagcttgggcgccaccaaagtgcaaattcttcagttggcttgctgttcaaaatagagtttggacagcagacaggttggcaagaaggggatggcctcataatccgcgctgtgtcctatgcgcctcatgcccagaatctggactacatctttttgctgaatgttgcttcaccagacatatttgggctgatttgagtatttgggctgcaattacggagatccaccattcttcttggcaacctgtagattcggtgcaccaatggtggtcgaatcttgcagcatccgcagtgagaagcgtgaagggattgcgaaccctcatcatcctcgtgtcttggacaatttggtgtgagagaaactcgcgaatctttgagcacaaagagaagaccgtgacacagactatagcgatgattaaggagcaaattcgcctgtggattctaggaggagcaaaacacttagcaaggctggtgtaggttttggggaaggagaggggttggttttggaacatttgtgtcaccatacttaatgtctcattccctagtgtgatgtacttgtatattttagccctcgctggctctcaccttctttttaatataacaggcaattctcttgccagttttc

SEQ ID NO: 35499 - DNA, 1836 bp, Zea mays
  Clone ID: UC-ZMROB73045B10_FLI
ctcaaggcgaaaggagtcaagctcaatcctgagaagtgtgtcttcggggtaccccggggcatgctcctggggttcatcgtctccgagcgaggcatcgaagccaacccggagaagatcgcagccatcaccagcatgggacccatcaaggacttaaaaggcgtacagagggtcatgggatgccttgtggccctgagccgcttcatctcacgcctcggcgaaagaggtctgcctcagtaccgcctcttaaggaagaccgagtgtttcgcttggacccctgaggccgaggaagccctcgagaacctgaaggcgctccttacaaaggcgcctgtcttggtgcccccagctgatggagaagccctcttggtctacgtcgccgccaccactcaggtggttagcaccgcgattgtggtcgagaggcaagaggaagggcatgcactgcccgttcagaggccagtctacttcgtcagcgaagtactgtccgagaccaagatccgctacccacaagttcagaagctgctgtatgctgtgatcctgacgaggcggaagttacgacactacttcgagtctcatccggtaactgtggtgtcatctttccccctcagggagatcatccagtgccgagaggcctcgggcaggatcgcaaagtgggcggtggaaatcatgggcgaaacaatctcgttcgcccctcggaaggccatcaagtcccaggtattggcggacttcgtggccgaatgggtcgacacccagctgccgacggttccgatccaaccggagctctggaccatgtttttcgacgggtcgctgatgaagacaggagccggcgcgggcctgctcttcatctcacccctcggaaagcacctgcgctacgtgctgcgcctccatttcccggcgtccaacaatgtggccgagtacgaagctctggtcaacgggttgcggatcgccatcgagctaggggtcagacgcctcgacgcccgcggtgattcgcagctcgttatcgaccaagtcatgaagaactcccactgccacgacccgaagatggaggcctactgcgatgaggttcggcgcctggaagacaagttcttcgggctcgagctcaaccacatcgctcggcgctacaacgagactgcagacgagctggctaaaatagcctcggggcgaacgacggtcccaccagacgtcttctcccgggatctgcatcaaccctccgtcaaggtcgacgacgcgcccgagcccgaggcaccctcggctcagcccgaggcaccctcggctcggcccgaggtaccctcggctcagcccgaggtaccctcggcccccgaagccgaggcactgaacgtcgaggaggagctgagcggggccatgcctgatcgaaattggcaggccccgtacctgcgatatctccgccgaggagaactacccctcgaccaagccgaggctcgacgggtagcgtgacgcgccaagtcattcgtcttgctgggtgatgaggaggagctctaccaccggagcccctcgggcatcctccagcgatgcatctccatcgccgaaggtcagaaactcctgcaagaaatacactcgggggcttgcggccatcacgcagcaccccgagcccttgtcgggaatgctttccggcaaggcttctactggccaacagcggtggctgacgccactagaattgtccgcacctgcgaagggtgccaattctatgcgtagcagacccacctgcccgctcaggctctgcagacgatacccatcacctggccctttgctgtatggggtctggacctcgttggtcccttgtcgatggcgaccagcaggtgcgtgtagcccccgggcgccttc

SEQ ID NO: 35500 - DNA, 2046 bp, Zea mays
  Clone ID: UC-ZMROB73045D03_FLI
gcgcggctcgcccggaccggcgggaactcgtcgccgccgtccgtggacggctccaacagcggccggcacctcctctcttctcccttcgtggcctcgtcgccgcagtccatgtcagacgggagcgtgcagctgcagcaggcgcgcgtggcggagggcgcggctgtggcggaggaggtgatggcggcgctggagcgcaacggcgtgagcttcgtgggcggcgggctgggcaaggccaagaaggacggcagcgggaagcagctcatggggcgcgccgcgctgctgcagctgccggccacggtgcgcatcgacatcccgcccaccagccccggccgggccgcgctcaaggtgtgggaggagctcgtcaacgtgctccgcaaggacggcgccgaccccgccgccgccttcgtccaccgcaagaaggtccagcacgccgagaagagcatccgcgacgccttcctcgccctctaccgcggcctcgacctcctcaagaagttcagctccctcaacgtgaaggctttcaccaaaatactgaagaaattcgtcaaggtgtcggagcagcatcggaaaggagacctgttttcagagaaggtgaagaggtcgccgttcagcagctctgacaaggtgcttcagctggcggacgaggtggagtgcatcttcttgaggcatttcgcgggcaacgacaggaaggtggccatgaagtacctcaagccgcagcagcccaggaacacccacatggtcaccttcctcgtaggcctgttcacaggcacatttgtgtccctgttcatcatatactcggtcctagcccatgtcgccggcattttctcttcgaccggaaacacagcctacatggagatcgtttaccatgtcctcagcatgtttgcgctcatcagcctgcacgtcttcctgtacgggtgcaacctctccatgtggaagggcaccaggatcaaccacaacttcatcttcgacttctccagcaccgccctgacgcaccgggacgccttcctcatgtcggcgtccatcatgtgcaccgtcgtcgcggcgctggtcgtcaacctgttcctcaggaacgccggggcgacctacgccaacgcgctgcccggggcacttctgctgctgtcagcaggggttctgttctgcccattcaacattttctaccgctccacgcgcttctgcttcatgcgcgtcatgcgcaacatcgtgctgtcgccattctacaaggttctgatggcggatttcttcatggctgaccagctaaccagccagatcccactgctaagacacctcgagttcacggggtgctacttcatggctgaaacattcagaactcacgcgtatggaagctgtaccagcagctcccaatacaagaacctggcatacgtgctctctttcctgccatactactggcgagcgatgcagtgtctgagaaggtacctggaagaaggccacgacatgaaccagcttgctaacgccggcaagtacgtatcagcgatggtggcagctgcggttaggttcaagtacgccgcgacgcctacgccgttctggatgtggatggtcattgcatcatctaccggcgccaccatctaccagctctactgggatttcgtcatggactggggcttcctgaacccaaaatccaagaacttttggctccgggatcagctcatcctcaagaacaagtcgatctactatgcttccatgatgctcaacctcgtgctgcgcctagcctgggccgagagcgtgatgaaactccgtctcggtatggtggagtctcgcctgctggatttctcgctcgcttcgctggaaatcatccgacgagggcactggaacttctacaggctggagaatgagcacttgaacaacgctggaaagttcagagcagtgaagactgtcccattaccgttccgtgagcttgaaactgactgatgaagacggagctccatgttgaacagcaggaatttagggggaagaattccaggaatggatacactgtcccctgcaagaactggtgtttaagtggtaataaaacgaatcggagagcgtaactgc

SEQ ID NO: 35501 - DNA, 1527 bp, Zea mays
  Clone ID: UC-ZMROB73045E08_FLI
ggcggacatctgccatgcataccagatcatgaagaagggcggactcaaggatgagaacatcattgtctttatgtacgatgacatcgcgcatagcccggagaatccgaggcctggtgtcatcatcaaccatccccagggtggcgacgtctatgctggggtgccaaaggattacactggtcgagatgtcaacgtcgacaatttcttcgctgttctgcttggcaacaaaactgcactcaggggtgggagcggcaaggttgtggacagtggccccaatgatcatatctttgttttctacagtgaccatgggggtcctggtgtccttggaatgcctacgtatccatatctctatggtgatgacctcgtagatgtcctgaagaagaagcatgctgccgggacctacaaaagcctggtcttttaccttgaagcatgcgaatctgggagcatctttgagggcctcctgccgaatgacatcaatgtgtatgcgaccaccgcgtcaaatgcagacgagagcagctgggggacgtactgccctggcgagttcccgagccctccaccggagtatgacacttgtttgggagacctgtacagtgttgcttggatggaagacagtgatttccacaatctgcgaactgaatccctcaagcagcagtacaagttggtcaaggataggacagcggttcatgacacgttcagctatggttcccatgtgatgcaatatggcgcattggagctgaatgttcagcgtttgttttcgtacattggcacagaccctgctaacgatggcaacacttttatagaagataactcactgccatcgttctcaaaagccgttaatcagcgcgacgctgaccttgtctacttctggcagaagtaccgcaaattggctgatagctcgcatgcgaaaaatgaggctcggaaggaactgcttgaagtgatggcccacaggtctcatgttgacagcagcgttgagctcattggaagccttctctttggctccgaggacggtccaagggttctgaaagccgtccgtgcacctggtgaacctctggttgatgattggagctgcctcaagtccatagttcgcacttttgaggcgcgatgcgggtccttggcgcagtatgggatgaagcacatgcgatccttcgcgaacatgtgcaacgctggcatccttcctgaagcagtgtcgaaggtggccgctcaggcctgcagcagcattccgtccaacccctggagctctatccacaagggttttagcgcttaagaaccataggtgaggcgaactccatgacgctgcagctctcagggaggtcttagttcttgaacgaccataggtgaagcagacttatgtataccctgccacattgcgtacctatggccagtttccggtgtacatatatagtcggaaatttattcggcaattgtattggtcgttggtgtatatattccctatagtttgttagcagatgtgtttgtttgtaatcccgtaataaatgaagaatgcatgatgttcatgcggaactttacctg

SEQ ID NO: 35502 - DNA, 1579 bp, Zea mays
  Clone ID: UC-ZMROB73045H08_FLI
cgccgcagccgaagcgaccacacccgatggccggggcgccggcgccgaagctgccgtctttccctgggcctgtcgcccaggcgggcggcgggttcgtgtcggccttgaagcccaaggcggaggcgggtaacgacgaggcggccgctgcggtggaccagcttgccgaggcggccagacttgccgaggccggcgacgccttcggcgcccgcgagatattggcgcggctcaattatcggctccccgccgtgcccacggccgggacgccgctgctccgctcggccttctacttcaaggaggccctgcgcgttgcgctctccccgaccggcgaggcccttgcgcccccggcggtgtcgacgccgtacgacgtggtcctgaagctcggcgcgtacaaggccttctccgaggtgtcccccgtgctccagttcgcgcacctgacctgcgtgcaggcggtgctggacgagctcggggccgccgggcgcatccacgtgctggacctggacatcggcatgggcgagcagtgggcgtcgctgatgcaggagctggcgcagcgcagccccgcggcgacgctcaaggtgaccgcattggtgtcgccggcgtcgcaccacccgctggagctgaacctcatccacgagaacctgtcgggcttcgcccgcgagctcggcgtgttcctccagttcgcggcgtacaacgtggacgccctggaccccgcggagctggtggccatcaccagcggcgacgccgtggccgtccacctccccgtggggtcggcccacgtggccgcaatgccggccgtgctccgcctcgtgaagcggctcggcgccaaggtggtggtgtccgtggaccgcggctgcgaccgcacggagctgtcgttcagcacgcacctgttacaggcgttccagtcctgcgtgtccctgctggactccatcgacgccgtggggggcgcggacgccgaggtggtcggcaggatcgagcgcttcatggtccagcccgacgtggagcggcgcgtagtgtcgcgccaccgcgcggcagtggccgtggacaagccgccgccgctgccgtggcggaccgtgctcgcgtcggcggggttcgtgccggtgcaggccagcacgttcgccgagtcgcaggccgaggccctactcaagcggatggcgctgatggggttccgcgtcgagaagcgcggcggcgcgctctgcctctactggcagcgcggcgagctggtctccgtgtcggcgtggcggtgctgaccgccgggagtacgccgccgccgccgcaaccaagagccagccgtgaatctaccacaagcccgggttagctaggactaatgatcctactactgcaagcaaaaaaatattttccaccgtcgtcgtttgtaacgatctcatctggtctggtctcgtctgtctgcttattagtgtgtcctacccgattaatcgtggagtacgtcgtccgttgcctggctttgcagcctcggtgggctctgctcatgttgatttgcggagcgcgccgtggtttgcaggttgtaaaacgtaggcgtggtgcagtgcagtgaccagcgcatcctaccgcccgtcgtgttgct

SEQ ID NO: 35503 - DNA, 1097 bp, Zea mays
  Clone ID: UC-ZMROB73049A01_FLI
gccatggagatccggcaacttgctaattcacaaccaataactgttctcaatggaggttctggacaatcaggagtatcaggcctgatagtacctgcagcaactgttggagcactaggttatggttatatgtggtggaaagggatctcgttctcagacctaatgtatgtcaccaagcgcaacatggcaaatgctgtttcaagcatgactaaacatttggagcaagtgcaaagttctcttgctgctgctaaaaggcatttgacacagcgcattgaaaagttggacgataaattggatcagcagaaggctctatctggacaaataagagatgatgtcactgatgcacgtctgaagcttgagaatattggttcagaaatcaagaacatcaaagaattggtttggggtctggatgggaaaattgattcaatggaagctaaacaggacttctcatgtgctggtgtgatgtacctctgccaattcatggagcaaaatggtggaaagcttccggatcgcctggaaggctccaaaatgacgacaaaacgttttggaggccaaaagttcttacagggattgcaactggcaatagaatcagggaattgtggcaaggacaccattgatatgctgttgaaagatgctgattcctctgataaaataaacaggacgtcctccatcaaatctgccagctaattattatctggtcgatactgattcgatgcccagtcggaatatttatagggttttcattacaagtaaatatgtaaatagctgcagccttttgcttgcaggaagtgcattttgtttaatttgtaagcttcgcaaaatgctagtagttgctactacgtaggaacctagtcatgctttaattttgtggtttcgctttgtgaaacgagaatgcaacacgtaataaacgaaaaacaccggttggctttacaatgtggacttgtaacttaaggccgtttggatcttgtcatttttagaggaattggaatctactgtgtagattatttggcttgaaatttgatgttccaccactttgtaaaattcaaatacaagtctatctcattcctcataggatagagggatggaaatgatttttatgt

SEQ ID NO: 35504 - DNA, 1939 bp, Zea mays
  Clone ID: UC-ZMROB73049A06_FLI
ccatttcttgtgtcagtctccctctccctctctccgatcctctctactagcagagaggcaagttcaatcttctagctagcagcatcggagaaggcagagctcgactgacacaatggcgggaggccagctcaacgtgctgaccacactcgaccaggccaagacacaatggtaccatttcatggcgatcgtcatcgccggcatggggttcttcaccgacgcatacgatttgttctgtatcgcgctcgtgaccaagctcctcggccgcatctactactccgaccccacctccaaggaccccggcagcctcccgcccaacgtgtcggccgccgtgaccggcgtcgccctctgcggcacgctggcgggacagctcttcttcggctggctcggcgacaagctcggccgcaagagcgtctacggcttcaccctcatcctcatggtgctctgctccgtcgcgtccggcctctcgttcgggcatacgcccaagggcgtcatcgccacgctctgcttcttccgcttctggctcggcttcggcatcggcggcgactacccgctgagcgccaccatcatgtccgagtacgccaacaagaagacccgcggcgccttcatcgccgccgtgttcgccatgcaggggttcggcatcctcttcggcaccatcgtggcgctcgccgtctcggcggcgttccggaacgcgttcccggccccgccctacttcgtggacgcccaggcgtcgctcgtcccggaggccgactatgtctggcgcgtcatcctcatgttcggcaccgtcccggccgcgctcacctactactggcgcatgaagatgcccgagacggcgcggtacacggcgctcatcgcccgcaacacgaagcaggccacggccgacatggccaaggtgctcaagaaggagatcgagaaagaggatgagcaggtggagcgccaggtggtcggcgccgacacatggggcctcttctcggcgcagttcctccggcgccatggcctccacctgttggccaccagcagcacgtggttcctgctggacatcgccttctacagccagaacctcttccagaaggacatcttcaccaaggtcgggtggataccgccggcgaggaccatgaacgccatcgaggaggtgtaccgcatctcgcgcgcccaggcgctgatcgcgctctgcggcaccatcccgggctactggttcaccgtcggcctcatcgacatcgtgggcaggttctggatccagatcatgggcttcttcatgatgaccgtgttcatgctcgcgctcggggtgccgtacgagcactggaccaaggcgtccaaccacaccggcttcgtcgtcctctacgggctcaccttcttcttcgcaaacttcgggcccaacagcaccaccttcatcgtgccggccgagatcttcccggcgaggctccggtccacgtgccacggcatatcggcagcggccggcaaggccggcgccatcatcggcgcgttcgggttcctgtacgcggcgcaggaccccaagaagcccgaccatggctactcgccgggcatcggcatccgcaacacgctcttcgtgctcgccggaaccaacttcctgggcatgctcatgtcggtgttcgtgccggagtccaagggcatgtcgcttgaggagatctccaaggagaacgtggatgatgaagctgaggccgaagtgtagagagaccgtctgcacctctgcgtgcagatgcacatgtgaattgtgttgtgatgcaccgatggtgttgtgtggttttgcttgtgtcactgtatctgcgcatacgctacgaataaccgtatctggctggctggctggccatgctcgcgcgtgcgtgtctgggtgctcgtgtgcagcaaatcaatcagccgctgtgtgatttgctaccttttgatattgttgctgattatgtaataattcaaaactattatgggt

SEQ ID NO: 35505 - DNA, 1915 bp, Zea mays
  Clone ID: UC-ZMROB73049C11_FLI
tcgacaccagtgcagcagccaccaaagatccggcccgcccgcgccgcacgagaccgccgcccgcgccgcacgagagtcatgacgacgccgcggcggcacgctgatccgtcgccctcgccctcgccctcttccccgccgcagcttctctcccgcctccgctccggggcctccagtttcctggcgcggcagtacagcacggggaagggaggcgataacaccggtccttcgaagccgaaaggtggtggctcctccgcgccaaggcacctcaggccaggattcgtggatccttcatcatggaaacattttgactcaagggctgttggcattaaaccgggtgctatacatacagatgcatgggcggttttaaaaaagctcagacgtgaagcttaccttgttggtggctgtgtgagagatttgctactcaaaagggtacctaaagattttgacgtgattaccactgcaagtctcgaacagcttaagaaaaatatattcaggagatctaggattgtaggcaaacgctttccaatatgtcttcttaaaatgcgtgactctgtaattgagatttcgagctttcgaacagttgctaattatgggaatagaagtgaagtggtagattatgtggcagagttgaatggctctgacgttagggatattcttcgctggaaggattctatgagaagagacttcacaataaatggtcttttctttaacccgatgaactgcaaaatttatgattacgtgaatggagtaagggatatgagaaaaaacaaagtgtgtacagtgattcctgctcacatttctttcatggaggaccctgcaaggattttacgtggcttcagaattgctgctcgccttggtttccagttttccagtgaaacttctaatgcgatacgtgatttttcttcatctataaataatatcgataaggcaaggctgatgatggaaatgaattatataatgtcttatggagcagcagcaccttctgttaggttgcttagaaaatatggactacttgatattttgctgcctttccagtcagcatatttgtctgagcagatgaaaggtggttcaagtgacagacatctgatgcttatgaaattactgtctaatcttgataggttactctctgcggaccgaccatgccatagctctttgtggctggcgttgttggcatttcacagtacattggttatatatccacaagacaccttggtaataagagcttttgctgcagtgttgtatttcggaacatgggaaacaacagtcaaatttctgagagaagaagttggagctgaagttccatttgccccagagacaatggggccttctcggaccaaactggattgtcttaaggaacaaacgtcacatctagcatcactagtcaattcttcagtagatatattgacatgtcctcatgatctggagcaatcgctagccagattctcggaacctctgcaattttcaggagtggtagtcgcatctaacaatgataggaaaaagttgtcggccgtatttgagggccttgcttctgacctacattcatatgatgggagaagagggatgcgtgggattgattactcgtcgctgaaacttggggatcttgccgaggtccgatttgttctcggtaaagtgatcatggacacaatgtacgacaagttaccatgcgaatctactgaggatgagggcgctgctgcagatgttgctggtggaagcctacctccattgtccgcattgttttaatcgtagtgaagcatagggttcactcaacaaactaggcagcccttttctggttttagtcagtgctgcaaagcaatcgagttgttcagaattttcttgtgttgcaagatgaccacaacgacaactgtagacgtatttcagaatttttatcaaggaactcgaatgtgcagttgtagct

SEQ ID NO: 35506 - DNA, 1872 bp, Zea mays
  Clone ID: UC-ZMROB73049D03_FLI
gtttgttaaccaagcgtaatgacgtctgataatgtcgtcacgaacgtcaacgtgcaagcagacgctatgatgaagtcagaggggtcacccgggttgacagaaggatagtcgctgacgagattagtacaaaactataccgatacaatgcgatagcccctgacagaacgtgacaaccctaattgtagctcgaggttttgctcaaccaaatcccacgcgtccgtgagcgaacgtgagcggtcttcgccttgtcctccgactcttccattccattctattcccgcttccacacgtcggtcggcgcccttcgcgatcgtgtcgtttcttcccgcagcctgcctgcgtgtggggtgatggctaggcacttcaagtacgtcatcctcggcggcggtgtcgcggcggggtacgcggcgagggagttcgccaagcagggcgtcaaccccggcgagctcgccatcatctccaaggaaccagtggccccttatgagcgccctgcactcagcaagggatacctcttccctcagaacgctgcaagactgccaggcttccacacgtgtgtgggcagcggtggagagagactacttcctgaatggtactctgagaaaggcattgaactgatcctgagtactgagattgtgaaggccgaccttgcttcaaagactctgaccagtgcagctgcggaaaccttcacatatgagaccttgctcattgctacgggctcctcggtcataaagctcactgattttggtgttcaaggagcagaatccaacaacatattgtatctaagggacattgcggatgccgacaagttggttgcagctatgcaggcaaagaagggtggaaaggctgtgattgttggaggtggttacatagggcttgagcttagcgctgccttgaaaatcaacaacttcgatgtgaccatggtgtaccctgaaccgtggtgcatgccccgtctcttcactgctggtattgctcatttctatgagggctactatgctaacaaaggaatcaaggttgtaaagggcacggttgctgttggtttcgacgctgatgccaacggagatgtcactacagtgaagttgaagaatggaagtgttctcgaagctgatattgttattgttggcgtcggcggcaggccattgacgcgtctcttcataggccaagctgctgacgagaaaggtggactcaagaccgatgcattcttcgaaacaagtgtagccggggtatacgcgatcggcgacgtggccaccttccctctgaagctctacaacgagcagaggagagttgagcacgtggaccacgcccggaagtccgccgagcaggccgtgagggcaatcaaggccaaggagtccggcgaatcggtggccgaatacgactacctgccctacttctactcccggtcgttcgacttggcgtggcagttctacggcgacaacgtcggcgacgacgtgctgttcggcgacaacgacccggcctcggccaagcccaagttcggcagctactgggtgaaggacggcaaggtcgtcggcgtgtttctcgagggcgggtcggccgaggagaaccaggccatcgccagggtcgccagggcgcagccgccggtggccgacgtccaggcgctgaagcaggaggggatcgatttcgcttccaaaatctgagctcttggaaaggtgtaaaaaaaagaaacattggtaccagttttagctgatttctttggcaattctactttgagccttttcagaccacttgggtgctttgttacacagtagttcagattagttgttagcccctccctaataatttggccttcgatgtgatgttgaaagaaccaccgtgggatgacgatcctattaataatgcatgtgatttgtagcgtct

SEQ ID NO: 35507 - DNA, 1073 bp, Zea mays
  Clone ID: UC-ZMROB73049E07_FLI
tggatgaatgcttgtgctgaagtctctggtgttgactcggtacaatcagtgttccaggtgatgttgaatgatgagacggtcaaggttggttggagcacatactgcacattagccaacattttcaggaagaatggactgaacaatgaagcgcaagcgtgccttgtgaaagctgaagcaaaattgtcacctgcagggcgcttaggatactcttttgtaatgacatgttatgcggctctgaatgacagcgatggagttatgagaatgtgggaggctagcaaaagtgtgccaggtagaattcccactgcatactacatggctgctatgtcatgttcaataaaagttggcgacatcagccaggccgagtgtatctttggaaagtgggaagcagggtgcaggaagcatgatgtgagggtttcaaatgttcttcttggtgcttatgtgaggaataggtggattgaaaaggctgagaggctccacctccacatgctagagaaaggagcgtgtccaaattacaagacatgggagatattgatggagggctatgttcaaagcaggcaaatggacaaagctgtgggttgcatgaagaaaggtttgtctctgttgaagagttgccattggagacctccagttgaactgatggaggccattggcaaacatttcgaggagcaaggaagtgctgacgatgcatatcgatatattaaggttctccagagatttaacttgacaagcttgcccctgtacaagtcattgattcgagcatatatcaatgctgacgttgtgccaccaaatgtccttgagatgattgcaaaagatcagattgatatggatgaagaaatggaccggttgatcataatcgctggcaagatagacatcacatgcaatggatagtcttcaactggaacaggtaatcaccagtcaaatgataaatatactcatttgactttgtcaattagagatgcaaagtgaagcaacaagttgaacctgcaaattactagatgcaaaaaaggcactcctggataccttgtttggtgttcatgcagtcctgctaatatgaacaactccatcttcttgtg

SEQ ID NO: 35508 - DNA, 1536 bp, Zea mays
  Clone ID: UC-ZMROB73049E11_FLI
ggtgttggtttcttggctgtgcttcgcggcggccggcgtcggcgcgataggggcgaactggggcacgcaggcgagccacccgctgccgccggagacggtggtgcggatgctcaaggacaatgggttccagaaggtcaagctgttcgacgccgaggagggcaccatgagcgccctcaggaagagcgggctggaggtgatggtcggcatccccaacgacttgctgtccacgatggccaccagcatgaaggccgcggagaagtgggtcgacaccaacgtctccagctacctcaacgacggcgtcagcatcaggtatgttgcagtcgggaatgagcctttcttggagacatacaacggaagcttcctgcagtccactttccccgccatcaggaacatacaaggcgcgctcataaaagccggcctgggcaaccaagtcaaggtgacatgccctctcaacgccgatgtctactcctcgacgacctccaagccttccgacggggacttccgcacggacatccacgacctgatgctcaccatagtgaagttcctgagcgacaacggcggtgccttcaccgtcaacatctacccgttcataagcctctacatcgacccgaacttccccgtggactacgccttcttcgagggggcctcgtcgccgattgtggacggctccttcacctacagcaacatgttcgacgcgaaccacgacacgctgatatgggcgctgaagaagaacgggttcgggaacctgcccgtgatcgtcggcgagatcgggtggccgacggacggcgaccggaacgccaacgcccagatggcgcagcgcttcaaccagggcttcatgacccacatcgcctccgggcggggcacgccgatgcggcccggacccgtcgacgcctacctgttcagcctgatcgacgaggacgacaagagcatccagccagggaacttcgagcggcactggggcatcttcacctacgacggcctgcccaagtaccagctgaacctggggacgtcgaacgcgggcggcggtctcgtgagagccaagggcgtgaagtacctcgagaggaagtggtgcgtgctgaagccttctgtgaacctcaacgacccgaagctcgccgacaacgtgggatacgcgtgctccatggcggactgcaccagccttggctacaagacgtcgtgcgggatgctggacatccgcggcaacgtctcgtacgcgttcaacaactacttccagaagaacgaccaggacgacgtggcctgcgggttccagggcctcgcgacgaccacgggccaggaccccagcaccgggacctgcaggttcggggtcatgatcgaggtcgactccgccttctcgtggaggctgcaggggcttgggagcaacctcctcctgttcctcctgcttggggttctccagctatccctgtccttctcttagacgcagaggttctgcgagggatgggtggggtggcagtgagcgcataaacagtctgacaacagcttgaggatattagatgtgtgttgtcagtgccattcatttag

SEQ ID NO: 35509 - DNA, 1588 bp, Zea mays
  Clone ID: UC-ZMROB73049G04_FLI
accggagccatcggcgccacctgcaccattgctgccatcgccgccgcctcctgcaccattgccgccatcgcctccgccgccagcattgtcgcctcctccgccggacgccctccctccgtcgcttccaccgtcaccgctgccatatccaacccgatcaccacctcaagccccgccgcccccgctgacgacggatcagccgcgcgttcagccccgcgtatacccatcaccgccaccgccgtccctccctcctccgccgcctcccaccgtctcgccgccagcgccggctccatccaattcgccgtcgccgtcgcctgctccagctgcacaagctccgggtcccgcgcgtgttgctgcctattcgcctcccccgcctagaatcgcccctccgccgcctccgcactatcacggcaagtcgcattacacgccgcactcgcccgtgaagtcgcattcgaactcgagccatgcagctagtggcagtggcaagaacatcgagatatcgagggaagcggccaccaccattgtagcactggccggtctcgccatgctcagctttattggcgcgaccatttggttcgtcaagaaaaagcgccggcgcatagagcctccggctacattgcctacacagcaaccagctcctccgccaccgcccaactacattccatcttcggctggatcctcgctagcatcagacggattctacttgagatcgccagggtatcctttcatgaggtacagcactgggagccatggttttccatactccccagccgactctgggattgggtattcccatatgctgttcacaccagagaatttggcagctatcacagatgactttgcagaagataaccttttgggagaaggtggatttgggtgtgtgttcaagggcattttgccggatggtcgccctgtcgccgtcaagaagctcaagattgggaatgggcaaggcgagcgtgagttcaaggctgaggtcgatactatcagcagagtacatcataggcatttggtttctctagtaggctattgcattgcggagggccagcgaatgcttgtttatgattttgttcccaacaacacactatattaccacctccatgtaagtgaaacatcactggattggcggacaagggttaagattgcagctggagcagcccgagggattggttacctccatgaagattgtcatccacgtattattcatagagatattaaatcatccaatattttgttggacaacaactttgaagctcaggtttctgattttggacttgcaaggttagcggctgattccaatacacatgttaccacacgtgtcatggggacatttgggtatttggctccagagtatgcattgtcaggaaagttaacagcaaagtctgatgtatattcttttggggttgttcttttggagctgatcacaggaagaaaacctgttgatgcttctcagccgttgggagatgaaagtctggttgaatgggcccgctccgttctgacgaaggcgatcgagcatcgggagttcggggaccttcctgaccccaggatggagaacaggttcgacgaaaacgagatgtttcacatgatagtagcc

SEQ ID NO: 35510 - DNA, 2029 bp, Zea mays
  Clone ID: UC-ZMROB73049G06_FLI
gtcttctgcaatctgcaaggcgtcttcattttctgtccgctataaaaacaaaccctggtcagggcatggcaatggcgtgagatctcaccttcgcctatctgttcatcgtccccccttcgtcctcctccccgaccccgacgtgcgacatgaacgggaagcagagcccgcggaatggccgaactgcgtaccacttccagcctgccaagaactggatgaacgacccaaatgggcctctgtaccacaagggcatgtaccacatgttcttccagtacaacccgcacggcccgacgttcggcaccgggaagctctcctggggccactccgtctccggcgacctggtgaactgggcgttcctgggcaccgcgctggacccgacgtcgccgttcgacgccgagggctgctggtcgggctccgccaccacgctggcggacggccgccccgccatcctctacaccgggcgcgacgcaagcggcgtgcaggtgcagaacgtggcgttccccaagaacccgtcggacccgctgctccgggagtggcgcaagccgcccggctgcaacccggtggtcccgcagccgggcgacgtgacgggcaacaacttccgggaccccaccacggcgtggctggggcgcgacgggctgtggcggttcgccgtcgcggccgaggtcggcggcgtgggctccaccctggtgtaccgcagcaaggacttcgtgcgctgggagcggggctccgcgccgctgcacgcgtcccccgacgtgcccgtctgggagtgcccggacctgttcccggtggcggagcgcggcgcggaggggctcgacacgtcggcccgcggcggggccggggtgaggcacgtgctcaagctcagcaaggccgccgacgaggactactacgtggtcggccggtacgacgacgaggcggacacgttcgcgccggtggagggcgtttttgactggcgccggatcgaccacggccacctgttcggcgccaagacgttcttcgacgcgcgcaggaggcggcgcgtgctgtgggcgtgggtggacgagacggacgacggcgttgacaagggctggaggggcatccagacgttcccgcgggcgctgtggctggacgccgacgggaggcagctggtgcagtggccggtggaggagatcgagacgctgcggaagggccgagccgcgctggcgggcgcggtggtcggcgccggcggcctgcgcgagatcgccggcgtcgacgccctgcaggcggacgtggaggtcgttttcgaggtccccgagagcctggacgacgccgaggagctggaccccgagtggctgcagcacgatccccacaagctgcgcgcgtgcgcggagaagaaagcctcctcgccgggcccgcgcggcggcgtcgggccgttcgggctggtggtgatggcgtccggcgacatgcgggagcagaccaccgtcttcttccaggtgttgaggcacggtggcacgtacaaggtgctcatgtgtgccgacctgacgaggtcgtctacgaaagagggggtgcacaagccattctacgcaggattcgttgacgtggacgtcgagaaggacaggggcatatcgctgagaacactgatcgaccactctgtcgtcgagagcttcggaggcgggggccggacgtgcatcacggcgcgagtgtaccctgagcacgtggcggcaggcggcagtagccacctgtacctgttcaacaacggagctcacccagtgaccgtgtctaagatcgaggcctgggagctcgggacggccagcgtcaacgttgaacaagacgaccgtgcggatccactgtgatcgcccgcccgccctgcgtgttacagacttccagtcctgtcggatggcgctggaggcttaatagataaccatcacgcgtggagtgaagcatgtgttaaaaaaaaaaacaagaccattgttgccttattggtggtctcgtgttctgaataatgtagctttgctaaagtgtattgcgtctccattgtaacaccaaatgcctgtttttgctaaaatgtacgttgcat

SEQ ID NO: 35511 - DNA, 1810 bp, Zea mays
  Clone ID: UC-ZMROB73049G11_FLI
cgcccacgcccaccgccccatccaccccgaaaccctagcggatcgtcgccatggccgcggccgcgctccttcgccgcatccccgccgcgcgggccccggccacggccttcatggcggcgcgtccggtctccgattccacggcggcgctcaccatcgagacatctgtccctttcacctcccacctcgtcgacccgccctcgcgcgatgtcaccaccacccccgccgagctcgtcaccttcttccgcgacatgtccctcatgcgccgcatggagatcgccgccgactccctctataaggccaagctcatccgcgggttctgccacctctacgacggccaggaggccgtcgccgtcggcatggaggccgccatcacccgctccgattccatcatcaccgcctaccgcgaccactgtacctaccttgcccgaggaggtgacctcgtctccgccttctccgagctgatgggccgcgaggccggctgctcccgcgggaagggtggatccatgcatttctataagaaggatgccaatttctatggcgggcacggcatcgtcggcgcgcaggtgcccctcggatgcggcctagccttcgctcagaagtacaagaaggaggagacggccacgtttgcgctctatggtgacggtgcggctaaccagggacagctctttgaggctctcaacatttcggccctctggaagctgcccgccatattggtttgcgagaacaaccattatggtatgggaacagcggaatggagggcagcgaagagtcctgcttactacaagcgtggcgactatgtgcctggattgaaggttgatggaatggatgttcttgctgtgaagcaagcgtgcaaatttgcaaaagatcatgctgttgcaaatggcccaattgtccttgagatggatacctacaggtaccatggccactctatgtcagatccaggaagcacttaccgcaccagggatgagatttcaggtgtcaggcaggaacgggacccaattgaaagggttagaaagttgcttttggctcacgacttggcaactgctgctgagctcaaggatatggagaaagaaatcaggaaacaagtagatgacgccattgcaaaagcaaaggaaagttctatgcctgatacttctgagctcttcacaaatgtttataagaagggattcaacgtggagtcatttgggcccgacaggaaggagttgagagctactcttccgtaggttgggagaatggcagtcctcaatatgatatgatatccaggagaaataaacattgatgaagaaggcctcagacattgctggaattcttttgttggcaaatgaacctatgtagagatccgttgtcaggaggatctgcttagggcttgttcggttagccttcaatccatgtggattgagtgggattggatgggtttgaatcccacgcaagtcaaacttcttcataattttttccaaacccattcaatccatgtgtattgggaataagcgaacaaggccttatttgttttgcttcccttttccatttctacaattcagctttaactgctgctggttggcttcttattgaagctaatatcgtctgcaattgcttcggtccaaggaaatcgaagcaggagattataaatttgctcacgcctctcgtctatacctgccactcttagctttagttcggtaatggtacatgtaggactgcgtcgttacacttcgactggtcgattaattttatttaataaatgtggtgcatggatcggacagtgtgtaactcagaatatggtgcatgcaattgccgtgtttggtttctagaccct

SEQ ID NO: 35512 - DNA, 1674 bp, Zea mays
  Clone ID: UC-ZMROB73050A04_FLI
ccgtgcctcacgagtcacgagtcactccaggtccaggctgagcagcaatggcgccgcgaacgctcggcctcaacgcggccccgctcctccagattctgcggtccctgtgcctcctggccctcgccgcggcggcggcggtgtccgggcggcgccacggggcctccccggcgcgcggcagcgggcagagcatgtacctggcgccggcctgccgggcgcacacggcgtcggtggcggacttcggcggcgtgggcgacggcaccacttccaacaccgcggcgttccggtccgcggtggaccacctgtcgcagtactcgggcgagggcggcggcggtggcatgctgtacgtgcccgcgggcaagtggctgacgggccccttcaacctgaccagccacttcaccctctacctccaccaagacgccgtcatcctcggctcccaggacgtaggcgagtggccaatcgtggatcccctgccttcttacggaagagggagggacaaggtcggagggaggttcgctagcctcatcggcggatcgaacctgaccgacgtagtcatcactggcagcaacgggacgatcgatgggcagggcgccatgtggtggtccaagttccacaagaaccagctcaagtacacgcgcggctacctcatcgagctgatgcactcggacaccatctacatctccaacctgacgctgctcaactcgccggcgtggaacatccacccagtctacagcagcaacatcgtggtgcaaggcatcaccatcctggcgccgaccaactcgcccaacaccgacggcatcaacccagactcctgctctcacgtccgcatcgaggactgctacatcgtgtcgggcgacgactgcgtggccatcaagagcggctgggacgagtacggcatctcgtacgggatgcccagccagcacatcgtcatccgccgcctcacgtgcgtgtccccgaccagcgccgtcatcgcgctgggcagcgagatgtcgggcggcatccaggacgtgcgcgccgaggacatcacggcgatcaacaccgagtccgccgtgcgcatcaagaccgccgtcggccgcggcgcctacgtcagggacgtgttcgcgcgccggatgacgctcaccaccatgaagcgggtgttctggatgacgggcgactacaagtcccacccggacgacaagtacgaccccaacgccgtccccgttgtcgccaacatcagctaccaggacgtggtggccacgggggtctacaaggaggcggcgcgcctccagggcatccagggcgcaccgttccggggcatctgcgtcgccaacgtcaccgccgacctgtccaagtccaggaagtacccatggaactgcgccgacatcgagggagtgtcggccaacgtcagccccgcgccgtgcgacccgctacagggcgcgcacgacggcgcatgcccgttcccgaccgacacgctgcccatcgaccaggtcacagtgcagcagtgcgcatacgacatcccggccaccaactagcagctcaatcaaggagtgtattcggatgtggatcagccgcctagtacaacttgtagttcaggtccaatgcaagcgactagtagtatcaagtctcatcaacacaataacgacagaatgaatcgggcactagcctagaaagcattcataaactccgagcctgtccacc

SEQ ID NO: 35513 - DNA, 1664 bp, Zea mays
  Clone ID: UC-ZMROB73050A05_FLI
ttcggacctccccagtttttcccctccggccgccgccggagaagcagaagccatgcaggtcgccgccgcgcgcgcccgccgcctcctcgccttaccggcggcctcggggatccccggaatactctccggaccgatcccagggcgcgcatcatgcgccgagggcgttctcctttaccgtctcaatggcgctcccgcttcgccgtcttctccgcagcataccaggggcttctcctcctcctgcttcgcctcccgatcacactgtaacctcccatcgcctaccatagcttctcaatggttgaatgagaaatcagtacactgtcacatgacgacagcacacttctcaacggaagcaagtgacatggaccaccctacagaagctgtagaggagatgtaccagaaaatgttgaaatctgttgaagctgagaccatgcctccaaatgcctggttgtggtcaatgattgatagctgctccaataaggaggacatcaaacttctttttcaaattttgcagaaactcagggtatttagactatcaaatcttcgcatcagtgcaaacttcaatgagcatctctgcagaaaagtaactgaggcttgtgctcgtgtaggcgccgttgactatgggttgaaggctttatggaaacataatgtttatggaataacaccaacgattggttctgctcattatctactgcaacatgctaaagagcaaaatgacaacaaactaatggaaaacgtaattcatgtcctatcaaaaaatttcttaccgctgcaaccaggcacagctgatatagtcttcagtatctgttataatgctgatagatgggatttactctcaaaatacgcggagagatttgttaaggcaggtgtcaaactgcatcgagctgcatttgacatttggatggactttgctgccaaagttggggattctcaatctatttggcacattaatagtctaagaggcaggtctgtcaaacattatacacttgcaacagggtttgcatgtgcaaaggggtctctgcttgatcggaagccagaaaatgccgctgacaagattaagcttctttatgagcatttgcctgatcagaagaaaccatttgtgaaagatgaactcgagaaacttattgctggatggcctacggaggtggtaaagaggcagaagaaagataagaggaaggagttggaggaagctttgatgaaggacatccctacgatggtggactgcctgacaaagtccggcctcgacatccctgtggaactggacaagcttgccaccccacagctccaagtggcgtagcaaaagaaggcgcgcggctcgccatacaaccggaacagacttgagtctcgaggaacagcatgcattttggtttggcactgatgcaggcagcgcagcgcagcgcaggacgcagattgaaaatctgtgatagatgaaatcatgtttttatttctgtttctaatgttgtagtgcaggcccgtgcgtggtgcgccctttctgttgtgcgttgaccgttgaaaatctgtgatagatgaaatcatgtttttatttctgtttctaagaagcaaattgccgtcgtatcttggcacgtgttgtaactgtacccatcctttctccaaggactttctaatctgttattacttttaatattgcattaatagacctagtcgcg

SEQ ID NO: 35514 - DNA, 993 bp, Zea mays
  Clone ID: UC-ZMROB73050A07_FLI
ggtcaagcctaacatagcattcctactgcagtgcggtctaactgtttctaatgttctagagttcccattgctgataggcatgaggcccgagagtgtcagggaaagggtggcatgcgctgagaagcttggtgtgccgcgcaatacagggatgttcaagagtgccctgtgggccgtctattgcgttggtcccaactccattggtgcaaaattggatgtcatcaaggcgactcttggatgctctgaggcggagctgacccttgtggtgcgcaagtcacctccaattctgaggatgtcagaaggcaagctgagtcgcgcattgaagttcctgaaggtggatgttgggttgaagcttcagtacatcttgcttaggccagcaatacttgcctttagcatgcagaggcggctgatgcccagacattatttcatcaagattctgaaggcgaaggggcttgtgaaggaaaatgttgacttttataatgctctttgtttaactgaaaagagatttgcccagaagtttattgatccttacaaccagagtattgcagggcttgcagatgcttatgctgctgcttgtgctgggaaaatgcctcatgaagattaggcgcattagcagcagcatgctagggatcatggtgaagcaaaggcagagatagtcggttcaggtcttctctgcatgtacttgaacagcccctcgccaaactattgtgcagttccttgatgcataccaatgcttgcaacagatgctgcctttgtgtgttgaaatgaaattagttcttccttaagaccggtgttgtgacctatcatttcaggtaagccattggctattttcagatgggtataatgatatgttactctgttctttctgtgtttcaggtctaaatattgtctgtacttgaagtcttgaattaattatgtattgaacttgtcacacagttaattatttgatttaatcaaatatttctatctgaagtatgattcttatttcaatattat

SEQ ID NO: 35515 - DNA, 430 bp, Zea mays
  Clone ID: UC-ZMROB73050A09_FLI
ggccgacttcgccggcaactgggtctactgggtcggcccgctcatcggcggcggactcgctggcctcgtctacggcgacgtcttcatcggcggctcctaccagcaggtcgccgaccaggactacgcctaagtagtgtgctccgttcgtctggattcagctcatccaacgcaggcgcgcgtttcgatcggcgtcgtcatttgctttgctcttcatttcatcacgttatgtaacgtgccaatgatgtgtgtcgtcctggtctgttccattccgtccttgtattcatttcccttcttttttcggggtaaaatcgatgtaaagatctcatccgatctgccgttttcgatcgccttggagtgggaaaaaacaggtgattttcgtttcgacttcgtttatgcatggaattcttggctccttttacggtttgtatcc

SEQ ID NO: 35516 - DNA, 2001 bp, Zea mays
  Clone ID: UC-ZMROB73050C02_FLI
caaaatactataattatatcaagagcaaggatattcacgcctcgaccaagatttgtagtaataatgaaacaattagcaatgagactgtttctggatcaaacaccccaatccaaacaaggaatatccatgtctttttgtcttgctgttccacggctacataacagaccgcagtgccatgcaatcccagcttccttcgtttatcttgcaccggcagtgtactgaggtagcgctaatctcggttctagagggaatgtaaataaattacaataactcaaaaaaaaatctgaatacgtggctgcaaagttcaaagacacaaggctttacagttccaccttggttcttgttggacacgtgcatgtaaaagaggaacacgattcagcagttgggagctcacaccttcatgccagcgttcgacaaccaccgcctatcaccgctgaggtttcacaaatggagggtttcggcatgctgctgactaagaaagcaggtatccagtggacgcaacgcgaagatgtgtcttagggcaggccagcagtgttggtgtgttgccaccgtatgcaggagacagcctgtgggcctggtcaggcagggtagcttcattggagagattaacaatgggtacacatcaccagagagggtcagaggtgatcactgatcagccagcggagacggcattggagttggaagttgggaacgcatgagagatggagagacgagagattcaaaacccggtctctgtcatcgtggacactcggatctccatccgacgtccacttcattgcctgaagctaaaccatatttcaggcacctgacatagagtgcctctcgaaaggaatagagtgcacgggaaacacaaaacacacacacagatagagactatgcattggctgtagaccaccccagaaataattgattgaatcatcaaatctaaatgaactataatctggaacatagggagtacccgcttcctaagcatccttccgactcaggtttgttgatgaatttcctttccaaatcacgattttcctttctagggacctacagatcacatggccatcagggtaatgttatgctttaaaggtgatggacagatgatattccaggaagaatcacaatagccacagatgtcaaactagtacagatgcacattgagaatgcaattgagaagccagtgtttaggaaaacagagaaaccaaacaaactttgccttgaaacgacattggggactataaatgtaacaaaaattactctactgatgttctgtcgattcagactacacgttgagaggtttgctaagattgtaaaaatgtttataatttcggtcattaaatttatattataacatggtaatagcttttggtgccatatatatttattttccttttctctttcttttctgtttattgtgctcatgtagaagttgcaactctaagctatgctaacttgcttaggactaaaaggctttgtttttttctcaaatggctgttcctaaggtattttttgttggtccaaatattagcatgtaaataaaacaggtatgttatccccaaatccaaagcatgaggaacttattgagtattgatttatctttaacaatgtattactagactttgttgtacatttctaaattatttttctaaacttatagcttgtttgtagctcggaaactgacagtacttcctgttttaccgatagctctggcaaagggaggcagcaagcttgaggcaacaactgcacaacttgcaagaaagccacaagtatgatcttgcaatggattctaagataatgtgagaaactcttttccaatgttgtaggcaactaatgggagaggagctttcaggcctaggtgtaagagacctccaaagtttagagaatcagattggaatgagcttgtgactttcttgcaagtaatgcagttcctgcctcatgcttggtgccaccatatgcaatacaccaatggcttcgcatcctcccgcaatttccttccccgccctagccaatgag

SEQ ID NO: 35517 - DNA, 789 bp, Zea mays
  Clone ID: UC-ZMROB73050C04_FLI
gcagcagccagctccatccatcctctttcccctcctcgcttcgcttcctcggcggattcctcctccctcggccgtccccgtcccctttttcggcgcgcgagctcgcccgagatggcaaacgcgagatcgggtgtcgctgtgaatgacgagtgcatgctcaagttcggcgagctgcagtcgaagaggctgcaccgcttcctaactttcaagatggacgacaagttcaaggagatcgttgtggaccaggtcggggatcgcgctaccagctacgaggacttcacaaacagcctccccgagaatgactgccgatacgcgatctatgatttcgactttgtcactgcagaagatgtccagaagagcaggatcttctatatcctatggtccccatcctccgccaaggtgaagagcaagatgctttatgcaagctcaaaccaaaaattcaagagtgggctcaatggcattcaggtggaactgcaggctactgatgcaagtgaaatcagccttgatgagatcaaggatcgggctcgctaggcatcatgatcatgcatcatggactcggcctactactgtggatttgtatgccattatagacttggtgctgtgaaagactgcttgatgatttgcgggtttgttgctgtgtaaaaaaaggtcccatggctcccagaagaccatgaaggttcggatctatcatgtaattccttgttatctgccaattatgtatggactatggacatgtgttgcgctgttcaacttactactacaaataagtaatcgatatgttcccttccc

SEQ ID NO: 35518 - DNA, 1279 bp, Zea mays
  Clone ID: UC-ZMROB73050C10_FLI
ggacaaggaggagccttgcgagcatactaagctgctggaggacgacgtccccaccatcccgttcgatgacggcaaggcgctgaaaggcatgggtctggtcggggaagagccggccgggttctcgtcgcctgtctacagctccatcacggagagcaggagtgacaagaggagcgaggagcctactactctgcatagtttcaaccccgtgactggctcaacaaaggtcgtctcacctgacgagcagagcgagcctgctgctgggtctgggtccgggtctgggtcaggcccgcgtgaagcgtggtggaagaagcagcttctctccctttacaggaacgccaaggagagcaagcatctctggcctatcgtcgccaccactgctgctttggtgggcctggcgtatctggggcggcgctggcataagggcaggctgcagtttcagctgctcaagatatcgccttctaccaacaaggaggtaaattgcgtggaactgtttgccaaatactacattacaaaggaaaattgcattatgttgtctgtatcatagctgctgaccttataaccaactactcccgacatagcttctgttggttttcttctctattttctgatattgtttcttgttgtcgcatcatatattcatatcctgtcaagcatgctttttttttaagttgcacatgccagcaatgagaacttcactacgaatgggccatcatgcatgctacagctctagaattttgagtgtttactagcaggctagtgtattcgtttactagcatgctacagcaatgagaacctcactactgccttatctgtttacaaacaagctagtgtatcagtttactagcaaccacccaagtcatacatgtgatggggcctcaaaatgttggagcatccctcgttttttaatggcgcctgcaaatgctaatgaacgcacactcttctttgcgtttcagaaaatcagcgacgcggttggaccgttaaaccgcatcaacgacattctcgttgctggcaaccacccaagtcacggtgtccatgggcatgcccgtgcaggctgaatgcagtcagttcgcgaacccatcgggcgtcctggacccatatactatcatgtgtcgctttgagaatcggctcaagacaaaccatcgggcaggactggagtagttgtccaaggactgaggatgtttatgcagacacaagtatgtttggtggctcgatgtatgtgaattccaaaactccatctgggtatgtaaatatttgtatgggtttagtttggttgcttttt

SEQ ID NO: 35519 - DNA, 2435 bp, Zea mays
  Clone ID: UC-ZMROB73050D03_FLI
ggcacagacagctttagtaatataattggttctgtgtattaccctgatggagagactgcaaaggacttggcccttgagcttgtcgaaaatgggctggcaaagtatgttgagtggagtgccaatatgcttgatgttgaagtaaaaataaagctgaagaatgcagaacttcaggctaaaaaggatcaattgagaatctggacagggtttaagccaccagcgacaaactcgaagcccattcatgaccagaaatttaatggaaaagtggtagaggttgtaagtggggattgcattattgtggctgatgattctgctccatatggaagtccttcagctgaacgtcgggttaatctgtcaagcattagggctcctaagttgggcaatgctcgtacagatgtgaagcctgaccattttgctcgtgaagctaaggagttcttacgcacgaggttgattggcaaacaagtggctgttgaaatggaatactctcgaaggatcagcactgtagatggacagagtgctgctccaacagcaaacatggctgatacaagagttttagattatgggtcagtttttctgggttcaccatcacagactgatggagatgacacatcttctgctccgagctctgctagccagcctggagttaatgttgctgagcttttgctctcacgaggctttgctaaaacatctaaacacagggattatgaggaaaggtcacactattatgatgctttattagcagctgaatcacgcgctgagaaagcaaagaaaggcgtgcattctcagaaagaatctcctgtgatgcatataacagatttaacaactgtatctgcaaagaaggccaaagattttcttcccttcttgcagcggaacagaaggcattcggccatcgttgaatatgtttttagtggccatcggttcaaactaacaattcccaaggagacttgtagtatcgccttctcattatctggtgtccgttgtcctggtaaaggcgagccatactcagacgaagctattgctttgatgaggagaaggatacttcaacgagatgtggagatagaggttgaagcagttgataggacaggaacgttcataggttctttgtgggagtccaagaccaacatgggctctgtgcttctggaagctggacttgccaagctgagttcatttggcttggataggacctcagatgcttatatcctaacaagagctgaacagtctgcgaagcaacagaagattaagatatgggagaactatgtcgagggtgaaaatgcttccaatggatccacacctgaatctaaacaaaagcaaattctcaaggttgttgtcacggaagttcttggtggtgggaagttttatgttcagacaatgggtgaccagagggtggcttcaattcaacagcagcttgcatctttgaaacttaaagatgcgccggtcattggtgcttttaatcctgtgaagggagagatagtcctcgcacaatttagcgttgacaactcctggaacagagctatgattgttaatggacctcgttctgttgaatctccggacgacaagtttgaagtattctatattgactatggcaaccaagaggtggttacctacagtcgtttacgacctgtagacccatctgtttcctcgtctcctgctcttgctcagctatgcagccttgctttcataaaagtgcccagtcttgaggatgactttggtcaggaagcagcagagtatctaagtgaatgtttgctcagtagctcaaagcaataccgggcaatgatcgaagaacatgatacttctggggggaaatcaaaaggacaaggaaccggaaatgttctcattgttactcttgttgatgcggagacagaaagtagcataaacgctaccatgcttgaggaagggcttgcccggctcgaaagaagcaagagatgggacactagggagaggaagacggctctccagaacctggaacagttccaggacaaggcaaagaaggaaaggctgcggatttggcagtacggagatgttgaatcggacgaggacgagcaggccccgcctgcaaggaagcctggaggtcgtcggtagagactgggcagtgtaaggctgcagtctggcatgctatgaaagttttggacaaccacaaatgttggactctgccgggagttatagatgaggacttactgaggggtaccgtatttatattcggttagaagaagggaacttagcgaggcgaaatcacttttgatattccgtttttacaggcgaaactttctctgttttagcacttttgatattccgtttttacatcgcaagttataaggttaaagatgcattgtttctttttctctcaacttaataaggttgtgtctatgcgctgcggttctttgtagtcagaatataatattgagaagtgcagtgaattaagttaaggattgcatttaatt

SEQ ID NO: 35520 - DNA, 1103 bp, Zea mays
  Clone ID: UC-ZMROB73050D04_FLI
cgagttgaacccatcttctccaccgagcacgaactgtcttggatccgcgcgcgcgtgccgtacatacctcgtcatgcaggagttcaggtgctgcctaatcctcggcggccctcaccgcgccaccggcgtctcgcgtcgtcgctgccgatcgatcgatcgtccagcccgccgccagttgagttccgaaccccgatgcttatagcctcccatccctggttagcaagcatcgtgtgtatcttgcatctcagacttgcttcctcttcatcattcattcattcatactcaagcattaattattcaggaccaagcaagcggtagaattcaaattcaattcgcacaaccctttgcttgtcagctagcttaccttgtgtattggatttgaatacatgctggtaatccatctaataagaaagcgctgtgtggcgctacctgtccgtagtatggccgcgccgactgtctgtcggctggcatggcatgatatacattctagttatcttgaaccaaaggcgactgtccgtagagttgcttgctcttgcttcagcaggtgggaatggcgccgtgcacttgggttcgcctgtctcagttaccagaggagcctaatcccatcgtcgctcgtacgtcgctcggatgtcggcatcaacgaccagcgcggcagccagcatgcacaggcgcgccgagaatgatcagggggtgccgtctctatccttcattcagcgattcgctttctgaaaagaacattgcacaaaaacagcaagatggctctgggtgcggatgaatgctagctccatgttccgtcactttttgtttgtgcggttcttcactgactttgagtctagtcttggcgttctaactaaagaccgtcatgttgcgagtatacatgcaggtgttagagtagccgttcctcgtgcatgccttgcatattgctcatcatattaataatgatctgtcgtcacccatcttcatctcaactgtagaagatgcgagctgagatcggccatggatcctgcatattattcatccagggccaaattttcttgttctctgtgtgggtttcgtttttttttcatgtgaatgaaatcccttatttcatgaagcaagatttc

SEQ ID NO: 35521 - DNA, 718 bp, Zea mays
  Clone ID: UC-ZMROB73050D11_FLI
gcctgctgttcacatggcacctgaagatgttcgatggatggttggagcatggagggagagaatcattgtatgcagcggtaagtatggcctcgctcatggcctggtgaaggcattcatggattgtggcgccaaagcagtcatctcatcgtccatcgagcctccggattcccagacaatagtctatcatgggatggatgtcaatggaagcctagagaatgggaagtttgtcatcggggatgaagaagccgatgaatcggaacctgaacctgttagccctgtaagtgactgggaggacagcgacgtggagaaaggtggcaaccatgacatggatgatgaggagtacctggctcagttcatgtgcctgatgtacgataaattgttccgtgagggtgtgactgtggatacagctctgcagcaagctctccgctcgcatcccaagttaaagtacagctgccacttacctcacgttttgtagttagggacattgacaaaccatacaggagtatagcaaaacgggcatggacaacaggaaatgaataaggattgggtggattcatagtggggttatagaggtttatatcgtgttcgttgtgcaggcgtagtgacaaagggtacccccttactgaatctttgggcgagaaagcctatgtaaacctgtgtgctcatgagcagagtagttaagctgacgaataaaagcatgatgaagggcattgtaatc

SEQ ID NO: 35522 - DNA, 1654 bp, Zea mays
  Clone ID: UC-ZMROB73050E05_FLI
gaaccgcagagacaggcgtcttcgtactcgcctatctccgcgactcaaagctttccccaattcccccccttctcccatttctcaccaccgccgccgctccccccgttcaacaacaccatgagggagtgcatctcgatccacatcggccaggctggtatccaggtcggaaacgcgtgctgggagctgtactgcctcgagcatggcattcaggctgatggccagatgcccggtgacaagaccattgggggaggtgatgatgctttcaacaccttcttcagtgagactggcgctgggaagcacgtcccccgtgctgtttttgttgaccttgagcccactgtcatcgatgaggtgaggactggcacctaccgccagctcttccatcctgagcagctcatcagtggcaaggaggatgcagccaacaacttcgctcgtggtcactacaccattggcaaggagattgttgacctgtgccttgaccgcatcaggaagcttgcagataattgcactggtctccagggcttcctcgtcttcaacgctgttggtggaggaacgggctctgggcttggttctctcctcctggagcgcctgtctgttgactatggcaagaagtccaagctcggtttcaccgtgtacccatccccccaggtgtccacatccgtggttgagccatacaacagtgtcctgtccacccactctctcctcgagcacactgatgttgctgtcctgctcgacaatgaggccatctatgacatctgccgccgctcccttgacattgagcgcccaacctacaccaacctcaacaggcttgtctcccaggtcatctcatccctgacggcttccctgaggttcgatggtgctctgaacgttgatgtgaacgagttccagaccaacctggtgccctacccgaggatccacttcatgctttcgtcctacgctccagtcatttctgctgagaaggcctaccacgagcagctgtccgtggctgaaatcaccaacagcgccttcgagccatcctccatgatggccaagtgcgacccccgccatggcaagtacatggcatgctgcctcatgtaccgtggtgatgtggttcccaaggacgtgaacgctgctgtggccacaatcaagaccaagcgcaccatccagttcgtggactggtgcccgactggcttcaagtgcggaatcaactaccagcctcccagcgtcgtcccaggcggtgatctggccaaggtgcagcgtgccgtgtgtatgatctccaactccaccagtgttgtggaggtcttctcccgcattgaccacaagttcgacctcatgtacgccaagcgcgccttcgtgcactggtacgtcggtgagggtatggaggagggcgagttctccgaggctcgtgaggatctggcggcgcttgagaaggactacgaggaggtcggtgctgagtttgacgagggtgaggacggcgacgagggtgacgagtactagacgctctactggcgcggcgtcgtcgggcttgtgtgccactgctatcctgtgatctgccctgagtggctcctatcgtgttatgtttctgtcggttcttatctatctgtcgttgtgtggtttacaacttacgttgtaagactttattcccccgctttgctactgggttattaagtttggcgtt

SEQ ID NO: 35523 - DNA, 1125 bp, Zea mays
  Clone ID: UC-ZMROB73050E11_FLI
cgctgggcagcgactggtccgccacccacgccgaggtcgcccggcgctcgcggagttctgcgacaacgcggcaaggccggcctgcggcaggaggccgtggtcgcggacgccgtcccgcggctggtgtggatgctggaggccaagcccgcgggcgagcgcgacgccacaccaactgcttctgttctctgtcccaagtttgttagccctcacgtttgcctgagatctttcagttacaattcctccggatcttagcccaataactaaaacttagtttcttgattacagacaagccagggcccaacgtatgcttctgtctggttcagctatttactttaaatctagagctagcagctgccctacttttcaatcttacatgattgtgctctgaaaattgaacccaggggtgagtggtggggtttgatgaatacaactcccaggtggatgtcgccgtgtccggtgaaatagccgcatctgtaaagcatatagacccaggcacagacagtgatgccgggattgggaattgggattaagtagcgccgtggccgctccggcccaaagtgtatcgaagtgtatgcgctgattggttgtctacctctgttgtgagtttgttcctgcgtggtaaaaatacgtaccttgttgttggtagatggctcgttgatggggtacattggattggtggtcctcctgaagactacattcctgactggttgtgtgtgatgagagatcttccagaacttgtgctgaagtatatgttcctgcataagacaaattagagttttggtcaggtaggtgcttacccaaggttttgtgtccattggtttcttcagaatgagctgagttgttgactgctatatgtgcggctattttcattatgaacttgcacaactgtccatgattttggaattgaatctcttgtcgttcctggctttccaaatgtaccgaatcatcaggagtatatggttggatcagagctgaaaaaatttcctggactccatcttgttcctgagggaggttagtagtacgtagaagagggatagaagaaagttagtaaaatgtatcagcggtacttggaacttttgaacctaagctaaactttccatcattattttattttcttacgaggct

SEQ ID NO: 35524 - DNA, 767 bp, Zea mays
  Clone ID: UC-ZMROB73050E12_FLI
caaagtcgcacctatcgatgcgcacgcgcacgcctgcctggggccgggcggcaaagctaagctcagccagagtcgatcatcacacggcgatggagccggccgccgacggcgacgacgtgcacgggcagcgacgggacggaggacaccacgcgccggtggtgtcgctccgggcgctgggcctggcggacgcggacgccttcatggcgtgggcgtcggacgaccgcgtgatgcggcacctgaagcggccgctctgcgccacccgagagcaggccgtggcgcagatcagggacaccgtgctgggccacccgtggttccgcgccgtctgcttcggcgacgtgcccgtggggcaggtgtccgtgtggccgtacgccgacgagggcggtcgcagggccaacctcggctacgccctcgcgcacgaccagtggggccggggcatcgccgccgccgccgtcaggatggtggtgggcacggtgttcgacgacctgccggggctggaacggctggaggcggtgacggacgtggcgaacgtgcggtcgcagagagtgctggagaaggccggcttccacagggagggggtgctgcgccgctacatcgctggacgccgcggcagcggggccagagatgcggtgatctatagcttcttgtcgtccgatgatcgtgcgtgacccggtgaccggtgtcgctatgctacctgcatatggttgtgtgtcctgtaatatgcgttccataaattgtgcaagatagaaatggactactgcgtataatgt

SEQ ID NO: 35525 - DNA, 892 bp, Zea mays
  Clone ID: UC-ZMROB73050F07_FLI
cgcgagtacaaaccctcacctgcaagagctggccgcttcggcggtggcggcttctgaaccaccaccgcgggcgcgcgtggtgcggatcctagtgcacgatgctgacgccaccgattcgtcctccagcgaggatgaggcaccgccacttcttcctcggcggaggtcgaggggtggtagcagcagcctgagcgtgaggcgccgtgttatggaaccggctggggcaagctcggccgttcggttccgtggcgtccgtcgtaggccgtgggggcgctgggctgcggagatccgcgagccgcacaaccgccgcagactgtggctcggcaccttcgacaccgctgaggaggctgccaacgcctacgacgctgcgaacatccgcttccgcggtgtcagcgccactaccaacttccctgcggcccgctactcgccccctccaaagccagcgaagcctatcatctcgctgactcctgaacccggaaaggtgatcaccttgccaccggtacctgtgaagccaaccttccctgttcaggtgaaggaagtgggtgggagctggggcggcctggtcaagggagctaggtcggaggtcaaggcgtttgcaccgaagccagtatggaagatgatccccagggtgcaccagaagtttccgggttgtgccgatggctctggcctgcgtgccgtccatgctgcctccatctacgtggaggaggttggcggtggctgatggtccaagtatctgcaattactatcgctagaggttttattgtctatctccatggcatcattataacctggtactgtattattttggttagtgttaaactgttgatgtggaaacctatgactcttgctgtgttatgatcggtggtaatataatgtgtatatggtgacatttggt

SEQ ID NO: 35526 - DNA, 1029 bp, Zea mays
  Clone ID: UC-ZMROB73050F12_FLI
caattgggcgcctgatatctccaagctcgggctgttctggcacatcctccccattccctgaccctgagatgcaggcttcttcacgcagcgctttacgcttgttcccagttcgtgagccccctaagatattggatggcgagggcgttgcgacacagaagttgatacctcgccatatgcgcaacggtgggtccctcttggatggccagatctcagcagctgtaccagttgtggacttctctgcccgacttcaacccaacgagcacgcaatggatcaccgggtgtcattcgagttgaccgtcgaagatgtcgcgcgctgccttgagaagaagactgcaatctccggggattctggcacggcatcattccaccttgcaccgaccggcagcggcgaccaccacagagaatccaacgaggcaagggcagggctctacgtcgacgaatcataccatgacttgcccgagaaagcgaggcggtccctgtccctgcgcctggccaaagagttcaatttcaacaacgtcgacgtcggtagcgtggagccgagcgtgggatccgactggtgggcgaacgagaaagtcgccgggatgacaactgagccaaaaaagaactggtctttccacccggtggtgcagcctggggtcagctaacctttgcactgaccataatgatcttatacagggatgaaggaattagcttcttctgcttctgcttctgcttcagtggtcgattccttagggatgacttgccagcttgttctaaacatgcagctagtggtaagttctggatttagatagtaataagtaatggggtgtccaccgtctaatatcgtcatgggatactaaaggtttttattctgggagatgtgacaaaccgcaaactctttggttaggggtcggtcggaactgtcctgttcgtctgttttatcctgataccggtgctgtgttgtgtatgtacataatgaagtagttttttttaaaaaaagtcaattaaaagggtagaacagtttccttcgataagttgccagatgctacc

SEQ ID NO: 35527 - DNA, 479 bp, Zea mays
  Clone ID: UC-ZMROB73050G03_FLI
atcccggcgcaggtggccgacctcgccgggctgcagctgttcaacgtcagctacaacaagatgtgcggcgtggtgcccacgggagggagcatggccaagttcgacgcctacagctaccagcacaacaagtgcctctgcggcacgccgctgccggcatgcggccaccgttactattgatcgatcgatccatccatctatcgatcatgaaagtgtcatgcttgttcttgtgtacgttccagcaaggtaaagtacagttccaggcaaggtaaagtacacttccagcattggatcgagctgagactgagaagcaactatagccagtgtggtgtggcagtgaataataatgcatggttatctgtgcctgctagctaggcatatagactgattaataagctcaatgcataatgtactatatatatatatgtgagtctctcttccaatcgagtaccagcaataataatatattatattgttgcttc

SEQ ID NO: 35528 - DNA, 1254 bp, Zea mays
  Clone ID: UC-ZMROB73050H02_FLI
gccgcccggtgttgtgtcgtcaggtagccgcctccccacctcttctgcttgttctccgcggcggcggcttggatcggagcggaggaagaagatggtggcatcgatcagggtgcccaagacccaacgcgccaggcgggagcttctcaagcacgcgcccaagcttgttgagaccagcaagaagacactgatcctccatggtaccaagactagtgctgtgttgaactctgtgctgtcagatatttaccacctaaagcgtgataatgctgtgaaatataccaagaagaatgacaacattaggccttttgaaagtggtggagaatcttctctggaatttttctcccttaaggcagactgtagccttatagtgtatggttctcattcaaagaagaggcccaacaatctgattttgggtagaacgtatgaccaccacatatatgaccttgttgaagtaggagttgagaactacaagtcaatggaatcttatgtttatgataagaagctagcaccattacttggatcgaagcctttctttgctttcataggggaacactttgagagtgctgaagagctgaaacatttgaaagaagtgctgcttgatcttttcagaggagaggtcgtagagaatctgaaccttgctggtgtggatcggatctatgtgtgcactgcaatctctcccactactgtttacatgatgcactgtgctctccgtctaaaaaggtcaggtacatctattcctaggatggaactggtcgaagttggaccttcaatggatctggttgtaaggaggcacagacttccagctgaaagtttaaagaaagaagctatgaagaccgctgaacatgctaagaagatgaaaaacgtcactaaggatccagtgcagggcaagctgggcaaggtctacatgccagaccagcaggttggaaagttgaccttatcaaacgacataaagggactaaagagggagcgccgtgaagccaagaaaaaccaggactcaaagaagcaaaaggtcaaccccgagtaaagatcactgaagtttacctttgcattggatacaggtcaggttaagaaaccccggtttgtatctgttcccatctgctgtgttatccaattagaagttgctcgttgtcagatagtgttaaatagtttagggccatcttgttaggctaaagacatgtgcacgactttcacaacaatattgcgtaccaattcatgttaagacgtaagcatggaaaaatttgagagtgttatcctatc

SEQ ID NO: 35529 - DNA, 1471 bp, Zea mays
  Clone ID: UC-ZMROB73050H05_FLI
ctgcctgaaccaaaacacacacacacacaaaacacgcaatgggcgccatgactctgccgcccggcttccgcttccacccgaccgacgacgagctcgtgggctactacctcaagaggaaggtggacaacctcaagatcgatctcgaggtcatccccgtcgtccatctctacaaatccgagccatgggagctaccagagaagtcgcttctgccgaggcgtgacctggagtggttcttcttctgcccgcgcgaccgcaagtacccgaacgggtcgcgaaccaaccgcgccacgtccacggggtactggaaggccacgggcaaggaccgccgcatcgcctgcgacggcggcgtctacggcctccgcaagacgctcgtcttctaccgcggccgcgccccgggcggcgagcgcaccgcctgggtcatgcacgagtaccgcctctgccaggacctcgcccacggcacttgcaacttcatcggtgcttacgcgctttgccgcgtgatcaagcggcacgagggcgggctgccgcagggcgagagctacgcgaaaggagccgccggcagcgcgagatcagggcagatgagcaaggtctccagcagctcgtccctcgtcagcaacgaccagctcagcgcgtcgttcacccctcctcctacactggacgtgggcaccatggctggatccggcaacgcgttccagagccccgttgggtacgggtacggcgtgacgacgacggcgacggcgacggccaccactgcggggctgccgtcgagcgcactggccacgcccctgctcatcgtgccgtctccccacgacacgttttccatcggcggcgacggcgacttcctccccgccgcggccgagtcgcgcgcgttcgcacgcgcacctgttcgacaccgtgggaatggggatgggcggcgtctcggagcaggagctgaaatgggacagcttcgcctgcccaagcacgttctcgagtggtgccgacatggcggcggcgagtccggcgacgctgtgccggcaggcgagcgacggcttcgacgacctgctggcggccttcttcttctcggatgacaacaggatcgtcttctgaacccaatgcacagcacaggggtaaatgctgctctgatcaactcaagatgttcatactgggaaataaaaagtgacctctgctctcccagaaatggcgattatatttttcacagccagggaaagggagatactacgtactggggagttcactcgtgttggctacagacagagtgatggcattttatttaccgtgcggtcttctctgtagcactggtgctgtgtacgacggccgtgtgtcacttcttcctgaattctcatgcgtgtgtcatttgcaccaccacctactactagttacatgtactagcagtagtacttgtgtgattgacctgccctgttctgtatacgacagagctaatgcagtattgccatgctttgtagccttactaacc

SEQ ID NO: 35530 - DNA, 971 bp, Zea mays
  Clone ID: UC-ZMROB73050H10_FLI
tttcaatcgccaaacaaatgtgcatagaagaaagagaagatcaagcctattcgatatggtgattgatgacccgtctgatcaacttccgctctcgcgttcatcttcacaagaaatggagcagcaacatttagatgatccacagcctgttgcagccctgcctgcacctgtggtctctccagctactgtggtacctcctgtgcctgtggaagtgtctgcttcagttccatcgccagttcaggtcccagttccagtttcagccccagtgatgacatctcagcctatggaacaggactcagataccacaagttcaattgctggagaggcaggaacggtgatgccaggagccatgcccccctatctttatccaatgatgattcctcctccatactaccatactgcttttgtaccaatgccctgctacggttatgttcctttttactgtgagccacaaggtgctgcacaggctccgcatgaggttgtcaagccagtggctgttcattcaacgcctccactgaatgccaaagacctttacaacatgtctgaattgagcctgaagggcgactcgaatgcaaacggtggtgtgcctgcttcccccttgcctccgaagccgatcggtagaccagagaggcaatctgctttccatggcaaaggacctacacctaccggtggctcgtcaggtggactgattcctgcagtcaagtgaattcgattatgctcctaaacatgccttcatgtgtatgtaatactagaaatagccaaatcgtaatagccgcctgtgctgctaaaatggtggtgtgttttctagcaaaatatctatactgctcattttagccttcaccagtttggaagtcatgatccgagggtaaatatattgttagcttgttgtttttgcaatagtcttctttttttccccatcaatttgccccaattttcttcatcaatccttaaagttatcaattattatttgtttt

SEQ ID NO: 35531 - DNA, 1151 bp, Zea mays
  Clone ID: UC-ZMROB73051C01_FLI
gcactggcagcggcgtctactactactacatgagcgggagatatgagggggattgggtcgacggcaagtacgacggcttcggcgtcgagacctgggccagaggtagccggtaccggggccagtaccggcatggactcaggcatggctacggcgtgtacaggttctacactggggatgtgtatgctggggagtggtcaaacggccagagccatggatatggcgttcacacctgtgaggacggtagccggtatgttggtgagttcaagaggggcgtcaagcatggtctcggccactaccatttcaggaatggtgacacctacgcgggagagtactttgctgataggatgcacggctttggaatctacagctttgccaatggtcatagatacgagggagcatggcatgagggtagaagacagggtttaggtatgtatagtttcaggaatggagagacacaagctgggcactggcaaaatggagttcttgatactttatgcacccagaactttatccctggatcacctattgctgtgaaccattccaaggtcctcaacgcagtgcaggaagcgagaagagctgcagagaaggcctatgacatcccaagagtagatgatagggtgaacagggccgttgcagcagctaataaagcagccaatgcagccagggttgctgccgtgaaggctgcacaaaagcgcaaccccaataatggtgatgatctaccactgtcagtagtgtgacaatgaaggaaatatatgttggcatgaagctgcttcgctatgccatcgcatcacccattgcccggcataaccttcagcttcccagtaggggaagccactgctcgtccatcaggccttggccagtggcgacacctgagtcattgccggcagcattcaagcttgcgggagaagaccaaattttcatacatatacatatttgtggtgtcttttgcgatgcagcagaactactgctctgaggactttccattgttcaaggtaactgggcgcgaggccagcagtaggtttctcctgcattttctgcagtgtaatactcacccaatgttagcgatacgacgaatgcacaccccaacatcaggagacaaaaacctactccctccgtttccgtttcaaactatgaatcattttaacttttac

SEQ ID NO: 35532 - DNA, 1306 bp, Zea mays
  Clone ID: UC-ZMROB73051H02_FLI
aaattatatgcaatcgcaagcgagcagaatggcgaggtccagtggtagtagaccagtggccctcgtgctgctggcgctgtgcgccgccgccctctcgtcggccacggtgaccgtgaatgagcccatcgccaatggcctctcctggagcttctacgacgtttcctgcccgtcggtggagggcatcgtgcgctggcacgtcgccgaggccctccgccgcgacatcggcatcgccgcggggctcatccgcatcttcttccacgactgcttcccgcagggctgcgacgcgtccgtcctcctgtctggttccaacagcgagcagatcgaggtacccaaccagacgctgcgtcccgaggcgctcaagctcatcgacgacatccgcgccgccgtccacgccgtctgcgggcccacggtgtcctgcgccgacatcaccacgctcgccaccagggacgccgtcgtcgcgtccggcggccccttcttcgaggttcctctcgggcggcgcgacggtctggcgccggcgtcaagcgacctggtgggcaccctgccggcgcccttcttcgacgtgccgacgctgatcgagtcgttcaagaaccggagcctggacaaggcggacctggtggcgctgtccggcgcgcacacggtgggccgcggccactgcgtctccttcagcgaccggctgccgcccaacgcggacgacggcaccatggacccggcgttccggcagaggctgacggctaagtgcgccagcgaccccagcgggaacgtggtgacccaggtgctggacgtgcgcacgcccaacgccttcgacaacaagtactacttcgacctcatcgccaagcaggggctcttcaagtcggaccagggcctcatcaaccacccggacaccaagcgcgcggccacccgcttcgcgctcaaccaggccgccttcttcgaccagttcgccaggtccatggtgaagatgagccagatggacatcctcaccggcagcgcgggagagatccgccgcaactgctccgtgcgcaacaccgccctcggagatgtctcatcgtcagcccaccagctcgagaccaccgccggcgacgaggggctcgcggccgacgcgtgaaatgatgattagctgctgttgttttttctctggtctccttcgattctgttgaaataaggcttgctgcatcatcggtatagtttgcattcttctacccatcaatatggtatatcttcctgtgtcagccccgtgattaccatgcagaccaacgcgtgagcatctatatgtcttaacaatatcagcagcaaagcatgcatttgatgt

SEQ ID NO: 35533 - DNA, 960 bp, Zea mays
  Clone ID: UC-ZMROB73051H05_FLI
cgcagtcgaggcaaaaggcactgggggaccttcaaagcctacagaacgacaagcttgaaaggttaagtgacatacaaagtcaacctgagtcacagctgaagttcattatagaggcatggttacagattgtcgaatgcagaagggtattgaagtggacttatgcctatggattttacctgccagagcatgagcatgccaaaagacagttctttgaatatctgcaaggtgaggcagaatcaggattggagcggctacatcaatgtgcagagaaagaacttcaaatataccttgatgcagaatctccctcgaaagacttcaatgatttccgtacaaagttggctggattaactagtgtgactcgcaattattttgaaaacctcgtccgggctctggaaactggattaaatgatgtaggtccttccactagccatggtacatgcagcaaaagcgcaacttcgaagagcctcggtggtaaaagtaagagtggcaagaaccgagcatcaagcaccagttccaagtcgggtggctcaagccgaggtgtggatgatagtaacatatggacgtgcgatcagtgcacatatgcaaaccccaaatctgccagagcctgccaggcttgtgatcaccagcatcgatagcgctgtcagtccttgctagagatttgaaccccatttgttgagaatcttctggtgctcccccgtgtaatacacaaacatacatgaaattgaatgctagctgatctctgggggtaattgcactaggaatgctgtaggttttcgtgtatctcggattgtttgtcgactgacatcgcctgagaagcctcaactcatcatccagttcgatttgtgtatataagtgtatcatctgtaacaatgttctttagatgagctaggaggcgtctgctgccaaaggaactgaactgttgtactgctgttgtaatataataatgcatttgtcaaattt

SEQ ID NO: 35534 - DNA, 894 bp, Zea mays
  Clone ID: UC-ZMROB73051H09_FLI
aaatctgtaagagagaacaaaaaaaaaggagtcaatcgccggcgacgggtacgggtgtgtacgcctgaggcgatcggcagagaagaccgagaccgacggctccagtgccgctgtgccactgccagtctgccacagccagccgcctagcttgatccgccttttgtgctgtgcggatatgagggccgcgcagatcgatccgtcccccgcggcgccgcccaagtcgcggctgaagcgcctcttcgagcgccagctgctgcgggtctcgccggccgagcgcctcccgtcggcgcctcccggtggcggggacaaggatgagctgccggagcctagctcgctgtgcctggacggcatggtgcggagcttcctggaggacggcggcggcggcggcggagccgagcgggcggcagcggccgcgcggtgctgcaactgcttccacgccggcgacacctccgacgacgaggacggcccggctgccgccgacgccgcggccgctgacatcgcggagacaatcaaggggctcgtccactgcgccagcctccgggagcgcaacctgctggccgacgtgtcgacgctggtggagcgccaccgcgcgtcgggggcgcgcaagcgcgacctgctccgcctgctggcggggtccctccgcgcggcgggccacgacgccgcggtctgcctctcccgctgggacaggtcgccgtcccaccccgccggggaccacgcgtacctggacgtgctcctcccggccgcgtcggagcgcgccgggcgcgagcgcgtgctggtggacgtcgacttccggtccgccttcgaggtggcgcggcccaccaaggcgtaccgcgccgtgctgcagcgtctgccgccggtcttcgtcgggcgggacgaccgcctgcgcctcctcgt

SEQ ID NO: 35535 - DNA, 1629 bp, Zea mays
  Clone ID: UC-ZMROB73052A10_FLI
agcatcacactccctctctctcgcgcgcgctcacaagcacgtcgtcaaccatggttgtcgagatgaaggagaacggcggagcggcgttggcggcgggcgagaaggcgccgcagctgggcgtgaagcgcggcgagccgacgctggtgccgccggcggaggcgacgccgacgggcgggcagtactacctgtccaacctggaccagaacatcgcggtgatcgtgcagacggtgtactgctacaagccttcctcgcccggcggcggcgaaggcaaggaggacgtggacgtggcaggcgcgctccgcgacgcgctggcgcgcgtgctggtgcactaccacccgctggcggggcggctgggcgtcagcccggagatgaagctcaccgtggagctgaccggcgagggcgccgtgttcgtggaggccgacgccgcctgcgacctcgacgccgtcggcgacctcaccaagcccgaccccgccgcgctcggccagctcgtctactccgtccccggcgctaagcacatcctcgagatgccccccatgaccgcgcaggtgacgaggttcaagtgtgggggcttcgcgctcggcctggccatgaaccactgcatgttcgacggcatcggcgccatggagttcgtcaactcgtgggcggagacggcgcgcggcgtcgccgagctcaccgtgccgccgttcctggaccgaagcgtcctgaaggcgcgcgacccgcccgtgcccaccttcccccaccacgagttcgccgagatccccgacgtctccgacacggcggcgctctacggcgcgcaggagctgctgtaccgctccttctgcttcgacccggaccggctggagcgcgtgcgcgggcttgcgctcgccgacggcgccctgggccgctgcaccaccttcgaggcgctgtcggggctggtgtggcgcgcgcgcaccagggcgctggggctggcgcccgagcagcgcaccaagctgctgttcgccgtggacgggcggcgccggttcgcgccgccgctcccgcggggctacttcggcaacggcatcgtgctcaccaacgcccttgccacggccggcgagctgctgtccgcgcccgtgtcgcgcgcggcggggctggtgcaggacgccgtgcggatggtcaccgacgactacatgcgctcggcggtggactacttcgaggcgacgcgggcccggccgtcgctcgcgtccacgctgctcatcaccacctggtcgcgcctcgagttccacggcgccgacttcgggtggggcgagcccgtcatgtcgggcccggtcacgctgccggagaaggaagtcatcctgttcctggcgcacgggaaggagaggaagagcatcaacgtgctgctcggcctgccagccaccgcgatggacgccttccaagagctcatggacgagatatgattcattcgtcggtgatgacggacatggatgggttgctgctatacatacatttacgatgcagggtgcttatacattcttcaattgctcggtgttatagtacgaccgtgttaatactcgatctatgttgatgttgttaagtttagtggccatatgagaatttgctgtcgattgcaattgttctaatattaatggaaaatagtaaactttatttcctttc

SEQ ID NO: 35536 - DNA, 453 bp, Zea mays
  Clone ID: UC-ZMROB73052D05_FLI
cgagcataagcactcggcggcagcgacgcactgcgacccggagttaacgtctcagctgaagcgcgcggcgcggtcgaccgtgtcggcaatgccggggcgcaccgtggcggccggcgagacgcccgtgctgatgagcggcgcagggcacgacgcgatggcgatggccaggctcaccaagatcgggatgctgttcgtgcggtgccgcggcggcatcagccactcgccggaggagtcggtgatggacaacgacgtgtgggccgcggggctcgcgctgttcaacttcatcgaccagaacgcggtgtcagaagaactggatgccgggcagaacgtggtggctgtggcgctggcggtggcagagtcgtgatggttcggtggcgattcttttcagtgggagtaggcctgtagcctgcaactgtacataagacttgttattacattgcattaaacaggaat

SEQ ID NO: 35537 - DNA, 643 bp, Zea mays
  Clone ID: UC-ZMROB73052E05_FLI
caagggtggggcatgaatgatagaggggtctcatatacctttggtgctgacaaggtttcagaattcttgcaaaagcatgatcttgatcttatctgtcgtgctcaccaggttgtcgaggatgggtatgaattttttgctgacagacagcttgtcaccatattctcggcccccaattattgtggtgaatttgataatgctggtgcaatgatgagtgtcgatgaaactttgatgtgctcattccaaattctgaaacctgctgagagaaaaaacaaatttatggggtccaacaaaatgtgatagtgaaagccattttgcttccagcagctctagcctgttaaggttctcctgtggatgcatcgagacaacagcatgctggcgccaagtttgagggcagcattgggctactatcagagaaaccaaataatcccatacctaactgttcatctggaagttactcatcatgacaagtgcctgaaatttttcctctttcctgttaccttgtgtcagaacattatgtagctgtagatatattgattatggaaggatgaagttgccaaattgacctgaggagattcctttctccagccaggaaaaattctgaacatcaaggagtttctgtttgcaagtttcactatttaaaagc

SEQ ID NO: 35538 - DNA, 725 bp, Zea mays
  Clone ID: UC-ZMROB73052E09_FLI
ggtcgacttcgacatgcccgccggccgcctcgacggccgcgcctccaacgcctcgcgcacgctcgacttcctcccgccgccgacctccagcctccccgagctcgtccagagcttcgccgccaagggcctctccgccgaggacatggtcgcgctctcgggcgcgcacaccgtcggccggtcccactgctcgtccttcgtctccgaccgcctcgcagtgccctccgacatcatcgcctccttcgccgcgtccctgagaggccagtgccccgcgagccccagctccagcgacgaccctaccgtcgtgcaggacgtcgtgacgccggacaggctagacaaccagtattacaagaacgtgctggcgcacagagtcctcttccacgtcggacgccacactcctcacgtcgccggcgacggcgaagctggtggatgacaacgccaacgtccccgggtggtgggaggacagcttcaaggtggccatggtgaagatggccagtgtcgaggtgaagaccggcaatagcggcgagatcaggaggaactgccgtctcgtcaactagctgttctgatgatatacatcagcagcaaccataataattcctgttcataattccatcttgttgcattgcattgttttgtttcattataaatatatgtcgacttcattttgtacatggttgcaaatttggtattggatgatcgataattaataataaagccatatccgctct

SEQ ID NO: 35539 - DNA, 1811 bp, Zea mays
  Clone ID: UC-ZMROB73052G05_FLI
gtgacagaatgacttctctggatctgcaggtgctggctcccaacatggagacatataccacagacgacgcgcttaccattatggggtttggaaaattccaagcgcttgttcttttctacgctggaatgggctgggttgcagaagctatggagctcatgctcttgtcgtttctcgggccattcatacgagaggagtggaacgtctccccagagaacgagagcctcctttcgagtgttgtctttgctggcatgctgctaggtgcctgtgcttggggctttgtttccgacaaatatggacggagcggtattggtagtggtttgctcatggcatccggctggactagatttgcttcgtcagcaaactaactagccatgtcagcaatctacctcatacaatgattcacaaggattacagggactggtttaatattttcaactctatttactagtggaatgggttttctaagcgctttatctcctaactacttatgcttggtggctcttcggtttctggttggagtaggagtgggtggcagccatgtgtttatatcttggtttttggagtttgttcctgcacaaaatcgtggcacttggatggttattttctcccttttctggactctcggcacgatcttggaagcttcacttgcatgggtcgtattgccagcattgaattggaggtggctgctagtcttcaccgcccttccatgcttcctcttgcttcctttctttggactaacacctgagtctccgcgctacctttgtgcacaaaatagaatgtctgatgccacatctgttctagagagaatggccaacgcaaaccaatcagctcttcccccgggagttctcacgtacaatagacaaacaaaatgtgaccacgacgttctcgctcccgagagtgaatgtcttcttcctgtcagagagaaggaatgcacagttgacaatgccaagagctccgaatctggcagtcttgctgcactgcgcatgctattatcgcgcgaactgctcagatcaactctgcttctttggtttgttttctatgcaaattcctttgcttattacgggttagtattgctgacatcgcagttgagtgatgcaaataaaagttgtgcatctggtgtgtcttttggtctgcgccaaaaggaaatcaatctttacaaagacactttcatcactagtttagcagaaatcccaggtttatttttgtctgctgttcttgttgattggtttggtcgaaaagcttcgatgtggtctatgatgttcgcatgctgtgctttccttggaccacttgtacttcaacagactgagttgttgacaactattcttctatttggtgcccgtgcatgtgccatggggagctttacagtcttgtgcctttatgctccagaggtgtatccaacatttgtccggtcaaccggtgcaggaattgcgacccccattggtaggattggtggggttgtttgccctctcgttgctgtcgccatgctgcggagctgccatcagatggaagcactcattgtgtttgaggtgatattatgccttgctgcagttgcctgcatgttcttccctgtagagaccaagggccgtggaatggactgatgcaatatcaggcttcagcatctagatgagcttgtagttcatcactgtttgttttatgccatcattatgtacagagaatatacatgtaacatggtgtggatagttcctcaaaatatgtgcaggactttccaaatttgtaagacagattttgtactgaaagacagctggttctgtactgccaaaacactgaaagacagagttgtattactcctc

SEQ ID NO: 35540 - DNA, 830 bp, Zea mays
  Clone ID: UC-ZMROB73053B03_FLI
gctccggttcctgacggaggaggcgggcgtcccggaggcggagctccagcgcgtgctccggcggcgcccgcgcctgctcgtgtgccccgtggcggcgcggctgcggcccacgctctacttcctgcgcgcgctcggcgtgcccgacctgcaccgccgcgccgacctgctgtccttctccgtggaggacaagctgctgccgcggatcgagttcctcgagtcgctaggcctgcccgcgcgcgccgctcgctccatggcgcgccgcttccccgcgctcttcggctacggcgtggacgggaacatgcggcccaaggcggagtacctcctgggcgtgggcgccatgggccgccgcgccgacgagctgtacgagttccccgagtacttctcctacgcgctggccgcgcgcatcgtgccgcgccacgaggcgtgcgccgcgagcggggtcgcgatgccgctgcccgccatgctccgccccggggaggccaagtttcgcgccacgctcgatagctgcgtcgggtccacgctgccccggaggcggtcggcgctgtggcacgccacgtgggtggacgacgacgcgacggcggcgaaggagacgatggtgtgacgtgcgcattatattggtaggctggtagcgtatatgcgtatgtccatatggcattggctgcttgtaagtatgagagccatgatgaatctggttgcgtgcttcttccatcaggtgaacggaggcattaattcttgcttggctatacttggttgtgcttatatagccatgcaggtgattgttaccctgatcgtgtgaatatacactcctcccagaggcttgggcgtcagtc

SEQ ID NO: 35541 - DNA, 1497 bp, Zea mays
  Clone ID: UC-ZMROB73053B12_FLI
tccccatcggagctactgacctggggaagcgttcgtcgtcggagcatgctgatgaaaacaggagtggcgctgcaattggggaggaattgtcgcagggtgagcgggagtccttagtggagcagaatggtcagggtggcgacgtgaattcaagccaaacgtctgcagcttcaggaaagatggatgacaacgagccggatccagcttcttccagtgataccacaacgattccggacgaggatacatctaatgaatctcaaaaggctgagcaagataattgtgatctatatcgtggagagtgggttactgattcttctgggccactatacacaaacaactcctgccctatcatcacacagatgcagaattgccagggaaatgggcgaccggacaaggactatgaaaattggagatggaagccagaacagtgtaacctcccacgcttcgatgcaaggaagttcttggagttgatgagaggcaagacacttgcgttcgttggggattcagttgctcggaatcagatggagtccctcctttgcattctgtggcaagtagatgtcccacaaaaccgaggcaacaaaaggatgcacaagtggctcttcaaatcaactaaaacaactatcgcccgcgtctggtcttcttggttagtgcacaggtcaactgaagctgtggggattgctcctaagggtattgataaagtttttctggatattcctgatgagaccttcatggagttcctcccaaggtttgatgtactcgtcctttcctctggccactggtttgctaaacgatcagcctatatcctgaacgagaatgttgttggagggcagctttggtggcctcgtaaagcaggaaaaatgcaggtcaacaatgtggatgcctttggtatctctgtcgagacttgcctaactgctgtggtgaataacccaaattttacaggcctagcaattgtgcgcacatggtcacctgatcattatgaaggcggagcatggaacaccggtggatcatgcaccggaaaggtcaagcccttgaatgaagtggtgaggaacggatttaccgatgcgatgcatgaaaagcaggttgcaggcttcaggaaggcagtgaagaatgcaggggaacacggttctaggttgaaattgatggatatcactgaaccctttgccttcagggctgacggtcatcctggcccgtacagaagtcctgacccaaacaagaagacacagagagggccagatggaaaacctccacctcaggattgtttgcactggtgcatgccaggaccagtagacacatggaatgagatgttgctagaaaccattcgaagagagttcgagacagatagaacctgaggatagaaagtgctggctacttcgccatcatgtattcatgttatacattctgcgctgcgaactccatagggatgtatcgctgcacttagtagcatgttgtgtttaccatagataggaaggaacaaagcttcggatacgtaagattcactgt

SEQ ID NO: 35542 - DNA, 1778 bp, Zea mays
  Clone ID: UC-ZMROB73053D02_FLI
catcgatcgggcttccatggccgccaagcgccgcgcccggcagccaagaaccgaagattccaaggagttgggcctcaatgggggcaacgaaggttccgacgaggaggaggaggagagcagcaagtccgacgcgctgaagcgagccgagcaaccctcgccgccgtcgccggaggatgctgaggccgagagatccggcgaggcctctccgcagaggagcaagccgcgcggttgggttgctatgaagaccaagacgacgacctccaagcgggtcaagaaaccctctccggcgtcggagaaggaatatgaggcgggggactcgggtgatttgtcaccggcgagcgacccgctacccgacaacatcgttgacgccggcgacaacaagatgcccgcgacgctgaagccgggcaagaagagctccccgacgccgcagcaggaggaagagcgcccggagaagcgtgctgcgggatctgatggcgagaccgtggccacgtcgtccccgcagcgcaagaagaaaagtaagaggtccgtcgataaggacaggcgcaaaaagaacaggaatcagattagaaaggcgttgacccaagaagacgaggaccatgacacggtgatggcagagcaagagcagagcaacacctcactgccacaggacgagcacgccgcccgtgaagaggagcaagaggagaagatggcacagcaagagcatgccggtgacacttcacacccgcatgacaaggacatgcgcagcgcccatggagaggagcagcaggatgcaaatcaagagcatgcggatgacacctcacccgcagaagacaatcacagtgtggatgaagaggagcagcaagtggagccgatcccacagcaagagcaacctaatgacacctcacccccacaagagaagaaccgagcccaggaggatgaggagacaggagctcaagtgaatggcaaagccttggaggggaggaatgctccatcaaccaagttgcgcagttttgagtcagagaaaaagccagcggtcgagcgatcatggtcctacgatgacgagctcaagatcctcaatgccttggttgagcacgcccagtcccataacggttctttgccagactcgtcgcatgttttggccaatctcacctttgacaaaattgatgccaatgaggacaagctcactgacaagatccgcaagcttaggacacggtaccgcaggtggcttttacaaggctacacatcttctgtttctggtagtcagttgtttaagctgtctgaaattctctggggccaagctgatgaagatgaacaggttgagccaacatctagggacttcagtgtagtatcaaaactgtatcctcacctggccaaagaagtcaaagcatatgccgaaacgcacagctcgggtgacttaatcatgggaatggtcatgaccatatgtgataagaaggcccgcgatcttgacgctaagtgcaagaagcaacagattgaaacattcaagctggagttgggccaagcaaacctaaccaacgaattgctctctgcactttcaagtcagacccatgtgaaattctagtaaaggtctctgctatcttttgttttagtgtaatgagtagacgtgctgtcattaggttaatgtgggaccaagaaccttcttttggggtactggaaaactcttatctgttaactagttagttgcttagctttgatgtctgtttctgcatatggaagtagctgttacagctcgatggtggaaaacagtactttaacatttaagtatcatgagcttagtgatc

SEQ ID NO: 35543 - DNA, 1537 bp, Zea mays
  Clone ID: UC-ZMROB73053D06_FLI
cgacaaaccccgcaaaaccaccgcaccgctccgcccgcccacgcggccgcaccggtgggcgatgccctccgtagccggtcatttcaccgcgggcgcggcccatgcccgcggcccaccaccgcaccgcctcgcctcctgctccttatatgaccggttccccacctccgcctccgttccccatctccaccaccaccaccaccaccaaaccctagccgcctcccttcgccgccgcagctgatcggccatgtcttcctcgacctccgatgcggccagggacgacgtcgtctcatctcccgacctgccccccctgtccgcgcacgtcgccgcggcggctgctgcggccgcggcagcggcctcctcggggggaggaatagggctcgggggcgggggctccggccggaggctgccgccgccgtgctggacgcacgaggagaccctcgcgctcatcgaggcgtaccgcgacaggtgggaggcgctgaggaagggcaacctgcgcgcggctgactgggacgacgtggccaacgccgtcaccgctcgctgcggtcggttccccaccgccacgcataagtccggcgtgcagtgccgccacaagatcgagaagcttcgaaagcgataccgcgctgagcggtcgcgatccgcggggcggtccaaggggcccaagtggccgttcttcccgctcctccacgacctcgccggcggcggcgtgccggaccctagccctaacgccatcgtcaagatcaagaccaagggccctgccccgccggcatccccgccttcccctgtgtcctccccttcctcctccgaggaggctgtgcggagcaggagcctgcacgggctcatctccaacggcggggccgggagcgggctgcgcttcaccatccctaaggcctgccgcacgaagcccgccgcggcggcagctgtgaagccggagaggagcggcggcgaggacgacgccgagtcagaggcgatggccgaggtggctgccgcactgcggtccgtcggggaggggttccttcgtatggaggagcgcaggctcgagctgtcgcttcagatggagaaggaacgaatggagtcagagatgaagcgcacccagacgatgctcgacgcccaacagctcttcctcgaggccttcctgggtaagcagcagcagcagcagcagcacaagaaggccagggtctccccttcctctgccgcaatggaagaggactgatcaatccatgtagcccggttgctctagttctgctctgtcaaccttgtgtgcatccttcctcgctctgcgttgactgctgttcatgctagtattgttaactttgtgtcagtagcaatataatcttactattgtgtatggatggtgatgtaggtgtagggatatggatatggataaggggggaagggcgaggtttgaattagaaattaggtggtctcagttttaatcagtgaacgacttgtgttatgagcttatgatgagctgctgctgttacgttgaaacacttcagcttgttcaaatggcatctactcgttgtcaattttattgttg

SEQ ID NO: 35544 - DNA, 1786 bp, Zea mays
  Clone ID: UC-ZMROB73053G10_FLI
gcggtcgtcggcgggcggcgccgcgggggcagacggggctatgtccgacggcggcggcgcggggccgcgggcgcccgcctcctccaccttctggttcctgctccacgcgctctgctgcctcatctcgctcttcctcggcttccgcttctcgcgtctcctcttcttcctgctcttctccaccaccgcgctctaccgctccagcacctcctcctcctcggccgcggtccttcgcgccaccaccacgacaaccaccaccacgaccaccacgacgacgacgaccaacaccttcacgctctccttcgccgccgccaacactcccccttccacccccgctaaccgcaccgcgctggatgtggccgacaagggggcggcgtccgggaacccacagagtcacgtcgtggtggggaggcacgggattcggatccggccgtggccgcacccggaccccgtcgaggtgatgcgggcgcaccggatcatggagcgcgtgcaggaggaacagcgccgctggtacggcgtcaaggagccgaggcaggtgctcgccgtcaccccgacctactcacgcgcgttccaggcgctccacctcaccggcctcctccactcactccgcaacgtgccgtacccgctcacctggatcgtcgtcgaggcaggcggcaccaccaacgccacggcgtcaatgcttgcgcgctctggcctcactttcgttcacatccccttccctgaccgcatgccccacgactgggccgaccgccacgccactgagaaccggatgcgcctccacgccctacggtttccttgcgcagcgtgatccgcgagaggaagatggatggcgtagttgttttcaccgacgacagcaatgttcatagcatggagctgttcgatgaggtgcagaaggtccagtggatgggtgctgtatccgtcggaatccttgcgcatactggcacggcagaccaactacggctcagcgaggaggacaagcagaatatgcctcttccagtccagggccctgcttgcaactcctcagggcatctgattggatggcacacgttcaactcattgcccttctctgggaagacggccacagttgttggtgaagcagcccctgttctgcccaggggtttggagtgggctggttttgtgttgaactcaaggatgctgtggaaggaggctgacggcaagcctgactgggtgaaggatcttgatgctgtgggcgagaatggcgaggagattgagaacccacttactctgttgaatgatccgtcctctgttgagccactgggcaactgtgggaagaaggtcctactgtggtggcttcgtgttgaagcacgggctgatagcaagtttcctgaagggtgggtaattgagccacctttggaagtcgttgtccctgcaaagcgcactccatggcctgaaacaaccaccgagctgccagccgagttattggatgacaagcaagagcaggaggataggcgcttgtcaagagccaacaaatcatctcggccccgaggcaccacgaagcggaagggcgaccctcaaggacaagataactgatgcagaacgtactggccttgtgatgtatatcttacaccctgcaaaaacacagtagcaagcatatcctgttaatctggcggtgtctgtttaatttttcttttcttttctgatgtttttgctcctgtggcgatggtccacgcttgggtatgttatctgtagagggcacatttttaaagtagtggttgtatcttttgtgttgaaatgtacaatgcattgggagctaaaaaaatggtggatg

SEQ ID NO: 35545 - DNA, 970 bp, Zea mays
  Clone ID: UC-ZMROB73054A08_FLI
gatcgatgtcagcaacaacaggctgtccgggcccttcccgtcgcagctcctctgcctccccagtgtccagtacgtcgacatcaggtgagcgcgcgtctgcagaccgcatcagatttaattacttcaaccagcgaaacaagtagtactgcaacttacttgattacgtgatgcacgtgtgcttcaaggtttaacaacttctgcggcgaggtgccggcggccatcttcgacaagaagatcgacgcgcttttcatcaacaacaaccacttcgagttcacgctgccggccagcttcaccaactcgacggcgtcggtgatcgtgctggcgaaccttccgcgggtgagcggctgcctgccgagcagcatcggcgacatggccggcacgctcaacgagctcatcctcctcaacagcggcatctcctcctgcatcccgccggagatcggcaagctggacaagctcaccgtgctcgacctcagcttcaacagcatcgccggcgcgctgccggacacgatcggcggcatgcgggcgctggagcagctggacgtcgcgcacaaccggctcaccggcgagatccccgagagcatctgcgagctgccgcacctcaagaacttcacctactcgtacaacttcttctgcggcgagccacgccggtgcctcgaggtgccgcgcgtcgacgaccggcagaactgcatcgctggccgccccgaccagcggccaggcgaggagtgcgtctcattcctacaccaaccgcaagtccactgcgacgcccacgggtgcatcgcgccaccacctccagcggtgcatgctcctccgccgcctgtatactgaattactgatcagtggtaacttgtaaatgtttcctgctcctgcctcgtggtgtgaaaacttggagggtaaacgcatacacatggtatatactgtaatttttattcatcagcagaagagagtaataatggattcatagatttacatt

SEQ ID NO: 35546 - DNA, 1451 bp, Zea mays
  Clone ID: UC-ZMROB73055B11_FLI
tcgctcgctgccgggcggacgaccccgcggtgagcatgctgctgccgggactcccggtcgccggcctcgccgtggggttctacaacgagaagtgcccgcaggcggaggacctggtgctcgccgagatgcggaccctcgtcgacaaagacgagaccatcggcccggcgctgctgcgcttcatgttccacgactgcctcgtccgggtgcgtacgttgccgcagccggccttctcatcgtctgcctactgcttgatacgagcttcctggatgtctttttttttttgttgttgttgttgcctcgcgcgcgtgcgcagggctgcgacgcgtcgatcatgctcgtctcgcggaacgggactgcggagagggacgccttcccgagctacggcctccggggctacgccgagatcgagcacatcaaggccaagctggaggacgcgtgcccgctgaccgtgtcgtgcgcggacatcatcgtcatggcggcccgggacgccgtgtacctgagcaacgggccgcggtacgccgtggagaccggccgccgcgacggcaaggtgtcggcggagtacgacgccgacaacgacctcccgccgccctcctccaaaatcgtcgacctcaagacctacttcagcttcaaggggttgggctggaaggacctcgtcgtgctgtcaggaagccacacgatcgggagggcgcagtgcaccacgttcgcgtcggaccggctgtacaactacagcggccacgtggggcaggacccgtcgctgaacaaggcgtacgcggcgcagctgcgggagatgtgcgagccggggctcgccgacgacaccaccatggtggagatggacccgcgcagcccctacaccttcgacctcagctactaccgcaacgtgcgcgccaaccggggcctcttcacctcggaccaggccctcctcgacgacccgtggaccagcgcgtacgtcgagcgcatggccgacgcggcgtcgcccgacgaattcttcgccgactacgcggccgccatcaccaacatgggccgcatcgaggtgctcacgggtgacaacggcgagatcaggagcgcctgcgctgcgtacgttgactagaaattactaaccgatcgaggtcgaggaataggatagccagcgagtggttggcttggctgctgccctgctctgggcggcggtgccgttgttgacctggtcttgtcgtgcgagcgagtgcaattggtggatggatcgtcagccgtcgcgtcatgtggccacgacaacgtgggagccaaccaggatgcagtagttgcggtattctcttctctccgccgtttgggctggggtccatctgttttgttctttacgttgcgcctccattgtttgctgaggtgtgtgtgaagagacggacggtatggttgctcattcagacattcacacgacaaccacacaatggcaggaaatttttttgtcaaattatatt

SEQ ID NO: 35547 - DNA, 1013 bp, Zea mays
  Clone ID: UC-ZMROB73055C03_FLI
gttgagcggagtaggcggcggccagcaatgaaggtacagtgcgacgtgtgcacggccgaggcggcctccgtcttctgctgcgccgacgaggccgcgctgtgcgacgcatgcgaccgccgtgtccaccgcgccaacaagctcgcggggaagcaccgccgcttctccctcctgcacccgtgttcttcctcttcctcctccgccgcgcacaagccgccgctctgcgacatctgccaggagcggaggggcttcttgttctgcaaggaggacagggcgatcctgtgccgggagtgcgacgcgccggtgcacagcgccagcgacatgacgaggcggcacagccggttcctgctcaccggcgtgcgcctctcgtcagcgccggtggactctgcgggcccatccgaagaggaggagcaggagaacagccgcggcccctgcaacgacgaatcctgcagcagcggcagcggcgccggcggcgcgaccacggcgaccgccagcgacgggagcagcatctccgagtacctgaccaagacgctgcccgggtggcacgtcgaggacttcctcattgacgacgcgtccgctggcgacgtcggcgcctgctcggatggcctctatcagggacaaaatggacagatcagtggggtgctgcaagaagcttacctgccgtggacggagcgggagcaggtgcaaactgacgtcgcagacgagcgggccagctgggagcggtgggtgccacagatgcatgcggagttcggcggcggcggcaagcgacctagagcgtcgccttcgcctccctgttcgtactggtgattggtgaaaagttcgccgtcttcagcaagatgatttgtattgggctaattagtagagctactgtaggaacgaccgaaaaatgagccaaaaaagtaacggcctccatcgagctcgttttaaattattctctgcctaaagccaaactttcagaaaggagaacggtattttcctgttcgattaattaggtcgatttcgatcgaactcgttcc

SEQ ID NO: 35548 - DNA, 1160 bp, Zea mays
  Clone ID: UC-ZMROB73055D02_FLI
gcactggatcatcactttaggtggctcctccaatataggattagtccatttttctgcagatggggtgatagcatgcgcattctagcatacacatgcccttggcctgccgatcatccgaaggctaatgaatattactctgacccaagattagcagcatatgctgtaccctatgcacctatcctatcgtgtacggatgctgcaaaaaattccctgaggagagaggttgaaatcttaaaatcgaagcctcattggtccaaagcttacttctatttgtgggatgagccattaaatgtggaacagtatgacatgatatgcaacatctctaatgagctacggtcatatgcacctgatgtgcgaattttgacaacttactattgtggtccaagtggctctgaactggctccctctacatttgaagcttttgcaaaagttccaaatgttctgcgtccgcacacgcaaatcttttgcacaagtgaatgggttcttggcacaagagaagacctagtgaaggatattgttgctgaattacggcctgatcttggtgaggagtggtggacatatgtttgtatgggtccttctgatcctcaaccaaactggcaccttgggatgcgtggaacccagcaccgggcagtgatgtggcgagtgtggaaggaaggtgggacaggatttctttattggggttccaactgctatgagaaggctatgatcccaagtgctgagatctgtttccgacgcggccttcctcctggcgacggtgtcctgttttaccctggtgaagtgttttcttcgtcacatgaaccagttgcttccacccggctagagcgcattctcagtggcatgcaggacatcgaatacctgaagctttattcttcacggtatgggagggaggaaggcctggcccttatagagaagactggcatgtaccttggaccggatcgatatacgctggatcatggaccggtagatgtgatgaggggtgaggtgtaccgcacctgcaggtcttagtgtagcaatgcctgccagatgctgtccttccagtctagggcgtctgttgtattatatatggtggtatgtgatctatgtagcgaattaatctacccttggtgatcgatcagatcatcaaacctggactaaactagtcctggtgcatcttttgaatc

SEQ ID NO: 35549 - DNA, 1563 bp, Zea mays
  Clone ID: UC-ZMROB73055D05_FLI
gcctgcacagcattgaccgccgccttcgctcctccacctccccgctcgctctcctgcctccgcgcgggccgcggatcccttcactcgccacagcaagcgctagaagagggaatggagcccggcctcgcatcccgcgtcgcccgttcagccgctcagccgctttccggctgcctgtcgcggcactcgctctcgccgtggctcaagatccagaaccacatttatcctatgccaagtctctgtcacaaggttcctagcacgggaaaatgccacgcttctatgacaacaagttacatggaaacatcagatgtcactgatttggactgggaaaaccttggctttggcctcatcgagactgactttatgtatgttgcaaaatgtggaactgatggaatcttttccaaaggtgaagtcctaccatttggtcctatagcactgagtccttcagctggagtcttaaattatgggcagggattgtttgaaggcctaaaagcatataggaaaactgatgggtccatccttctatttcgtccagaggagaatgctataaggatgctaagcggtgcagagaggatgtgtatgcctgctccaactgttgagcaattcgttgatgctgttaaacaaactgttttggcaaataaaagatgggtgcctcctactggtaaaggttccctatatatcaggccactcctaataggaagcggtgcagttcttggtcttgcgcctgctcctgagtatagctttatcatttttgtatcccctgttgggaattatttcaaggaaggtttatctcctattaatttgatcgttgaggataaatttcaccgtgccagccctggtggaactggaggtgtgaaaaccattggaaactatgcctcggtactgaaagcacaaaagattgcaaaggggaaaggatattctgatgtcctttatttggatgctgttcatgacaaatatctcgaagaagtctcttcctgcaatatttttgttgtgaaagacaatgttatttctacgcctgccattaaaggaacaatacttcctggtataacgaggaaaagtatcattgaagttgctcagagcaaaggtttcaaggttgaggagcgtctggtgtgtgtagatgagttgattaacgctgatgaagttttctgcacggggactgctgttgtggtgtcacctgtggggagtgttacatatatggggaaaagggtggaatatggcaaccaaggagtcggtgtcgtgtctcagcaactatacaagtcacttacaagcctccagatgggcaatgtggaggactggatgggttggaccatgcaacttaatcagtagcggatcacagatattgccttggcagatcccagattattacagctactgggtgcgatagggttttttttggcagatccatcttgagcatatttgactgtacctgtttcccttgagactaagacgaaagtgatcttactgatcttttgtttcaaatctgtaacgataaaataaaatgtggtttgcaccttgccatgtactgtaagaatggacccaaaaaaaaattcatgctgctgatgcttg

SEQ ID NO: 35550 - DNA, 1822 bp, Zea mays
  Clone ID: UC-ZMROB73055D09_FLI
ccctggtacatcccagcgggggaggctcgctccgggtcggctggcccggaattgggcccggacgggaggggcggcggcggggcgccccggttggggctagggttttcgcgcgctactcccaggcccaggacttctccacacgcctccaagatagagctggtgagctgcctaagttagtcgaggaccttatccagacatcgattagcacagggcctcgaggtgctttcaggatggcccaagggatccaagctgtgcttggggttggtggggagtggctgaatgacctctcaaagacagccaacacatcagcaggaattccatctcagatgcagcttggtttgctttctccactttaccttcgaaggctttttgagcgcatgggtgccacttatatcaagttaggccagtttgtagcatctgcgccaactttgtttcctgcagaatatgttgaggaattccagaaatgctttgaccaagcaccagctgtcccatatgacgtgattgaatcaatattacgtgaggagctgcagcggccattagatagtgtgtatgaatacattgatccggtgccaatagcctctgcctcaatagcacaggttcatggggctaggttgaagagctctcagaaagatgtggtgattaaagttctaaagcctggtattgaagatactttggttgctgatctgaattttatctatgttgttgcacgtgttttagagttcttgaaccctgaactacaaaggacatcactggtaggcattgtaaaggatataaaggaatcaatgcttgaggaagttgactttagaaaagaggctgcaaatattcaggcatttcagggatacattgatgcaatggggtttgacaggcaggcaaaagccccatttgtgtatcagcactgtagtacaaaacgtgtattgactatggaaagattgtatggagttccgcttactgatcttgattctataagatctcttgttcctgatcctgagttgactttagtcactgcccttaatgtctggtttggaagcttaatttcatgtgaatccttccatgctgatgtacatgctggaaacctatggttgctccgtgatgggcgaattggttttattgattttgggattgttggtcgaatatctccaagaacttgggcagctatggaggtctttttggcttcttttgcaactgaggattatgatgctatggcctctgccctctctgaaatgggtgctacagggaatgatataaatactaatgaatttgcaaaggacctgcgaaagatattctcatcgatacaggacctggatactgaaatcatagtggcaacagcaaggacccctgatgctacagcagtatctgctaatgttgtccttgatgagaggcagatgaatgctctttttcttgatctggtcagggtgagcgagtcttacgggctgaaatttcctcgggagtttgctcttctcatgaagcagctgctgtattttgatcgctacacaagactgctggctcccagcatgaacatgctgcgagacgagaggatcaacatctccaccaatcgacaaccaagaagaactgatagatttcagtgaagccacgtcgttagtcaccggccacgtactagaggagtcgtgatgggcgataatagcaagctcatgtgacccaatactgtatatagttttgccagaccagcatagaaatgaaccacacgctagaaattgtacactccgtcgtattctgggattgagcgttatatcgtactagtaggtaacatgtaaaggctgtatcccacgaccaaagtaaatttcagatgaactgcttttgtctc

SEQ ID NO: 35551 - DNA, 1243 bp, Zea mays
  Clone ID: UC-ZMROB73055D11_FLI
attactgaagcatgagcgcggagctgaagagggactacgagatcggcgaggagatcgggcgcggccgcttcggggtggtccaccgctgcacgtcccgcgccaccggggaggcctacgccgtcaagtccgtggaccggtcgcggctgggcgacgacctggaccgcgagctcgcgcagctggagccgaagctggcacagctcgccggcgcgggcaacccgggcgtggtgcaggtgcacgcggcgtacgaggacgaggcgtggacgcacgtggtcatggacctgtgcccgggcccggacctgctggagtgggtgggccgccgccgcggcgcgcccgtgccggagcccgtggccgccgccatcgtcgcgcaggtcgcgcaggcgctcgcgctctgccaccgccgcggcgtcgcccaccgcgacgtgaagcccgagaacatcctcatcgacgccgccgccgggagcgacgacgacgaggaggacgaggccgaggcggcgccgcgcgcgcgcctggcggacttcgggtcggcggcgtgggtgggcgccggtgggctcgggcgcgccgagggccttgtggggacgccccactacgtggcgcccgaggtggtggccggcggcgagtacggcgccaaggcggacgtgtggagcgccggcgtggtgatgtacgcgctgctctccggcggcgcgctccccttcggcggcgacagcgccgcggaggtgctggcggccgtgctgcgcggcagcgcgcgcttcccgcccaggctcttcggcggggtgtcgcccgccgccaaggacctgatgcggcgcatgatctgccgcgacgagtggaggaggttcaccgccgagcaagtcctcgctcacccgtggatcgtgagtggcggaggagcccgggcaatggagcggccaacctgaggaggaatccagacggacgtgtattgccgtagagcactcaggcacggcaaggaatcccggacgttatgtatgaggtttttgtacgtacgtacgtagtagtgtacggtagctgctgccagctgcagagcagatcgatcggcaaaagaagctttataggcttgtggttttcctttgcccccgggtttttggggacgctctttacctagcggagcagagagcacccgttttccgatgtgctggttttcctagctggatgtacatacactgaccgtcttttgtacagatggagtgtggtgttggatacataaataaaaaaaaaccaagcctttgtactc

SEQ ID NO: 35552 - DNA, 1939 bp, Zea mays
  Clone ID: UC-ZMROB73055E04_FLI
cccattttccccaaaacaaaacgactcgttctttcccgggggaggggaggactggagaagcctggccagccatggacccgcccaaccctaaccccaacgatgccccgtcgctcccagccgaatccgcggccagactcgccgccctctccctttgtggcaccagggaccttcccccggacttccacaccgccgagatcctcgacgacgacgagggctacctcacctccgcgtccagaggcgggagcagcacctccgcgtggaaggaggcgcccgagggactccacgacgatgacaaggatggggacgatgtctcccagcccagccccagaagcagcggatacgctggcgagcgcggaagcagccttgatgacgacgccgaccccgaccccgaccccgaccaggattgggcgcgcggcaagaagcatccccacgaggacgatgcttcctcttcgtggaggaagaggaaaaaacatttcttcattctgagcaattctggcaagccaatatattccaggtatggggatgagcacaagctagccggattttctgctacgctgcaagcaatcatttcctttgtcgagaacagtggcgaccatatcaaatttgtgagagctggcaaacatcagatagttttccttgtgaaggggccaatatatttagtttgtataagctgcacagaagagtcatatgaaggactgagggggcaactagagctcatgtatggtcagttgttgcttattttgacaaagtcagtcaataagtgctttgagaagaaccccagattcgatatggcaacattgcttggtggcactgatgcagttttcctatctcttatacatgcattcagctggaatccggctacttttcttcatgcctacacatgtcttcctcttgctcaatcaacaaggcaggcagctagtgcagttttgcaggacatcgctgattcaggggttctatttgcgttattgatgtgtgagcacaaggttattagtcttgttggagcacaaaaggcaactttgcatcctgatgatattttattacttgcgaatttcattctgtcctctggatcttttagaacttcagagtcttttgtacccatatgtttgccaagatacaatcctatggcctacttgcatgcttatgttcatttttttgacgaacatacatatgtgactttgcttactacacgatcagatgctttttatgatctcaaagattccagggcccacattcaaaatgctcttttaaagtcaaatgtcctcatcgaagtccaaagatctttacatgagaatgcattgcgtgttgaggatctcccaaccaacccgtcttctcaatctgcatcacaccctccagagtcctctcaagacattagttcacaatctttgtcttctgaaatggcaattggaggaccaggtggactatggcattttatatataaaagcatttaccttgaccagtttgtgtcatcagaatttccctcacccataagtaacaaaaagcagaagaagggattgtacaaagcttaccaaaaattgtatgcatccatgcatgataaagcaactggtccacacaaaactcaattcagaagagatgaggattatgttctattttgctggataacccaggatttcgaactatatgcagcctttaatccactggctgataagactcaagcaatcaagatgtgcaatagagtatgccaatgggtgagggatttagaaaatgagatattcgtgtatggagaaagcaccctttcctggtgatatgttgtcctgtgtgtaataacttgttatgcctatgttacattttttttgttgaaagttttttttgatgttacttgtaccgacacaggcagtaccatcgttgttggggaggtgtatgagggggctaagtttgtcgcacttttgacattttctcaggaatggtgctcctttttttt

SEQ ID NO: 35553 - DNA, 1990 bp, Zea mays
  Clone ID: UC-ZMROB73055E05_FLI
ctcgcattgagaaattttttttgcttctgtcgagctgagcatccggtactgcttcaaggttgctatttatgcggagtttagaagggattggccagaagcattgaagttctatgaggaaggtgttcgtgttttgcgtgagatgattggaacttcgacaaggttgcctccaacccaacgcctagttgagataaaagcagttgccgagcaatttcactttaagatatcgaccttgctacttcatgctgggaaagcggtagaagcaatcacatggttccgtaagcatatcagaagctatgcacgggttcttggaacaccagaagttgcttttcttcactgggaatggtttagccggcagttcctcgtctttggtgagttgatagaaacaacatctacaactattccagatacattatctcctagatttggcactgcagactatggattgactgagtgggaatttcagccagcatactactatcagttagcggcaacttacttgagagagaagaggtatgccatcgaatgttcatcatcaatggctaatcttacaacagaagttaatggagtacctgagtcagtaatgccttctgtatatgttggccaatatgtgcgcttgtttgagcaaggagatacagttagtatactacccctttctgatactgaatacaccagctatgctttgtcagaagctgaaagatttcaagattcttatgagataatagcactgttcagaaaagcttatgaatcatttcagagcctaggtgctacaagaatcgcttctgtctgtagcggtggaatggccatggaatattatgcagctggggattttagcaatgcaaaacagctttttgataatgttgctggtctgtaccgcaaagagggttggaccactttgctctgggagaacctaggatacttgagagagtgctcaatgaaacttaattccccaaaggattttatcagttattccctagagatggctgcattaccattattttctcgtagtgaagaggaaaatcgagaaaacaaaattaagagtgggcctgcaggttcccctaccatttccaggagagagaatatacagcaggaagttattaatgttttggaaagaaatcagtcatcagagggaaccgatgatggatttaataatgcgatggaagaagttactcaccttgatattgatcagataagttcgctaagaatgttgtggttgatcagttggaggttcaattcaatcaatctgactgtaactttgtgatacatagtagacaggaagattctcctcctttctattcaaatttgcatgaccaagttgttcaagatacttctcttacactcttcaccaatagatggatgcggttgacacatgaagcaaaatcaggacagagtggaaaactagaatgtttgtctgtgaaggcgacaataaaaaaaatgccttgtgatttgctgccacgctgaaagccctgcttccatggaagacttcccattatggaaatttgagaaccaagtggagacattgcccacaagggaccctctgctcttgccttttctggacagaaacttattcaagttgaagagccagatgctcaagttgaccttgtcttaaattctgctggcccagctttagttggagaattatttactgtaccggtgagcatagagtcaaaagagcatgcagtccattctggtgagctgaaaattaacctcgttgatgccagaggtggtggtatgttgttgagtccaagggaagcggaagattctgaaagtcaccatgttgaacttcttggtgtctcaactgtgtccgaggacaaagagtcgaaggaagaggccgatagcataagaaatatccagtattcatttggggttatatctgttcccacattgggtgtgggtgattcctggtcgtgcaaactagaaatcaaacggcatcgagcaaaatcagtcatgctttatgtttcacttatagtgtgtttggtttgaggaattcccc

SEQ ID NO: 35554 - DNA, 1918 bp, Zea mays
  Clone ID: UC-ZMROB73055E10_FLI
gttactgcaaacgtcgcagcactatcaaggacaacaaataagcccttcagacatcctacagtctcaggggacaaactgcgtatcttgcggattgacaagagagaaagagcatagcaactaggattaggaagctgggatcatatcatcaatggagatggcaggcgccgcaggaacggaagcatggttgccgtacgtgaccacggtggcgtcctgcgccgtcggcgtcttcttcctgctctacttctacgcgccacactggcggatcagggacgtgccggggccgccggccttgcccgtcgtggggcacctcccgctgctcgcccgacacggacctgacgtcttcggcctcctcgccaagaaatatggcccgatcttcaggttccatttggggaggcagcctctggtgatcgtcgctgacccagagctctgcagggaggttggcgtcaggcagttcaagctcatccccaacaggagcttgccggcgccgatcgccggctcccctctccaccagaagggcctcttcttcactagggatgaacggtggtcggcgatgaggaatacaatcatctcgctgtaccagccatcgcacctcgccggcctcgtccccaccatgcagcactgcatcgagcgcgccgcggacgccataccggcgatggtagttcaggagaacgggctggtcgatttctccgacctctcgctcaagctggccacggacatcatcggtgaggcggcgttcggcgtggatttcggcctcacggcgagcggtcccggctgcgaggccgcggagttcatcagggagcacgtgcactccacaacctccctgaagatggacctgtccgcgccgctctccgtagtgctcggcctcgtcgcgcccgcgctgcagggcccggtacggcacctgctgagccgtgtcccggggaccgccgactggagggtcgcgcggaccaacgcgcggctgcgcgcgcgggtggacgagattgtggtgtcacgggcgcgcgggcgcggccagcacggcgaaaggaggaaggacttcctgtcagcggtgctggacgcccgggaccgcagtgcggcgctgcgggagctgctcacgccggaccacgtgagcgcgctcacctacgagcacctcctcgccgggtctgccaccacggcgttcacgctctcgtcggcagtgtacctagtcgccggccacccggaggttgaggccaagctgctggcggaggtcgacgctttcgggccgcgcggcgccgtgccgaccgccgacgacctgcagcaccggttcccctaccttgatcaggtcataaaggaggccatgagattctacacagtctcgccactgatcgccagagtgacgtctcgacaaacagagcttggaggccacactctcccaaagggcacgtggctgtggatggctccgggcgtcctgtcccgcgacgccgctaacttcgaggaccccggtgcattccggccggagcggttcgacccggccagcgaggagcagcgccggcggcacccgtgcgcgcacatccccttcggcatcggcccgcgggcgtgcgtggggcagcggttcgcgctgcaggaggtgaagctctctatgttgcacctgtaccggcgtttcctcttccggcggtcgccacggatggagtcgccgccggagctccagttcgggatcgtgctcaatttcaagaagggcgtcaaactcgtagcagttgagcggtgcgctgccatgccgttgtagcgtgtacggacggatggcaagggcttgagggtgtacggtgtaccagtggtcacttggacggttagtccggtgtaaacagataaaatgtgttccattgcttgcagtcagtgataacacatctaggcatcttgaatctcgagaagaacaataataatgttggtttgaatccaaattgatttaacc

SEQ ID NO: 35555 - DNA, 555 bp, Zea mays
  Clone ID: UC-ZMROB73055E11_FLI
gctgaaacatgagatctgtcactgggccgcacattatgaacacaagatgcgcctcggatcaaaggctatttttcatctagaagctttcgtggccaagttcatgagcgtttacaaggagttcctggtggcgacatttggttgagcaaaacctcaaggcattgggttgccacccgcgaagcgaagagaggatggcagcggctatcgcactgtatcaggcagtgtcttgcctgtgtagttttgtactgaagttgtgaacgattagcttcattgtgtctgtttaaaccaccgtcaactcgggtcgcccttctgtgagttcatcgcgtccgcctgcacgtggtcgttgatgacgacacgatcagaagttgtgaacgactagtagtttttgcttggttaagaaaaaacatcctgaaaagtaaaaaagtaacagtctgtgaacggaaccgtaacaagaaaaacgaaacaagcagatgccaatcatgctattgcaatttgcaagagtcgtcccagattaaaattcaaatagctgtatccattttacactaccacagtttgatt

SEQ ID NO: 35556 - DNA, 683 bp, Zea mays
  Clone ID: UC-ZMROB73055F12_FLI
acgacatgattcattattgtaatccatccacggtatcttacaccggagcagagggagacaatggaatggaggagtcctaggctacagagccaaggccgcgcgccggcctggacacgcccacacagtggttgcccccacccgtgccactggaagtggtcaccccggcaacggagccccgccatcgccatcgccatcgccatggcacagctcggctgccgtcggcctcctctccgactcctcctccggcattccgtcaggtctccggctccagcggagcctccacggccgccgcgtccgggacgaggtgctccgggcggcaccaggcgacgaagtcgacgagctccttgccggactcgtcgtcgtcgcccgcgggcggcggcgagatccggagcagcacggcgaccgccaccaggaagaagcccgtggagaggagcagcggccagaagaaggacaccagggcgctgagcctgggccccacgacggagatcgagacggcggccgcggccaccagcgccaccgctacggccgcctgcacccggtgctcccacattagctcccctagcttccccttcgccgccaaggccgccggatcggcagcgcggccggacatggggatgggatgggagatctaggggaaagaaagcttctggagcgaggtagtagctaggggtttgccactcggc

SEQ ID NO: 35557 - DNA, 1157 bp, Zea mays
  Clone ID: UC-ZMROB73055G06_FLI
caacaaacaatttcagcgaaaagcttggcgaaggtggatttggcccagttttcaaggggatactacctgacggccaagagatcgctattaagaggctatctaagacctccgcgcagggactggaggagttcaagaacgaggtgacggtgctatccaagctgcagcaccggaacttggtgaggcttttcggttgttgtgttcatggagaggagaagatgatggtgtacgaatacatgcccaacaagagtctggactcatttattttcaacgaaagtaagaggctcgtgttaggctggagtctgcgatacaagatcattcagggaatcgggagagggttactgtacctccaccaggattccaggctgaaaattattcacagggatctcaaggcgagcaacgttctgctagacgatgatttcagccccaagatctcggactttggcatggctaggattttcggtgaacaccagcttcaagaccttacccgtcgaatcgtcggaacctatggctacatctccccggagtacgcaatggagggcaaattctctgacaaatctgacgtattcagtttcggcgtgctggtcctagagatcgtgagtggccgcaggaacagctccctcctcgacgatgagtggtcaatgaacctcttgggctatgcatggaccctgtggaaggaaggcagcgtctcggagctcatcgacccgctcatgggagcaacgtacgcttacgatgaagcctgcagatgcgttcaggtgggtctcctgtgcgtgcaggaggtaccagccgagaggccagccatgcccctggtgctcaggatgctgagtggtgacgccgcgatcccgtccccgaagcaagctgcgtttttcgttgggagggcacctcgtcttcctcctgcggatgacagtagtaatactgaatcggggaatcaattgacgtgcacggatcttcagggcagatagtctcagtctcagtctcagggtgcacaagcttattcacgccgtatgtcgtagccgtacgtggacatggccttgtgttacacagattatattgctgctagtgctcgtgttgtaatttcgctgtatatatatcgtacccgtatgtgtgttgtcgtttgacactgtaaattgtaaatgtgatgctagaactgttcattcctc
